United States Patent Application Publication US 2022/0290142 A1 - sequence listing, part 15

SEQ ID NO: 15346 - DNA, 138070 bp, Homo sapiens
agaggaagaagacggggaggaggcgcgagggcggaaggggacacttgactttccctctggtctcttcgggggccgcggggaagggtcggcgcggacggagctcggggcatgtgggacccccgcgcgttcgagcggcgctggcgggccgagttccccggggcggaggcgccggtcccgaggctggagtcggtgcgggacgcggagcgggagctggagcgccgcagactcaacctggagcggctgcaacaggtgctggcggaggagcagctcaaagcctcgctcccgcaggccgcgctggcccggggcggcggcggagactccggggagcccgggcgccccgaccccgaggccgagtctccccgcggggaccccgggcgccccgaccccgaggccgagtctccccgcggggacctgcccgccgggcccggggcggccggagaagccggcgggggaaggagctgggccgacgccgtccaccggcagctcctgcagccccagctgcggttccgggcccgggaggacgacgcgcccctcggggacccccaggcggctcccggcacggacgaggggggcgacggcggcgaccacgacttcgagatggtggatttcaacgagaagttcatcctcagccactggctggtggccccttgccggttcgggacccgcgagcgggcgcgcagcccccgccgctggatgcacctgatccccggggggcggcggccgcagcgggggacccgcgacctggagcagcgggaggccgaggccaagggccgcccgggctcgcccctcgccgcggaggagacccccgggcgcgagcacctgcccccgtggcggcgccgcaggttcctgcgggtgcccgagcgggactcgcccggccacagctcgccggagagagacagcgacggcagccggcacagctccgaccgcgaggacgacttctccgcaggtgggcgccccccccagaccccgctcgaccccgccgcgcgccccccaccccgggctgccgggaccccttcccggccgactccgcggccctgtttaacctcgagctcggggccggggagcgggcgggaaggagggtgagctgcgcccgtgtaccccaaagccacctgtggagcttagaaaacacgtgcaaggcgacgttaagctcgggcgactctatgaaaatgaactggcggcggcggcagggccggcgcccgggcctttgcgctttgcgctccgtggccctgacatcccccagcccctccctccggcctggcccccgccagatcccttggcgccaccgggtgctgtcacccttctgtctgtcacccctctctgcacacaccccaggggcttcccatctcccggaaatccccgatccttctgagctccgctttcctaaccgcggaaggccgaaccttccactccattttctgaacttagtctcctcttctccaggctgctctgtgtgttggggccacgtgcaaacttcagggaagggccacggccctcaccagccccctctgcggactcgttttcttcttagaaggcggcgcccggcctcttggctttctaggagtctgggagcaagagggcaaggggaggcttaggcccatctcgttttccggctggcctggtgcccagagaccatgtctagtccagcgtcttcactggataaaagaggaaaccgaagctcagaaagattaagtgctcgttggggtgagctgagaccttcaccgggtctcctgtcatctctctcccctcgcatctgctctcttttctgaggacagggcctgatcttagtcatctttgaacccccttctggtagtatgcacggtgctttgcagcagtcaaagctcaacgcataatggctgaataaatgattgcctggaattgagcgtccaccgagctctttctaggtcagggagtgggaatggggctaaggaggagaggtcaggtggggatgggggtggcgtgggagccctttgctgtgtctgtgaactgtcacggtctcctcagccacgcggaaagcagcacactggtggtgtccggttgggtcaagctgcaaccaggaatttaagatgccttcctgctcagtgaaggaggaaaaaaaatcattgatgctgggattgttccaaaatctccattattagattttatctggatgagtttgcatttgaatgaaaaactgtccactttgctaaaagcacagttggaaggtccatcaagtcatctgttttgatcaattacacttattccttagcaaagattggctgtgtttcccacaggcaatgctcttgccgcccatgctggtaacatttttatatgtctctttaacttaagggaagagcctgaagatttcaccctagtgccaagttccaaatgcccttggtggaggctacccaactggccccagctgcttcagagctggctgcaatcctgtctccccccagacccacatctgtcaccctccccggggtgcccagtacactaggcttttcccagggagtgatttttatttctgtgagtcgtcgcctgtctcccttaggacactctagcacatagggcaccttgatgcacgttagaaatcggcgctgcccctgggaattgcaaaagatgctcccctctgggtggaccaatgataacaagagtcaccttcctcaggactacagacgtgagctggggcacgtgtctggcactcacggctttggctagtgatgcctgggctagatttcaggtgccattccagccccctctgcagggcaagctcctgtggcacactgcacagctacatgttcgggttctgcctctgtctccaaagcctcctcgtgaggaagtgagtggggggtggacttgcacttggttacatgcatgcacacataaatgcatagcagcacatgtatatacatggtacactgccacatacatgcatgcacacatatacacacacacctgcacacgtatacacatggtacactgtcacatgcatgcacacacacgcacagcagcacatgtatatacgtgacacactgccacatacatgcatgcacacacacacacctgcacatgtaaacacatggcatactgtcacatacatacatgcacacattcacaccttcacatgtacatacatgcacacacacctgcatatgtacatgtgcacagtgccacataaatgcatgcacacacatacctgcacacctgcacacgtatgtacatggcacactgtcacatacatgcatgcacacacatgcacacctacacgtatacacatggcacagtgccacatacatgcatgcacacacatacacacctgcacacgtatatacatggcacactgccacatacatgcatacacagacacctgcacatgtacatacatgtgcacactgccacatacatgtgtgcacacacaatctaggagaaagagccctcaagcatacagggaggcattagagtggagcgattaagggaaggcgttttcgcactgtgggaaacagctcattgaaattagtgcagttggcaacagaagcacccgggcggtcttccttggccacccttgtcctttgttgcttcatttttctctacagcattccccaaattaccaccgtggatgctgcaattttgcatgtgggtcttattcactgtctccctccagtcaaacgcaagctccaggcaggcaggggtttttctctctcaagatgagtgcattggacacggcgagtattattctgtttttggactccgtttcggttctatgcggacgcgtatgtgtacactgggagctgatgtagaatgtatttcttgctgtgagatgaacaaaaaggtttgaaaacacggaattaaaccatgtttctgaagctagactgcctgtgtgacattgggagaagttatttgacttttctgagcctgagtcccctcatctgtaaactgaggctaataagcacctcttctctcctgctgttgatatgagaaataaatgggtcatatttctaaagcgttttggacgggtcctggcacgtaggaagcacccataagtgttaattaaccactactacaggtcatttttctttgagttgcttcttctttctttttcttttttgtcgagacagagtcccgctctgtcacctagactggagtgcagtggcgtcatctcgggtcactgcaacccctgcctcctgggttcaagtgattctcctgcctcagcctcctgagtagctgggatgacaagagtgtgccactacgcctggctaatttttgtattttagatgagatggggtttcaccatattggccgggctggtcttgaactcctgacctcaggtgatccgcctgtctcggcctcccaaagtgctaggattacaggcctgagccactgtgcccagctgagttgcttcctcagagcttcccactccccagtcattctggatcgcagatggtttggttttccgtggtgcatgtggctggtacaatggctcacacctgtaattctagcactttgggaggctgaggtgggaggactgcttgaggctgggaatttgagaccagcctgggcgatacagtgagaccccatttctttctttcttttcttttctttttttttttttttgagatggagtctcacggtgttgcccaggctggagtgcagtggtgccatctgggctccctgcaagctctgcctcctgggttcacaccattctcctgcctcagcctcctgagtagctgggactacaggtgcccgccaccacgcctgtctaattttttgtatttttagtagagacagggtttcaccgtgttagccaggatgatctcgatctcctgactttgtgatccgcccatctcagcctcccaaagtgctgggattacaggcgtgagccaccgcacccggtgagaccccatttctaagaaaaaaagaatcagtcagttgtggtggtgtgaacctatagtcccagctactcaggaggctgaagtgggaggatcacttgaacccaggaggtcgaggcttcagtgagctatgattgtgccactgcactccagcctgggtgacagagcgagtccctgtctctaaaaaatatgaatgaataagatacgtgtttccccctcccagcaaggctctgactctttctagaacctttcaggcagcagggcaggactcaaggcagaggtcatcttggctcatgagtctctttttgctggattggcctccaccagcaatcacactcattatctgcattcagaggtccttaaggtcaggttttattgggcaatccaggctttgccttagtctcagggtttcagagagagaacacgtgaggcctcacctacagaggcccagaagcagaggtgaaaagggcctccatttccttttagatgaggggcagattcctaagccaaaacacatttcggcttttttgtccgcgcacgatagcaacatcagagtgtaaataagttagtctgccaattcgcttagtatcttccttctagtaccttgtagccttgcttggtaccaggaaagacaaagaccaggccgtgttggtgtggtgaggagtgaggggacgggcagagccaggatcagctgtgttgggtggtgcgtgctgtgaagtcaggcctgcctctccccaggtgtgagaccaccggccagccactgacccttccaagcctccgtctctgacagatgggaataataaacgtcgctaaccctaagggcttacttttgccagctcctgttctgagcacttcgtatgctttaattcatggattccacagagcaccttcgggagacaggcactgatagggtttggctctgtatccccacccaaatctcatctcgaattgtcatccccacgtgtcgagggagggacctggtgggaggcgactggatcatggggcggtttcccccgggctgttgtcctgatcacgaggggagttctcatgagatctggtggttttaaagcgtttggaagtttcccccgcaggcttgcttgctctcctgccgccttgtgaagaaggtggttgcttttcctttgccttccgcggtgattgtaagtttcctgaggcctccccagccttggggaactgtgagtcaattaaacctctttcctttataaattacccagtctcgggtagttctttacagcagtgtgaacacggacaaatacaggtgctgttattatttccattttccatgagaatcacgaggcctggagaacttcaataacattgcccatggtcacccagcttataagtagcccttaggatttgaagccaggcagtctggcttccaggtccatgctttcgcacaccaagctgtaccgcctcaaatattagtacttccctctcaggatagttacgaagattaaatgcaagagaataattaaagagtgtagcagaacacctggcgtagagtgacgatggagggtattcgtgtctctgtgtgtgtgtgtgtgtgtgtgttgttactgattttttgtttgtttgagatggagtcttctgagtagctgagattactggtgcccgccaccaagcccggctaatttttatattatttatttttttgagatggagtatggctcttgtcaccccggctggtgtgtaatggcaagatctcggctcactgcaacctccgcctcctgagttcaagcaattctccagcctcagccccccgagtagctgggattacaggtgcccgccaccacacccggttactttttgtatttttagtagagacggggtttcgccatgttgtccaggctggtcttgaactcgtgacctcaggtgatctgcctgactcggactcccaaagtgctgggattacaggtgtaagccactgtccctggcctattttattttaagacagggtcttactctgttgcccaagctggagtgcagtggcatgaacacagctcactgcagcctccacctcctaggctcaagcgatcctcccacctcagcctcccatgtagctggaactataggcacatgccacgagccggctaatttttaattttttgtagagacggggtctcactatgttccccaggctcgtctagaactcccgggctcaagtgatcctcgctccttggcctccacaagtgctgagattacagatatgagccaccacacttggccctgagactttttatttttaatctttatgggaaatgaatttcctactaagtagtcatgttacctgaacctgattcatctgtaacctgatgggttttctgcccttcccatcagtgactaatgagattgttgctctaggaagaattccttgtgttcagtggatgtctgagtaacttaatttgaaggattgaattttcagcctcagctgtgatagagtaattttttcccatccctattgtgaagagatattaagaagccatttgaggccgggcgcggtggctcacgtacgcctgtaatcccagcactttgggaggccgaggtgggtggatcacttgaggtcaggagttcgagaccagcctggccaacatggtgaaaccccgtctctactaaaaatacaaaaattatccgggcagagtggcacatacctgtaatcccagctacttgggaggctgaggcaggagaattgcttgaacccgggaggcagaggttgcagtgagccgagatcacgactctgcactccagcttggtgacagggtgaaactccgtctcagaaaaaaagatgggatcctccatggtgctgttatcgttactcttcctcgatggtgtctttattgttgctgttataagtccaggaattttcagttggctaaaccaggctactgcttatatttgaatctctccaggtaataaagtttcccaagcttatttgtttgcctttctctccttttttacttaccgctgtccctactccagaggtgttttgcatcttcagaggaagacaacctttccaggtcccctggggtccctgatgcttccccgtcaagccctgtctctcttggcgtctgcaaagccaccatctggcttcttatattctgttttctacgcagatcctttctgccattgctcattccatccggcgtcttttcccgtgccctttctggcgtttgaagagccctcccgccttgacttccccaaaccagcccccaaaccaacccctcctttaagggctgattttccgtggaacctgggattggtcgataggggtttgctgtatatgacaaaactgaaaaaaagtagcttaaacaagatagaggcttatttatctcacatgtaacagaattccagcggccagcagtccggccgagagtatggtgactccatgatcatcaggaatggaggcttttcagtctttctgcttctctgtcctcaagctcacctcctggtccgaaatagctgctggagatccagccatcacattcacatttcaggcaggaattagaagaatgggaagaggagcgtaagagtgagtggtggctgtttgtctgccttttaaggcactttcctgggaacctctcttgacagtttctgtttttatctccttagtcacctcgaggtataagagaggctgggaaatgcagtattttatctgggtgtatggccacctcaagtaaaataggggctctgttacaaggaaaaatagaagaattgatattgcgtaggcagctagtggcctctggcacagccttttccaacgactccaacccatcttgcggttcttagagcgggccccacacggcacaattgtcttattattatgccatctattaatttattgagtcagtaaacaaataacaacggagccacggccctgtgcaaggcagtagccttttacatgtttactgtgaagagctgctctcaaactgagtggttagctgactcctggaaagcggggaccgtcgtttagaccccttttctctcccacaacagtatctttcacagggctgggctcatggccggcactcgataagttcctggttgattttagaatagtcacgaatgagaagttcagtgaaaaaaatacattccctgccttggtttactgtgctggaaaatgctggttgtgtaaggttcgtttttagcttgttctggttttgaggaacccattgcaaggagggtggggagtgggtcacctccaaacatcagggctgtgttgtagtcacagggactcgtcgtccaggtgttggggcagatttggctgttttggaaactgggctctgtataccatactagaatcataagcagaaatccccgtgaccacctgactttgcaccaccgctctgtgtagctgtatttacaccacgtgagtctgtcctgttatttctgcaccgcgtagctgcagagtaaatctgcaagtctttccgcagcgatcctgttcctgtcttcccattcgacgctcgctacagtcggcctgagataacactgtctgaggggaggctgcctggacctcacgtcgcgtttttcaactgctgagaaaaatgattactttaaattttttttttttttagacggagtctcgctctgtcgcccaggctggagtgcagtggtgtgatcttggttcactgcaagctctgcctccgggatccacaccattctcctgtctcagcctcccgagtagctgggaccacaggcgcccgccaccacgcccggctaattttttgtattttgagtagagatgggatttcaccatgttggccaggctggtgtcgatctcctgacctcgtgatccgcccgcctccgcctcccaaagtgctgtgattacaggcgtgagccaccgcgcccggccactttaaaatttttattgacacagagctgggaaggaactagagtataaagatactccagtacctactctctgcaaagcactaggtcaagtgctttacctacgctgtcacgttgaatttttagaacagcctcctattgggcagatggggagactgaggctctgactggtccaccagcaagcccaagatctcttagtgctaagtggtggggttattctttcctcagttttaaaaatcaattattttattttatttttttggggcatggagtctcgctgtgtcgcccaggctggagtgcagtggggcaatcccggctcactgtaacctccgcctcctgggttcaagcaattctcctgcctcagcctcctgagtagctgggattacaggcgagggccactgtgcctggctaacttttgtattagtctgagattttaatgggaggctggtcacataggcacatcgtgctatacaaccagccatggcaagaaaaaataaggaccgcaaaaatgaaataaatccagatgcacatcatcagtcttgacggcttatgcaaaggaaaatgatcagccttacaggatggttcattgctgcaggtgcaaggttattaaatcactaacatagtgagaaggatcctccttgtcacccatgagccaggtgtgtgaggccatggctgggcgtggtggctcacacctgtaatcccagcactttgggaggccaaggcaggcggaccatttgagctcaggagtttgagacctgcctggtcaacatggtgaaaccccatctctactaaaaaaaacaaaaattatccaggcgtggtggcaggcacctgtaatcccagctactcgagaggctgaggcaggataattgcctgaacccaggaggcagaggttgcagtgagccgagatcgcgccactgcactccagcctggacaacagagtgagactctgttacaaacaaacaaacaaacaaacaaacagatagaaaaggatactagaattaagcaccatgcaaacctattgtgttcctgatgtcattgacctagtagtatattaacttcatttgtgagggtggaaggcctaaagatctgattgctcagctctctgaaaaacgcgatttccttggggattttgcacatttggaatgtataaggaattcagagaagtctagaagtacactgcagttttccaaggtctctgttcactggacttgggggcccatcttggtgacctactcatcacttacagcattatttcaaatcataaagaacagactcatcggccaaagtttgaaatcgtccatttgtaatttggggacagctgactataatgagatggttttggcatgccgaatgttgagcagaagtgtaggttacacacatactttaatcagtatgttcccatgagactaaggatcattcttctcattctatattaacaagtctagagacattgagtcactggtctgtagtcacacagctcacaaaggacagagccaggattggaacacagctctttctggggccaaagttattctctactccagctcaccactaactgttaacctctccagactatagcttttcactttaaaataaggtgactggactagataattttcccgacagacctaaattttatggacgccagtaagttaaatgagctgggactacgtaccaagtaaggttaagagcctggctttgaatcagagaaactgggtttggatccaggctgtagccacttgttattttgtgtccttaaccaagttaattcacctgtctataagcttattttcttttctatacaatggggatcattgtacctcacttggtgttgcaaaggttaaatgaaataatgtagcatggggtccggcatgtggtgagctccgtataaatgaaaacagctactggtgtgatgatcaagagcatgctgtccgaggtagcggattacttgaagtcaggagttcgaggccagcctggccaacatggtgaaaccccgtctccactaaaaatacaaaaattagtcgggcgtggtagcacgttcctgtaatgccagcactttgggaggccgaggcgggcggatcacctgaggtcaggagttcaagaccagcctggccaacatggtgaaaccccgtctctgctaaaaatacaaaaattagctgagcatggtggcacgtgcctgtaatcccagctactcaggaggctgaggcaggagaatcgcttgaacctgggaggtggaggttgcagtgaactgagattgcaccactgcactccagcctgggccacagagcaagactccgtctcaaaaaaacaaaacaaaataaataagagcacgctgtctaggaccacattgcctgggttcgattcacggctctgccacttaactgctatgtgaccttgagcaaattcctcaacctttttgcacctcagtgtttatatttgtaggctaggggacgatgataatataatatcaatagtcaagtaagttggcgtgaaggttaaataagtcaatatgtatataacataccttgaaccagacctgacacatggtaaccactcagtacgtgttggttaattttatgattatccccactgttactagtttggccatgcttcttgctgaaatagactataaaggtgaaacatggtatcttgctcatcttgttgcctggtcataaccttaattgaaactgaaaatcctgtaatttgaataatccaagagctggaacagcgaagcatccaattacagacgcgtcacggctgcagccttgggggggacggtgaggcggccgcactgtgctctggggttggggtcctattacggagaaagcctcgttttgtaggcagctgcctcgccttctgtttggctgcataattgcgcctttccgttttattttaaagcatcttgaggaatccagagcccactcctgctgacagcagggaaagccgccgcatgtcccatctctaatgagcctccatgatgctctgtggccccacctaggcagcaggctgggctggcatccgctggctctctgagcacagctcaccatgctgggcttcattatggggctccctgaacacccctaggatccccccacgcctgtcctcattgtctcagagggcacagagtggcttcctgaatgccgagcttgttggtaacctttgtgggctggcagtgagcacgcagaaattaattattcatatcaatgggctgaaggagctgttgttcactgaggtgactcccctttggccaccagacccagagttccccagggtctttagacaggcagaggacagcgcagtccttagagacagctgcaacagcagggtggcacgtggccggccccaggctaagtgcagtctgctgatgtgctttgtttgggctacagagggttaaaacaaaattggatccatttaaaaccaggttttacctagcaatctggatttctggattttcttgaaagatgggaagatgggcaatgtgaatgggaggcattagttagagccgacgggccccttcaggctggacgtgattttgccaatggcgtcagctttcctctggcccctttctccacttctgacgtgagaggagtgagtctagtgcagggaacagaggaagactcggagctgggtttgcggctgcctctgctactcactcctgcgtgactctaggcaaatgacacagcccctgtgggccccgctctcctcctctggagcagggggttataacagcttccctacctcgcagatttgtgagaactgagcaagttgatataagggctgagcctggcacatagtaagttctatttaggtgttcagtttctttctttttttttttagtatttattgatcattcttgggtgtttctcggagagggggatttggcagggtcataggacaatagtggagggaaggtcagcagataaacaagtgaacaaaggtctctggttttcctaggcagaggaccctgcggccttccgcagtgtttgtgtccctgggtacttgagattagggattggtgatgactcttaacgagcacgctgccttcaagcatctgtttaacaaagcacatcttgcaccgcccttaatccatttaccctgagtggacacagcacatgtttcagagagcacgggggttgggggtaaggtcacagatcaacaggatcccaaggcagaagattttctcccagtacagaacaaaatggagtctcctatgtccacctctttctacacagacacagcaacaatccgatttctccttcttttccccacatttcccccttttctattcgacaaaaccgccatcgtcatcatggcccgttctcaatgagctgctgggtacacctcccagacggggtggcggccgggcagaggctgcactctgggcactttgggaggccaaggcaggcggctaggaggtggaggttatagtgagccgagatcacgccactgcactccagcctgggcaccattgagcactcagtgaacgagactccgtccgcaatcccggcacctcgggaggccgaggctggcagatcactcgcggctaggagctggagaccagcccggccaacacagcgaaaccccgtctccaccaaaaaaatacgaaaaccagtcaggcatggcagcgcgcgcctgcaatcgcaggcactcggcaggctgaggcaggagaatcaggcagggagcttgcagtgagccgagatggcagcagtacagtccagcttcggctcggcatcagagggagaccgtggagagagagggagagggagagctctttcttttcttttttttttttttgagacagagtcttgctctgtcacccaggctagagtgtagtggggagatctaggctcactgcaatctctgcctcctgggttcaagtgattctcctgcctcagcctcctgagtagttgggactacaggcacacaccatcacgcctacctaatttctgtatgttttgtagaaatggggttttgccatgttgcccagggtggtcttaaacacctggactcaagcaatctgcctgcctccacctcctaaagtgctgggactataggcgtgagccaccccacctggtcaagagcaatacttttttggtctgagtattttatttggagagaaatagaacttggccattgagcttatatacaccgagatagctgccacattacagggaaaaactatgtacaatcaaatatatatatttttttctttgaggtggagtttcgctcttgttgcctaggctggagtgcagtggcacgatcttggctcgctgcaacatccgcctcccaggttcaagcgattctcctgcctcagcctcccgagtagctgggattacaggcatgtgccactacgcctggctaattttgtatttttagtagagatggggtttctccatgttggtcaagctggtctcgaactcctgacgtcaggtgatctacctgcctcagcctcccaaagtgctgggattacaggcatgagccactgcacccggccaggatcagaatttttatattcaaatcttaaatctctcctttatattcctttaaattgctattaactgtagatattcagcattgttagggtaatttaaacttgttaaggaataatttaaatattttgcctaagtcatccctggggtggtggttactcatggagaggaaatatatatatatacacacacatcctagtatcatagattccaaaaactgatgaaagccaaaataaatgttcattttaggttgaagggacctgaagttagcttatctttaggtttaaggtggtggtggggggcggggaagtccaagtcctgtgtaacatttcacatctcaggccgggagcggtggctcatgcctgtaatcccagcactttgggagcccgaggcgggtggatcacaagatcaggagttcgagaccagcctgaccaacatgatgaaacctcttctctactaaaaatacaaaattagccgggcgtggtggcgggcgcctgtaatcccagctactcgggaggctgaggcaggagaatcacttgaacccgggaggcggaggatgcagtgagccgagattgtgccattgcactccagcctgggcgatagggcgagactcggtctcaaaaaacaaaaaacaaaccatttcacatctctccaaaatagaaacagcaccttagactgccttgttttcacagttttgtcgctttggaaccatagagtctgtcatctttgaagaagtgaaatcactgtggggttaagacagtatctttgcacagtttgcgtgcaatctctgagaagctagcacagaaggacttaggagttaagaccgtaacctttggccgggcgtggtgcctcacgcctgtaatcccagcactttcggaggccgaggcgggtgagtcacgaggtcaggagtttgagaccagcctgaccaacatggtgaaaccccgcctctacttaaaaaaatacaaaaattagccgggcatagtggcatgcacctgtaatccaagctactcaggaggctgaggcaggagaatggtgtggatctgggaggcggaggttgcagtgagccgagattgcacccctgcactccagcctgggggacagagcgagactccgtctcaaaaaaaagactgtgaccttcaagctctgcagccttaattcacaccaaatagtacctgcttagtcacctaaactatggccacgtcttcctgctctttggatgccccttagtttgctagttgggtctcaaatcatggtctttaggtgaattaatggccggcacagtgtttgggagaaaaacagaatctgcagcttcacatctcatcatttcctgggctgagctgtctcccaccctgagcatattacaaaattaacaggttttagaagctgaaaagtggaaataaccagctttcgtttctgggctgcagcttgtttagtgccacatcttggagaaagctctgtgcgtggttagatgggttgactctgattgtctgcagctccattcaaggatttgttgggggaatttcacactcctttagctgtttggtaaaagggtgaaaaatttcttaagtccaaattcccatcccagatacagcttctccccaagtatctctttatctctctctctcttttttttttttagacagtgtctcactctgttgcccaggctggagtgaagtggagagattttggctcactgcaacctccaacttctgggctcaagcgattctcctgtctcagcctcccaagtagctgagattacaggcgtccgccaccacacttggctaattttgtacttttagtaaagatggagtttttccatgttgatcaggctggtctcaaactcccgacctcaggtgatctgctggcctcggcctcccaaagtgctgggattacaggcgtgagccaccatgcccggccaatttttgtatttttagtagagacgaggtttcaccatgttggccaggccagtctcgagctcctgacctcaaatgatccgcccgcctcagcctctcagagtgctgggattacaggtgtgaaccactgtgcctggcgtctctttttgttttgttttgttgttgtttttttttctcttttgagacagtgtcatggtctattgcccaggctggagagcagtggcatgatcagggctcactgcagcctcaaactcctgtgctcaagcgagcctcccacttcagcctctcaagtagctgggaccacaggcatgtaccaccacacctggctaatccttataaaacttttgtagagatgaggtcttgctctgttgcccaggctggtctcgaactcccagactcgagagatcttcctgccttggcctcccaaagtactgggactataggcgtgagccaccatgcccagcctctttgtatctcagtttaacactgtttcattcttcttcttgttatagtaatttttttttttttcgagatggggtcttgctcttgtcgcctaggctagagtgcagcggtgcaatctcggctcactgcaacctccacctcccgagttcaagcaattcttgtgcctcagcctcccgagtagctgggattacaggcttgtgccaccacaccaggctaattttttgtatttttagtagagacggggtttcaccatcttggccaggctggtctcaaactcccgacctcaagcaatcagcctgccttggcctctcgaagtgctgggattacaggcatgagccaccgtggccggccttgttacagtaatttacatattgttcccaccttgctagcattgctgaaggcagataccaccttatggcagtaaaggatgcaggttctggggtcagactgcccacgtttgaacctcagctctaccccttactagctgtgaggatttaaaaacgttatttcacgtctctgtgccttggatatcttatctgtaaaatggatgtgttaatagtgtctatttcctggaatgttgtggggattaatgaggaaatctatggtaaaaaaatcacggtgaataatcaatcaataatgactcctatgattcacgctttgttttctaagcacctgccacaggacctggaataatttagataaggactgactgcaagtcagacacctctgcaggaacagcagaagaagatcgatttttggtggctagctccactgaaatggaatcccactgggtcagagcaaaacctggaatccatatttttatttatttttcattatttatttatttatttatttatttattcatttttttgagacggagcctcactctgtcgcccaggctggaaagaagtggagagatttctgctcactgcaacctctgcctcctgggctcaagcaattctcctgcctcagcctcctgagtagctgggactatgggcgtctgccaccacgcctggctaatttttgtattttttagtagagacggggtttcaccatattggacaggctggtctcaaactcctgacctcatgatccgtccgccttggcctcccaaagtgctgggattataggcgtgagccaccacgctcggccaggaatctctgtttttaacaagctcgggagatttttcagcagccagtccagcaccccagagtttggcaggctttgccaagtgcttgatatgaggtggtaaatgtctggcacctttaaaatatagggccctttccgtccatctggccctacaggttgatgttaaaaggatgcaaaaatacggttctaaatgtccttaagaggctaaggttggtctaagcaaagcatggaggaaaaagcccttttgagtttgtgtgtgagtagataggagttgccagttggttgataaagtgataaagtaatccttttgtgttaggagccaggaagcagagagagaggaaacagcccaaagtgatttttggcttgagagcaaacacaatagcagaaagctgagtgacacctggacgatagtgcagagaagctgagtgacacctggacgatagtgcagacaagctgagtgatacgcggacaatagcatggagaaactgagtgacacctggacgatagtgcagagaagctgagtgacacctggacgatagtgcagacaagctgagtgatacgcggacaacagcatggagaaactgagtgacacctggacgatagtgcagagaagctgagtgataacgtggacgatagtgcggagaagctgggtagcagagatggggtttcaccatgttggccaggctggtcttgaactcttgacctcaggtgattcacccacctcggcctcccaaagagttgggattacaggtgtgagccacggcgcccggcttaggtcagaactttctacgcaggtaaaaagtgacagcccccacagtaccaacacagctgggctgagcttccgcctctctagattctgttactttctacctctactttctccctgtctctctaagagatcagccgtcactaatttagtgctttactaatttaggtgtctttgccatgaaagatatgtgttttctttttttaatttgttggaggttctgaaggcactttggcatatgtatctgttttcttcagcagcaaagatcatcgtggagttaagatggcagctttgttgtgattcgtaaatttgctgaatttgtaaataactggggatacctgctggactttgataaatgcaactttttccagtgcttaaaagaattgctgcagaaaatttagagtgattatacctccaaactgctcaatgaaaaaggtcaacaaaacagtataattatctatgtatatgtgtaactcgtatgtgtgtggggtgtccacgtcaccaagtattagaaagttaagagagaaggatgtggacaataaaacaccacccacttcaaagcaggtgcagagagtaaggcattgtatgtctgattttatgaccacgagaggtcagttctgggctaccataaactctatctggaagaaagggattcaggcaccattcaagcaaactttggctgagcatggtggctcactgggaggccgagacaggtgaatcaccttagtccaggagttcgagaccagcctggccaacatggcaaaaccctgtctctattaaaaatacaaaaattagctaggcgtggtggcgcatgcctgtaatcccagctacttgggaggctgaggcaggaaaatggcttgaacccaggaggtggaggttgcggtgagccgagatcacaccactgcactccagcctgaaggacagagtaagacggtctcaaaaaaaaaaagaaagaaacaaacaggttaaaagagaaggatgtgaacaataaaacaccacccacttcaacgcagctgcagagagtaaaacactgtatgtctgattttatgactgtaagttccaggctcccatgaactctatcaattccaagctcccatgaactccatccggaagaaagggattcaggcaccatgaaggcaaactttattggcacctgcattgagccgagcagtgaaccaagggaaagagttcaaaattctgcttcaggagccttcagtgtaactgtggtactaggctagcaaacaggtgttcactacatacatgtatgtacaagagagacccatactaagcacttgccgtctttaactgacttggcaggcacaaagcaggctttttttttttttttttgagacggagtctcacactctcacccaggctggagcgcagtggcatgatctcggctcactgcaagctccacctcccgggttcatgccattctcctgcctcagcctcccgagtagctgggactacaggcgcccgccaccacacccggctaattttttgtatttttagtagagatggggtttcaccgtgttagccaggatggtttcgatctcccgacctcgtgatccgcccgcctcggcctcccaaagtgctgggataagaggcgtgagccactgtgcccggccggcagctccctcttgaacctctcccttacagagtcaacaagggagcagtggtcagcacttctctaccgcgacgttagcagagaactcgaatctcattagtagcaaggacttctctgccacagatgtggctctgagactggttcttcacaggctgacaggggaccgtggcatgcagtgatggtgtgggaatcacccgatcgagacgcagcacatgctgctgctgttcctggagaggagaatgtcaattcctcagctggccaagggcacttcacactggggtgccctgcgttgctgctcctgacacctagttccttcgggtcacaggcagagctgcctcctgtgtgtcagttgcccaggaaggccaggaagaacaagttctagtatccaccatttcctttccacccagggactcatctgggggtcgagcaacttctcttttataaacactcataactcaatgggtctgctacaccctcattcctagacaagagcagggaggccatctctgatatcaatggccccaaagtggttgatctggacaggtgcggtggctccggcctgtaatcccagcactttgggaggccgaagcgggtggatcacctgaggtcgggagtttgagaccatcctggccaacatggtgaaaccccatctctactaaaaatacaaaaattaggctggtgcagtggcaggcgccttgtaatcccagctactcgggaggctgaggcaggagaatcgcttgaacccgggaggcggaggttgcagtgagccgagatcgcacctctgcactccagcctgggcaacagagcgagactctgtctcaaaaacaaaacaacaaacaaacaaaaaacaaagttactgatcttctaagagaggctgtgcaaggaattacaaagtcataaggtctgtgattccaacagtttccttttttcccccacttctctttttttttttttttttgagacggagtttcgctcatgttgcccaggctggagtgtactggcgccatctcggctcactgcaacttccacctcccgagttcaagcaattctcctggctcagcctcctgagtagctgggattacaggcgcctgccaccattcccagctaattttatatttttagcagagatggggtttcgccatgttggccaggctggtctcgaactcctgagctcaggtgatccgcccgcctcagcctcccaaagtgctgggattacaggtgtgagccactgcacacggccaaatatatgcattttaaatacaaatagatattgtaaaattatccttcagaaaagttgatccaatttatattctcaccttacttctttttgagagaatctgttcacatttttttttttgagacacgtctcactgttgcccaggctggagtgccagtggcacaatcacagctcactggcacccttgaactcctgggctcaagcaatccttccaccttagcctgtggagtagtagctgggactataggcacgaaccacaatgcctggcttttttttttgtttgttttgagatggagtctcactctgttgtccaggctggagtgcagtggtgagatctcagctcactgccacctccacctcccgggttcaagcaattctcctgcctcagctcccgagtagctgggattacaggcgcatgccaccacgcccagctaaattttgtattttaagtagagacggggttttaccatgttggccagggtggtctcgaactcctggcctcaggtgatccacccaccttggtctcccaaagtgctgggatgacaagcatgagccaccgcgcccagcctaatttttgtatgtttttgtagagatggagtttcacaaatttcacaaaatatttttggagacatggtgaaacccaatatctggtgagctggtttgcagaccaactcaggctagcctcaaactcctggactcaagcaatccacccaccttggccattcaagatcaacccatctaaccacaagcacagagctttctccaagatgtggcactaaacaagctgcagcccagaaacgaaagctggttatttccacttttcagtttccaaatgcctgtcatcctggctactcaggaggctgagacaggagaaccgcttgagccctggagtccaaggctgcaagtaagctgtcatagtgccactgcactccagcctgggtggcagagcaagaacctgtctctaatattaataataataaattaatgtagtgaatcatgcagattgtctaatattgagctaggcttgtattcctgggataaaccctgtgtgatctaaggggtcaagggatgctcggttgtgcacgcaacaacccagtcacgtggcagttacactataaacgcatcagtgtctaacccatcacagtgatgtgacgtcagtggtcacatgagagctcactgcagcctcaacctctctggctcaagtgatcctcccgagtgtgccaccacacccagctaattttgtttctcttttttttgagacggagtctccttctgtcaccaggctggagggcagtggcgcgatctcagctcactgcaaccgccacctcctgggttcaaataattctcctgcctcagcctcccaagtagctgggactacaggtgcgcgccaccacgcccagctaatttttgtattttttttttcttttttcgagtcggagtcttgctctggcgccaggctggagtgcagtggcgcaatctcagctcactgcaaccgccacctcctggttcaagtgattctcctgccgcagccttctgagtagctgggactacaggcatgcaccaccacatccagctaatttttctatttttagcagagatggggtttcaccatgttggccaggatggtctccgtctcttgatcttgtgatctgcccgcctgggcctcccagagtgctgggattacaggcgtgagccgccgcgcctggccaattttggtattttttgtagagatgaagtcttactatgttgtccaggctggtctcaaactgctgggtcaagcagtcctcctgccttggcctcccaaagttctgggattacagacgtgagccactgcacccagccaatgcattttcaatagaaaagattcaaacgctactgaaatcttggaaatgaagcctgtcatttcctgtcacctctccccccgaccccactcctctctccagaaggagcctacagaacaggctgttacagatgatacattctcaggcctttcacggcatgcttagaagtatttgtatctcatttgtgcactgtttcatttattctcacaaccagagaggtttgtattattagcccccatttgatgtatgagaaaactaaggcttaagaatattgggtaatgtgccaaagggcccagagctcattacagtctcttaataatggggataaaaccgggtatggtggctcaggcctgcaatcccagcactttgggaggctgaggtgggcgggtcacctgaggtcaggagtttgagagctgcctggcttacatggtgaaacctcatgtctactaaaaatacaaaaattagccgggcgtggtggtgcacccgttatcccagctacttgggaggctgaggcaggagaatcactttaacccaggaggcagaggatgcagtgagccgagatcacgcccttgcactccagcctgggtgatagcgcgagactcagtctcaaaaaaaaaaaaaaaaaaaagaaaaagaaaaagaaaagaaaaaaagaggttctgagaaatgtgtagatgatttcactgttgtgcaagcatcatagtatattttacacaaacctaaatacaaaaatcacctggctgtatatttcacacaaacctaaatactaacatacagcccaggtacatagtaggctcaatggtatagcccactatgtgatatagatatgatatatgatatagacagcttactgctcctaggtacgaacctgtatagcaggtcactatactgaatactataggccgttgtaacacaatggaaaatgtttgtgtatctgaacacgtctaagcgtacaaaaggtacaggaaaaaatacaggattataatcttctggaccacctttgtatatatagtcctttcaggtcatatggctcaggactgtagtttgaacccatgtttctcattttttttgtttgtttgttttttgagacagagtctcgctgtgtcgcccatgctggagcgcagtggcgcaatctcggctcactgcaacctctgcctcccgggttcaagcgattctcctgcctcagcctcccgagtagctgggattacaggcgcgcaccaccacgcccggataatgttttgtattttagtagagacggggtttcaccatgccgtccaggctggtctcgaactcccaacctcaggtgatccgcccgcctcgtcctcccaaagtgctgggatgacaggcctgagccaccgcgcccggcccacattaagtctttaaatgccccgctggggactaagatgcccctggtggaatccaggagccctggtggtggcttctgcggggcccaggccgagatgagggagaggccgggaggagtggactgggctggcccgtgggccgggggtcggtggtttctcgtgccctcccctcggctccagggatttcccccgtgaagccggcaccgaggtccggacaggaaagcactttgagccatggatttatgtaaaatccagatgaggagctggagctggtttctcctcccgcgtcaggcggcgccaccggaacgtcctggcgggacacacactcacgccacaccccctggcgggtctctcgccacgcggagagagcgcccgagcccccttcgccccgcgaggttcccagggtgtaggcaggcccggggggcgccatccgccttcctgcgcgagtcacggacacgacccgggccctgaaggcgtctgcatcaccgctcccgccgaaacctcagaaaccgaggccgaacactcgccgggctcctcgcagcggcggcgggcggtgactcaggggttcccgactggattaaccgcgcctggaggactaggcagcccgggcgacttaccgcagcctcatcacgtgaccaggacctgcggcccccgcccccgcagactccgtccccgcgggccccgcccccgcagactccgtccccgcgggccccgcccccgcagactccgtccccgcgggccccgcccccgcagactccgccccccgcgggccccgccccctcaaggccccgcccccacgggggaccgccccgcaggctcctccccgcggaccccgccccccatggactccgcccccacgagccgggccacgccccctgaggactgcgcgggagcctggctggatccgaagccccttccaaggagtctccccaggatcctctgctcacaccggcaagtgaaagaccttttaaaaggaatggggctgggcgcgatggctcacgcctgtcatcccagcactctgggaggccgaggcgggcggatcacctgaggtcgggagttcgagaccagcctggccaacatgatgaaacctcgtcgctactaaaaatacaaaattagccaggcgtggtggtgcatgcctttaatcccacctacttgggaggctgaggcaggagaattgcttgaactcgggaggcggaggttgtagtgaaccgagatcacaccactgtactgtagcctgggggacagagcaagactccatcttaaaaaaaaaaaaaaagtaatggcaaaaacagcaattacttttgcaccaacctaaatagtagggttcgaggagagctgagctgaccactttctcccaagcagtagaagcttccttgttgaaacaagagggccatttgtctccaaggtctctgtttctagccgcagtgtttcctaaccctaaacctaggcctatttcatcaagggtcagcggattaggagtagatggctatggatcaccttccctttcctaacagggtcttcatttcatgcaacatttgctgccagctcatatgtgaagatgtgaaaagggggcagctggggcctttcagaagagggtcaggaatctgagcctctttgtccataggggaaatactctgaatgcaacttcatcatgagtgggcacgtgtgtgtttggggactgttcgctgaagagtataggaaagagacagccgggatcccctttgaatttgcaatttagaatgagtgatctaagatgagtaataagaggttggagattctcttttgaatgtgcgctctggggctctggtatggctgcatctgttataaagaggttcttgggccaggtgcggtgtctcacacctgtaatcccagcactttgggaggccgaagggggtggatcacctgaggtcgggagttggagaccagcctagccaacatggggaaaccccatctatgctaaaaatacaaaaattagctgggcatggtggtgccccaacctgggcaacagagcggctacagagccagactctgtttcgaaaaataaataaataaaaggaggcaaagggattatgtttttctagatggatcttctttctcttaatctagctgctcttgaatagcaaagtatgggaggaacacacttatgaagaatagcgttgctttgactttttaagaaacactagtaagcaggatgggcgcggtggctcacgcctgtaatcccagcactttgggaggccgacgcgggcggatcacgaggtcaggagatcgagagcatcctggctaacacggtgaaaccccatctctactaaacatacaaaaaaattagccgggcgtggtggtgggcgcctgttgtcccagctactcaggaggctgaggcaggagaatggcgtgaacgtgggaggcagaggttgcagtgagccagagatcacgccactgcacaccagcctgggcaacagagcgagactctctcaaaaaaacaaacaaacaagcaaaaatgctagtaagctacctctgcactgtcaatgagacacccccagaaaacaaagcgtgtggttttgctttggtgaccttcacaccacgcacaatatcggggttgccgtcatctcttcggcatcggggggcctgtttcactttttgtcttgtttttaccctccggagagaggtgttgtgtgtgtgtgtacccgtgttatacacgctcacataaaagtcagccagcatgatgataatagctgatactgcgtgagtgctaacgagggaacaggcgctgtgcggggtgtcttcttttcacgatctcgctgggtcttgttaacaatctcagttaaagcacttaccgtcattactgaagagactgaagctcagagaggttcaatacgtcgtgacaccaggccgtgaaccgggtctgttctgtctctagaacccacatcctgacctaaagcattgtgctttgcatccggagcagcagcctcgtggacaccggccccgtgaagctattgctgatgtgaacagtcttgagtgatgcggctgcctgaggggcaccaaagcctccccggctgctcctctgatcattttattcctatcagggtttggggcttgggccctgaatccaaacagaactttccctttacaagtcttcctgtactttcctccccccatcctccttagtttccattgctgaaaggctgatgtcattaacacagcccctcctgaggcaggtgggtgtccctggccaaccccaaggctttctcccagtctctaagctgtagccctgcccagaggaaggaagagccccaggaccttgtcaggagcaattctcagctttttactggggatgttatagatgaggctttatctctggtgtccctggacggtgctgataacccaggtcatgttcctgtctccccgaagtaaccggagacatcttgcaccatgaacaaaccgggatgacgtgcccgggtttccacctggggatccatctttgtgtctgcaccacggaggccccgaataaagtgaggtcatagctcatctaggtgaaacttgttctgcttgatgtaacgggaggaggggagaaaatgaagctggactggccaaagatcaggctgagaaattcctgggcacagtctggagagccactccaattacacctgtccctccattttcatgggggattggccccaggacccctggcagataccagaatcccaggacgcccaagtctcttatataaggtgctgtaatagttacatgtaacctaatcacgtctcccatagactttatttaaaaaaattttttttaatggagacagtgtcttgctatgttgcccaggctggtcttgaactcctggcttcaagcgatcgtccgaaagtgttgggattacaggcgtgagtcaccatgcctgcccccgacccccgtgtactttaacttatctctaggttatttttaatacctaatacattgcaaatgctatgtggttgttatgctgtattatttgtattttttatttttgtggtgtttttttttaattgttttcctcccaaatatttttgatctgtggttggttgaatctgagggtgcccttggatagggatagtgtggcttccagccaggtagagaaggccaactataaaactttgtaaagagctctatggttgcagcacaccaacatggcacatgtatacatatgtaacagacctgcacgttgtgcacatgtaccctaaaatttaaagtataataaaaaaaaaaagaaaaaagagctctattatatgcatacaaaaaaagctggaaaatgctaattggggtggtgtattttatgggtcacattttactcttttattgtctaaaagtttttaaaattctggctttatgacttatatgacagaaaaaaaaaactgaataaacttatagttttaaaaaattggccaggtgctgtggctcacacctgtaatcccaccactttgggcagctgaggtgggtggatcacctgaggtcaggagttcaactgaggtcagcctggccaacatggtgaaaccctgtctctactgaaaatgcaaaaattagccgggcgtggtggcgggcgtctgtaatcctagctacttgggaggctgaggcaggagaattgcttgaacccgggagggggaggctgcggtgagagtccgtctctcccttccacccccaaaaatatcccaccagctacagtgagctgtgattgcaccactgcactccagctggggaacagagcaagatcctgtttcaaaaaaaccagaaaacaaaaaccccaacagcctgtatgttttgtaccttccgtgtggcctcttggtggtctatgacatgggtacagatgagcccctgccagtgtgttaattgcagcgtggcttctgagccagcagcccgggtgatcttcctagccgggccctggctcactgcctctgtttcccccagtcttccctggcacctgcagagccagagagaggttttgttttccagaaccaggcattcgtgaccctgaccactcccgagcaaagttttcacaccttccccggccccctcagaggaatgaaggtctgggaggagatagggcctcgtccttggaaccaggcacctctttttttttttttcgagtcagagtcccgctctgttgcccaggctggagtgcaatggcaccgtctcggctcactgcaacctctgcctcccaggttcaaacgattcttctacctcagcctcccaagtagctgggattggccaggcgcggtagctcacgcctgtaatcccagcactttgggaggctgaggcgggcggatcccaagttcaggagatcataaccatcctggctaacacggtgaaacccacctctattaaaaaaaaaaaaatttgccaggtgtggtggtgggcaactgtagtcccaggtactggagaggctgaggcaggagaatggcgtgaacccgggaggcggagcttgcagtgagccgagatggcatcactacactccagcctgggcaacagagcgagactccatctcaaaaacaaaaacaaaaaaccaagtagctgggatcacaggtgtacaccgccacgcctggttaatattgtatttttagtagagatggggtttcaccatgaggccaggctggtctcgaactcctgatctcaggtgatccacccgcctcagcctcccaaagtgctgggattataggtttgagccactgtgcctggccggaaccaggcagctttgattgcagaatcaggcagaggccaggtgggaagttgccgtctgttggtgtctcaggccaagctctccttgtccagacagaacctcttcctttttggtcctgaaagtcacactaaaaatcagcagcagctcggccttgggcaacgtgccacgtgtaccgacgttggggttagtggtctttgcaggaagtcgaggttgtttgtgggcctggaaggaaatgtggcctgcctgcatgtacagcctcatgtgtggcctctgggagggggagcagacagaacccgcagccccagagactgggaggcttctctgtggcagcttcctcatttctggttagttgtggcagggggcagatacagtctcttttgcaaaagcagctcctttatgtccagaaggcgacagctcagctctcctttagggcccccaaagaactaacccacagcgtggggctgcggccagccgggcgcagcagcagcggcagtgttcctgtctcagctgcctgcagcatggctttgatctgacagtcagcagggtgtatttgcccccaaagccagtggtctgaggagcccagctccagttaggtcttaggtggggacaccatagatactgctctctggggaaaaccaagtcacggtctggtttgggtgagcgctgatcttccctccagtgtgatcccaagctccctgggatgttggctatagggagcaatcaggagccactccccaagactcaggggaccagcctggggtccaggaaagaagacttcccagcaccctccccctctctgctggtggtctggcactcccctcatgtgacaggcatgtggcttttgggaggaaagaatctttcacaatcagacagaaacagcaactgggaaaataactcatgcaggggtttgggcaatgagtgtctagaaggctgtgggccacgagaaggggattagggtgaggtttcatcagagctgtggctaagatccgaggaggctcctagagctcaaggcttcagaatgaccggtcaggagccagagggatggtgtctttctctctccaacctctcagaccaaaaatggggcatggggctgaccctgcccaatttttttcaaacccgcagagacagaggtttgaaatcattcactccagcattaagtggaggtggctccagctcagagcctccagccaaaccctccctgcgccacagcaggagatcacggcctgtttcccagaggctctgaaataggagtgactctccttaaagtgctccttgcaatgctcatccgagcctgggccaggcagggctgggggctgccttgaagaaagagatgcccccgagatccgataccctctggagcgttgcaggatgcgtctgtccaggaggcactgcaggggagccggggttcccggagcatttgggaaggtttctgagcagcacagggtccttccttaggaaggcggatcttggccgggtgcggtggctcacgcctgtcatcccagcactttgggaggccgaggcggatggatcacgaggtcaggagattgagaccatcctggctaacacggtgaaaccccatctctactaaaaatacaaaaaattagccgggcacggtggtgggcgcctgtagtcccagctactcgggaggctgaggcaggagaatggcatgaacccgggaggcggagcttgcggtgagccaggatcgcgccactgcactccagcctgggcgacagagcaagactccgtctcaaaaaaaaaaaaaaaaggaaggttggatctcctgtagcttcctgtggtgccgtcttctcccagggactcgagccttgttcagagcactgacaggatttttcagaaagttctgtgtgtgtggctgctctttggtaagcccagggcaacagagtcatcaacatttagggagggggtgggtgaggcaggatgtagagttaatacccagttttgtcctatgttcctctgagaagttagctaagaaatcttttctaaattaaatttaattaattaatttgttttttgggccagagttttcactcttgtcacccaggctggagtgcagtggtgtgatgtcagctcactgtgacctccacctcctgggttcaagtgattctcctgcctcagcctcccgagtagctgggattacaggcacgtgccaccatgcccagctaatttttgtatttgtagtagaaagagggtttcgccatgttggccaggctggtcttgaactcctgacctcaggtgatccgcctgcctcggcctcccaaagtgccgggattataggcgtgagccaccgcaccttgcctatttttttttttttttttgagacagaatctcgctctgttgctcaggctggagtgcagtgtcgtgatctcggctcactgcaaccttctccttcttggttcaagcgatcctcgtgcctcagccacctgagtacctgggattacaggcacctgctaccatgcctggctaatttttgtatttttagtagagatggggttttgccatgttgcccaggctcgtctcgcactcctgacctcaagtgatccctgacctcaagtgatctctccccacaatcccaacttgccttcccaaagttctgggattacaggcgtgagccaccgcgccggccaataattttttttttttgagacagagtctcgctctgttgcgcaggctggagtgcagtgacacgatctcggctcactgcaacctttgcctcccgggttcacaccattctcctgcctcagcctcctgtgtagctgggactacaggcgcccaccaccacgcccggctaatttgttgtatttttagtagagacggggtttcaccgtgttagccaggatggtctcgatctcctgacctcgtgatccacccgcctcggcctcccacagtgctgggatgacaggcgtgagccactgcccagccaataattttctttaaaatgctccttacgctacttgctgagcctgggtcaggcagggctgggggctgcctttgggagagagatacaccagagactagttaatcactgtagcagtagaaaacacccttaagggccgggcctgatggctcacgcctgtaatcccagcacttggagaggccaaggtgggaggatcctttgaggccaggacttttttttttttttgagacagtctcattctgtcgcccaggctggagtgctgtggcgcgatctccgctcactgcaagctccgccttccgggttcacgccattctcctgcctcagcctcccgagtagctgggactacaggcgcccgccactgcgcccggctaattttttgtatttttagtagagacggggtttcaccgtgttagccaggatggtctcgatctcctgacctcgtgatccgcccgcctcggcctcccaaagtgctgggattacaggcgtgagccaccgcgcctggcctgaggccaggacttcaagagcagcctgggcaacatagtgaggttctgtctgtacaaaattaaaaaaaaaattagggtcgggcgcggtggctcacacctgtaattccagcactttaggaggccgaggtgggtgaatcacctgagtcaggagttcgagaccagtctggccaacatggcgaaaccctgtctctactaaaaatacaaaatttttagggcatggtggcacatgcctgtaatcccagctactaggggggctgaggcaggaggattgcttgaacccgggaggtggaggttgcagtgagctgagaccgcaccactgcactccagcctgggcaacagagcgagactccatcttaaaaaaaaaaaaattagctgggtgtggtggtgcatgcctgtagtcctagctatgcaagaagttgaggcagggggatggcttgagcctgggaggtcgagactgtagtgagctatgattgcaccactacactccagtctgggcgatagagtgagacttgtctctaaaaaataaagaaggctgggcgaagtgtctcacacctgtaatcccagcactttgggaagacgaggcaggcagatcacctgaggtcaggagttgagaccagcatggccaacatggtgaaacccctctctactaaaaatacaaaacaaaacaaaaaaatagctgggcgtggtggcgtgtacctgtaatcttagctacttgggaggctgaggcaagagaattacttgaacccgggaggcggaggttgcagtgagccaagatcgtgccattgcactccagcctgggcgacagagagagactctgtctcaatcaatcaatcaaaatataaataaataaaaaaaaacaaaggaaacacccttgccaccagagatcctccaggtacaaacctcatgttcaaggagaaatcaaaagacccaggagcttgtcagatttcagtagaggagaaagaggatggaaattcatctttgtgtcttccttcctctgccacttcccctggagagtaagctttaagagctgcagtggccaggcgcggggctcacgcctgttatcccagcactttgagaggccaaggtgggcagatcacgaggtcaggagatcaaaaccatcctggctaacacggtgaaaccccgtctctattaaaaatacaaaaaaaaaattagctgggcgtggtggcgggtgcctgtagtcccagttattcaggaggctgaggcaggtgaatcgcttcaacctgggaggcggaggatgcagtgagccgagattgtgccactgcactccacactccagcctgggggacagagggagactctatctcaaacataaaaacacacaaacaaaaagggctgcactgatgtgcttgaattagcgtcagttgccagtactccctggcgtgctggaaaccgagctcttcctgagtgaatgtcgggcggcatctggtcaggatgctttcctgaagcttcaggactggtggccaggtacaattgctctggaccgagccagacccgagtgagaacttggctctgtcactcactagcagtgtgaacttgagcctcttctgtaaagcgggcgtggtgactgtggcttccacatagagaggctgcttgcgaagagtgaaggttacgtgcttaacagggtgcctagaacgtaaatactggcgatgctcgggacacgtcggccgaagggcgttcagcaaactcgccgggagagcgggggagtcctgaatccttgtgggtattgagggggagggggtgtcccagaaaggcttctctataaggtggatctaagaaaagctgctaattctgttgttttcctgaattcatgctgaggccacacgttagattagtagcagtttctatattcgcccccagttcccaaaagaaccttctccacagtcatccattctagctcttcgctccatttccacgtctgcctctgtgcaagtttttgttttgttttgttttttgttttgagatagagtttcgctctttttgctcaggctggagtgcaatggcgcaatctcggctcactacagcctccgcctcctgggttcaagggattctcctgcctcagcctccccagtagctgggattacaggcgcccgccaccacaccccactaattttctatttttagtagagagggggtttcaccatattggtcaggctgctctcaaactcccaacctcaggtgatccacctgcctcagcctcccaaagtgctgggattataggtgccttccaccacgcccagctatttttttgtatttttagtagagacggggtttcaccatgttggccaggctggtcttgaactcgtggcctcgggtgatcctcctgcctcggcctcccaaagtgctggaattacaggtgccttccaccatgcccagctaattttttgtatttttagcagagacgggatttcaccatgttggccaggctggtcttgaactcgtggcctcaggtgatccgcccacctcggcctcccagaatgctgggattacaggtgtgagcccccgtgcccagctcacattctttctagaagcttttagtcatcagctcagtttgaagtggtacctccctcctgccccctccataactcactgtccagaccactgtctgtctttccctctctgtgatttctgggcatgtctgaagtctattatcataagcagcctgggaaaaggaactctggtttatacagtagggctcagggaatattcagtgaaataataagtaacttttctgcagggcgccgtggctcatgcctgtaatcccagcactttgggaggatgaggcaggaggattgcttgagcctacgagttcgagaccagcctgggtaacatagtgagactctggctctacaaaataataataataataacttttctagccctgaaaacccattaaacttcctggaatataggaactgaagggcgggaaacaggaaagtttcccccttcctttatcagctactgcctgggacttacatctcttcgtgtcgaggtgagaacatcaagggacagacagggaaaggcagttcttcagagtcacacagcaagttagtggcagaaccagcagctggattcaggctgtgctcggtcgagcgctctttccctcctgttggagaaaggcagcagagtgttgaggggctcatgtgtggctcctggagcggtcgtgtggcacggtgacaatgaagtgatttaatacatgcagagtcctgacggcagcctgggcgcaggtagcaggtgcaagtgtttgctgcctcgtttctatgttaccctctgttcttcttccacacccctactgctttcaacaggcccctcatttcaggagacagaagaaccctgacactattgaatatgtcagaacaggccaggtgctcacgcctggagtcccagcactttgggaggccaaggcaggtggatcacctgaggtcaggagttcgagaccagcctgaccaacatggagaaaccccgtttctactaaaaatacaaaattgctgggcatggtggcgggcgcctgtagtcccagctactcgggaggctgagacaggagaatcgcttgaacccgggaggtggaggttgcagtgagctgagattgcgccactgcactccagcctgggcaacagagggagactctgtctcaaaaaaaaaaaaaaaaaaaaagaaaagaaaaatgctggaacatccagaacatcgttactaggcgggggtgagaagctggtgagaagctggcaggaagcttggcgggaggctggcgggaagctggcagaccaaccgccgtctgctggggtggctttctggatctttacaaactcgaggcccgagaaccggatcttgatttgacattggttgttttgtttatttctttgttttggtgacgggaacatggaaaggagcctctcccctgggcacaggcccccagcagacctggagtctggtgtcgcactgtatagcgccctcgggccggcgtggtggttaccatggcccagcgcaatctgcagccgcagaagtcgtgcccaagccctgtctgtcaggccctgcagactcgctcaggccagccccttgggagcgtgagggcccagaatccatttctatcatatttctcccatcattgaactgaaagccagattttccatctgtctggttggaggttcatcaaagtcattcctgggagctggtgactcacagcttcgcctgcagcgccgtggggcagaggggttgagcataccgtgagcaaccagcatcttctttctcggaatcccagcagacggcgagagcagacgggacgggcacccacctagaaactgctttcttcccagggaagagctactgtttacctccctccccgaaacataagtttttttgtgtgtgtttttttgagatggagcctcactctcttgcccaggctggagtgcagtggcacgatctcagctcactgcaacctccacttccgccttctgggttcaagcgattctcctgcctcagtctcctgagtaggtgggattacaggcacccaccaccacgcctggctaatttttgtaattttagtagagacggggtttcaccttgttggccaggctggtctcgaactcctgacctcaggtgatccacccgcctcggcctcccaaagtgctgggattacaggcgtgagccaccgtgcctggcctaaaaacaagttttattgcaaatttgggacaggcctcggagaaggactctgagaactgagaccgaagttcccttagtgggctgaaccatttctgggtttctatgccgtttccatgttggagcctgattggatagaaaggagtacagcctccaatactggctgctgaacaagggaaccctgtgcactggggaattttcagttagggttttttgtgagcagttagagaattaattggaacagcaattctcccaccccaaatcccatcctaggggccatttgttctttctttgcatctttccagagagggtggtcattctcgacgcgacgtctcaaccagccaaacagttcttttccagctggtggaggtgggctgggtggaacacctgtactgcctcattccaggctctttgtgaccaggaatatgcttggtcattcattcattcacacttgctcattcattcactgaaactatttgtgcaaggtcctggggttacagtgaataacagatgtggttcctatcctccaagagacctcagtctagcaggagagacaggcattgaacgtttacaagagtcctgagcattcagaagcagggaacgacgcaggccttcctggtctggtgggtcgggaaagctccctggaagacaagatacttaagttaagaccagaagggagagtaggagttacccaggcagagtgggggtagagcgtttttgccagcgatgtcaacctatgcaaaagttccaaggcaggaaaaagtagaagagagcaaggagcagaatgtgccagatgaagctgaaaggggtgcagaggcccggccacaggttccttaggccaccaaaaggatgtgcgggtctctatcccgacagcagtgactcgggagactgaggcgggagaatcacttgaactcggaggcggaggtttcagtgagccgagattgcaccattgcactccagcctgggggacaagaacgagactctgtctaaaaaaaaaaaaaaaaaggaagccatagacaggtcttagtaagagaggaatgacatgctacatgtgttttaggatgtcttagagcaagccttcagttgctgttagacactgggaaactctttcctctaattgatcttcatatctttgatgtcagtctcgtgagcctgggactgctccaaccaacggacccagccaaaacgtggccactgtggccggagtctcacccttcttcactctcctttcgggagaacacgagtcatgtgtgctagtttctcgtgccagctcctggcaccggactgtgtgttcatgagactgagctgaccagctcaggacaaggtgccaagagcttggggaagaggaaattaggagtcacgaggtttcacgatcagaacccgaaagtgctttatggaaaatttgcatgtcctgggtgcagctcagcctaagagaagctggtgcagtgatttcaggggtgtgtgtgcctggcttctgggaggggcagccagaggcaccggcttcccttgtgaaggcagctgggtcagactgccccctccatccacccctacgtttatgaaggcgaaatttagtaggaaggacatccaaagcagtgtgatggggaaagaggaccagctgggggtgagatgggaactcgccatccgccatcctgttttccccaaccaggtagagttctcaacgctcttggcacttacaacagatgttctgtagggcaagtcctgtaggacattttaagatttctggcttctgcctactgaaggctagtagcgacccctagttattgtgacctctttttttttttttttgagacggagtctccctctgtcacccaggctggagtacagtggtgcgatcttggttcactgcaagctccgcctcccaggttcaagcgattctcctgcctcagcctcctgagtagctgggactacaggcgcccgccaccatgcccagatgattttttgtatttttagtagagacggagtttcaccgtgttagccaggatggtctcaaattcctgacctagtgatctgcccgcctcggcctcccaaagtgctgggattacaggcataagccactgcagctggcctattgtgacctctttaaatgctcccacacattgttatttttatttacttatttgtttttttgagacagggtctcgctctgtctcccaggctggggtgttagtggtacgatctcagttcactgcagcctcgatctcaagtgattttccggcttcagcctcttgagtagctgggactacagatgcccgccaccatgtccggctaattttgtgtttttaatagagacagggtttcaccacatgagccaggctggtctggaactcctgacctcaagtgatccgcctgccttggcctcccaaagtgctgggattacaggtgtgagcctctgtgcccggcccaatttgataatattttatttatttatttatttattttgagagggagcctcactctgtcgcacccagattggagtgcggtggcatgatctcggctcactgcaacctccgccacccaggttcaagtgattctcctgcctcagcctcccgagtagctgggattacaggcacccaccaccatgcccggctactttttgtatttttttaaagtagagatggggttacaccatattggccaggctggtctcgaactcctgacctcagctgatccgcccacactggcctcccaaagtgctgggattacaggtgtgagctgccacacccggcccatttgaggatattttagtgaaggttttgtccggcgggatgatcattctccccatgtcactcctgggggcttctgctctctccttcccagacggagctcctcctgactcccccagctgtgttcccaacagcagcctgcagccctgtgtccaagctggagatttttgtccaggcacttgcgggccgcttggctggaagcctctggtggccgaggtgctgctgtgcggccgccagatggcgctggggagcccccactctctgccgcaggacgggcagaggcaggactggactgcagagggaacttgccttgaagaggcctggtccttaaagagacacagcacacacggcccgaccggcagccccagagcagaggctccactgatggcaggcgcccctggctaggctctgaggttcctttgccctcgccttgctgaatggtgagccgctgcctctcggagcccgtctccttgacagcctgccctcggctcctgcagccactcctgggcctgatggggacagggccagcctggtgggtggtgtcagaggtcctggcagagcagcgtaggcctgggatgcgtctgcagaattctggctgaacgagcgaggagcacggccagcttcggggccgtcgtgaccacaggagggcagagggccagcccgtgagctctgaccccagctggacgtgctcttgtttcccttggggctaaggagattggagccactgaactgaatctctgggttttggagacttagagaatccattggactcttctgctggcgtctttctgaatgctgatggggacttggtggtaagtaaatgagtagggggctccaggccctgctgtcgagccctcggacggaccctttgggaaaactctgctgttgacctgtgggtggtgtcatctgagccatgtcaggtgagggccacgtgagctggggcttggcgagagaccctcctaaaacggtggctcggggagtgcataatctaagccagcggctctgcccaggatgctgcccttgctgtggcccctggccatgggaacggggcttcaactcggcccctgggaagtgtgtgggggcgtgtggggagtgtcacagctgcaaggacctgatgtcactgtgctttatcctgcagtgatgcctagggaggcagtgagggggtgaatgcagctccccggggagcaggtccacatcttgccagggcagcaggtcttcccatgactcaagctgacacaaaagtttggtgcagaaatgactaactgggaagggcttccagttcacctctgttgcctgtagatctcactggctgctggaaaagccgggaggctgagcagagggcaggtgagaagagggcaaaagacagactcataggctgagacttcacccttacaggtgacactgtggaggcctggggaattttcttctttccccagactggagggctgaggatgaatcttagaatagtaaatgctggccgcacatggtggctcacgcctgtaatcccagcactttgggaggtggaggcgggcggatcacctgaggttgggagttcgagaccagcctggccaacatggcgaaaccccatttctactaaaaatacaaaaaattggccaggtgtggtggcgggctcctgtaatcctagctactcgggaggctgaggcaggagaatcgcttgaacccaggaggcagaggttgcagtgagccgagatcctgccactgcactccagccaggcaataagagtgaaactccatctcaaaagaaagaaaaaaaagaatagtaaatgctgctttactgtaccaaggaaatgggaatagagcaaagcacggaaaacaggccaccccaggatctgacaggagagtttgtattctgctagtgctcataggaggcctggaggtcgtcttcttgatccacctgggcacataccttcttttttttttttttttttttttttttatttctttctgagacggagtctcactctgtcacccaggctggagtgcagtggcacgatctcggctcactgcaacctccacctcccaggttcaagcgattctcctgcctcagtctcccgagtagctgggattacaggtgcccgccaccacgcccagctaatttttgtatttttagtagagacggggtttcaccatgttggccaggctggtctcgaactcctgacctcaggtgacccgctggcctcggcctcccaaagtgctgggattacaggcgtgagccactgtgcctggccctgggcgcatactgtctacagatgtgaacactgaggctggaaactcttgagattggccggaggcattgaagaagtggggtttggccgggactggcatttgggagattgtcactggactttgttcagcttgtctccagggtcatctggcctgctgtagtagatatggttttcttgggataccagttctctttctactttatcatcagtggccctgggagggttctgaaataacgctgcctgcctccctcgtgtagctccgatttcttcctccctgagtttaacttcattctgtttattcattcattcactaattgccgctcaatgcagagattacacacgggaaccctggattcagacttggttcatttccaagcatcgccatctgctagttagccaatggcttagcctctctgcacctcaatttcttcttctgtgaaatggagataatagtaaattggcttattgtaaggattacgtgaaataacctacgtaaagcagatagagcagtgcctgacacttaagaagcactcagtagaccaggcacggtggctcacatctataatcccagcactttgggagggtgaggcaggaggatcagcttgaacccaggagttcaaggctgcagtgagctgtgagaatgcccactgcactccagactgggtgacagagcaagactctgtctcaaaaaaaaaaaagcactcaataactgttagctgtcattaattttatttgttcaatgtgcattattgaatgccgatctgctgggcgctcggcagaaagctgatctggaggcaccatgtggtcatagctgtgctgggagtctacctgagccttgttcacccactgcgctgagcactgggtctgcccagtgaggaagatgcagtcctggtttttttattttttatttttgagacggagtcttgctctgtccccaggctggagtgcagtggcgtgatctcagctcactgcaagctccacctcccaggttcacaccattctctcgcctcagcctcccgagtagctgggactacaggcgcccgccaccatgcccagctaatgttttgtatatttagtagggacggggtttccccgtgttagccaggatcgtctcgatctcctgacttcgtgatccacccacctcggcctcccagagtactgggattacaggcgtgagcaactgtgcccggctctggcttttttttttttgagagggagtctcactctgttgcccaggctggagtgcagtgacaggatctcggctcactgctgggattacaggcacatgcaccacgcctggctaatttttgtgtttttagtagagacggggtttcaccatgctggccaggatggtctcgaactcccagactcaggctatctgcccatctcggcctcccaaagtgctgggattacaggcatgagccaccgcgcctggccagtcccagcttttaaggacctgatgggccagtgagggtgcaaactctcggttttttggtcatcacagtctatttttggttttggtttttcatttgaatgtagagggccccactccctcccacccactgtgtattcagcctctgcacgcaccggggctccctgcctggcccccgcatgggaacatatttttgtcatcagcggtgacctctgggtgatcaaggaagcagagactcctggggccttcctgtcgtgtgcagtggagctgagctgctaacatgagaagggaggaaatgtggagatacccagttttggttctagggcccgtccccttttttctgtcctggccaagaaccaaggcttctaccttgattggtagaagcaagagttggtcgttggagaggccgtgagtagcacgtgcttgggaattaggagcagggcaaatagccttgaaaatgggatgtaccttcttcccactcagcccctcgtcattaacccagtgctcctggcggtgcacccaaccatgaaatcccctttaagtccagtgatgaggcaggagcaggcaggtcaccctggggttggagagccgcagacagtctgagtgcacaggctggagggagggctgggagggtggagagcactggccccagggactgtctggggaatgcttagaaggggcctggaggaggcagcgtgatagatgggggttcagtgccttggggagcactggctggtccccacccggtccacatttagctgaatcaggaaggtctgtctgccacagctccccgctcctctgacagattggggttgatcgctggggttagagcacttcagggtagcatcacctttggcaaagcccggaggagaaggactctttaactccttccttcccagcgcgtgacgttggatctccccaactcctcagtgccagggatgcggaggtttctgttcccacccaaatcactgtggtgctcaaaggctcacacacttgtctctgtggccaaggttagcatctggccgtggtgttaacatctactggaagccatccaacaaaggcatcaagggaatctcgaagtgactgccctttcctgagacacgttgtctgagacagacgtctggagatggaagagggttgacagggtttcccagagggtggtctctaaccccatggacccgcagagatttctcaggaccttcagcacccggtgatcaccagttagctggccgtggaggcagtatgcgtggtgtttaagagcatgaacaggccgggcgcggtggctcacgcctgtaatcccagcactttgggaggccgaggcgggcggatcacgaggtcaggagatcaagatcatcctggctaacaaggtgaaaccccgtctctactaaaaatacaaaaattagccaggcgtggtggcacgtgcctgtagtcccagctactcgggaggctgaggcaagagaatggcgtgaacccgggaggcggagcttgcagtgagccgagattgtgccactgcactccagcctgggcgacagagcgagactctgtctcaaaaacaaacaaacaaacaaacagaaaaagagcatgaacagagtgccagggttcaagtcccagccctcacttaccctctgagtgggttactcagctgctcagggcctcggttttctgacctggaaaatggagaaaacagagataacagtgacattcacggtgagatcacgctagtgaacgaaacgctaagccgggcacacagtcggtgttctgtgttcgttatcagaagtttcctctgtagagccctcaagatttgtctctccctctaccctctatcgtgttgtggagtggagggtccgagagtgccaggattggacagaatgtagacagaaaaaagcaaactatggcaacgcgaaggaaagcaactgccacattttagcttggaggatgctgaaaatagcttgttcaagcctttgtagataaaaatgtaaaatgtacgcaaatgtatgtgactcacgcagaagcatacatccatagctccctcacagtcagcgccggatgtggccatcaggaaaaccccacagtgtggggagagggcccgagcgttcttgcttgttgttgttttgaggaggggacggtgctgctgcctcctgggctggtggctcctggtggcggcagctcacgcccgtttccacctttcccctgggctgtcttccgagagttccaggtgggaagaagagatgcccttggcccctcatggctcctccggcctcgcggtcctccgagagcctgctcgttcccttcccatgccgaagctctatttctggagcgtctcattggagatgcacgccccctccctgccaagctccaggtgcctgcttggccctcccaatcctgtgtgctagtcagggacggtgggagggtgacagctgcagggaggggcggcaagagacagcgctggtgcctgagccaggaggattggggcggagggagccctggggacgcagggacgggctaataatattgaaaaccacttctgctgcagccacctgtagaggcttccccacccagagcatcatcctgtgcgtctcccaggggctccccagcctgtgatgagtgggtgacccccatctcccctggggcagctgcagaggcctctgcccaagcagcttatggggcttcctctcagcatcctgggggaggagctgcttctccccttaagaactagatgtgtgtgtgtctgtttggagtgatgaggaccgacccccacacccctccagcgttctgcgggtgccgaccacactgcccccggcaaaggccaggctgacttaaccttcctggtaggcctctgtagggctgggctcccagaagttttccccttaagctgcctggggatggggtggggtggagacagctccggtatctgaaatgtcactatctggggtaccgggccccctgggtgggccccactgcttccctttccctgggttcaggaaggggcttcagccccactgccctggacccccctggcctgactcccctcctgtccttccctgctccagggtcgcttggcccaaagaggtctgtggggaagctgccatggctcccacagaatcagcccacaggagacaggcatggggcccccaatctcttcactgcccttgggcgagggggtcttccttagagggaatttcgtctctaaacggtcatttctcaggcctcttgacccgacttcccaccatttctaggtgatgatgcaaacacgatgggctttccaggccgcggctcggggtccccaggaggggtcctggaggggaacgcgtggagcccttggggcttctcctggctccagtttgtcctccgcccaggaggggcacatgtgggactgtcctggccccacagcccccgtgacttcggtcctcccgggtctccacccgcccccctccatgtgtggcgggaacggccgcgctcagaggtcaggggtgtggaaagggacgagcgggggaaggttcgggaggagagaggcgcgtcccgcggcgcgcaggacgttcaccccgtgggtcccgcagcgggtctggctggggaggggcccggccgccgctcccgcccgcgaagccgcgcttggagatcccgggcgggaggtgatgtcacccctgtgggctcccgggccccccacggcacctggtttgcggatcgccaggatcctgctgagcccggcgcgggggggacgagggggacctgggtctgcgccgccgcctggagaccccccgagacccccgcggcccctcctcgcccagcgccggagccccgctgcccccttagcccggccgggggcgtcctgcggagggcggagcctcgagccgattggtccctccccgccccgcccccgcaccaaagccccgcccccgcaccaaagccccgccccaccacgaagccccacccccgccccgccccccgcgaagttgctcatcggttccgggatccgcagctgggctcggcgcggccgctggggccgggagggttcgggagggttttgggggctcccgccccgccctcgcccctgccccggccgccccgcgctcctcccggggacctggttcccggcctcctcgcccctccgcgctcgcaacttcggcctcccccggctcccgcccgctctccctcctttgttgcgcgatgagggtcgggtttcggatctgaccgagccgccgccgcgggatggagccgctcagccaccggggcctgccgcgcctgtcctggatcgacaccctctacagcagtacgtgtgccgggcgggggcgggaccccaggatcgggatcgggaccccaggatggagatcgggaccccaggatcgggatcgggaccccaagatcgggatcgggacccaggcaccgggctggtccggggagcgcgggcgggggcgagatcggggtccggatcggggtcgggttgggaatcgggatcggggtcgggacccaggagccgggctggtctggggggcgcgggcggggggtccccagagaggattcctgcggtccgggggcggggaccgtgggcggaccgagccgagagctgcgtcccccctcccacctgttgtgaacccggcctccgcgagcctcaggggagggaggcccttctgggtgctgcccccgcccctggaccggcagcttctctgtccaggctgaagccgaaaggccgttttgggagcagtcgttggcacccgagtttgccaccccaggggcaccgggtcatgtgtggttcagggcccaggggttcggtgctggggtgggatcgggtgggaggggagacggggggtgcagatatccgcgggggccgtttggatgcgggagctgaaaatcccgggctcagcaatctttcctgccagcctcatcaccacccccaccctcatcatcaccaccaccctcagaagaaaaaaaaaacaaaccttctcgagttctccaccccctcgctcccaaatctctctggatcatgtgattgctcttgcatggccccgggggatgcgtaactgatcacgggtaatggtgtgggggggcttggggcgaaccgagagccgccccccgcccccaccaccgcaccttgctcctgctccgttgctagaaaggcaccgccccttctccccacccttccctgagacacctttcccgaaagctctcagggattaggaagagggtcctcctgggcttacatagtggatttcgcccttcctggcccacgtgagtgggaccctcccactctctcagcacatctcccaggcaggagttgggggaggcacgtggggccacgtggagcctggttcagcctgattctaggcactggatgccatggaacaggagcgttttctttctttttttttttttttgagacggagtctcggctctgtcgcccaggctggagtgcagtggcgcaatctccgctcattgcaacctctgcctcccgggttcaagtgattctcccgcctcagcctcctgagtagctgggattacaggtacccaccaccactctcggctaattttttgtatttttagtagagatggggtttcaccatgaggccaggctggtctcaaactcctgacctcaggtgatccacctgcctcagcctcccaaagtgctgggattacaggcgtgagccaacaagggcatttgtaagggtcatcccagctagagttccttgataagtcatatggggggggtggggggagtagagaagggtgatgccttgagccccaaagccttactctggaggctgtgtggtacccaacattcaacctctgacctcagcatccccttgggtccaggtcattccctgtatcttcttctccacccgcctcctcctccatccatgttccttcctctcctccccccaggagctgtccttgtgatggttcattctgctttggtttctcaacatcaaaggggcaaagccggatcccctgggcataggtcctgtgccaggtgccgccgctccatctgctccttcccctgcagaggccagcgtcgttgggtgaaggtcagggcccatggctgtgtggcatgtgcgtgcacgtgcgtctgcatgaatgggggcacacatctgttcggagcgcagatgcagatcagctcctgacccggaggcaggattagtggccctctcttagctgtgtgcttgcaaacagccgtcataacaatgcctcagattcacgcgtgcttatgttcctgagtgtttctggctctttgcaaaacccagttcttgtttccctatttcccgaagcctggaatcgtatggaaccctgtctctagctttctctgcagcagaagactcctctgagctgatcatttccaagtcttccataccccaccctcttcctcccacgcctggagcaaaaaagcaaaattgcctgaggccaccttgaaaattcctgaccagaggaatgccagaaaagggaattaggccaaggcctcttagggggttctgttgggcagccctgattcaggcagattggcacctgagctgtctaccctcctgctgctgccctggcctctgggcggctcctggggtggcctggatggtgggtgggagggggcactgatgtggccgcagtgtgaggagtccctgcctccctcttcggaacagcttagtggagagctgtagcaggaggcttcccggggaggtgctgtgcagtcatgtttgggctgttagccatcaactttcctcttgacaagagcctaaattaaaacaaatacccgagctgtcatttgcctggcagcaaggttttgtggctcccagaggaagttcctctgcttctcaggaagctgtttgcttacaaggctcacagtcctggggtgacaaatctccacaaatgccagatccatcgggaactgtaaagggggtatacccagggcacagggtggcagtgtgacttagagatgggaatgactcggtgttagaggttccctgccttcctctctctgagcattgttcctggtaacaatgataatagcgtctcctgagcacctactgtatggcaggcactgggatagtcactttctctttctttcttttttcttttttttttttgttttttgttttttgttttgttttgagacggggtctccgtctttgcccaggctggagtgcagtggtgcgatcttggctcactgcaacctccacctcctggattcaagcagttcccctgcctcagcctcctgagtagctgggattatgggcgcctgccaccacaacccagctaagttttgtatttttagtagagatggggtttcaccatattggtcaggctggtctcgaactcctgacctcaggtgatcttcccaccttggcctcccaaagtgctgggattactggcgtgagccactgcgcccggcctgtgctaggcactttctatccattctctccaaatctcacaactctgcaactcttacagagtaggaaagtgaggctcagttagcataaatcatagacctaagatcacataagtaacaaatggctgagctggaattcaggttgtaccctagaataatgaggaggatcccgagtaccacctgggtatgtctgagtttattcaaggtcttgggatgtcacggaatgggggacgccattctctatggtcctctgttgcagagttctccctgaaacggtccagcagggtaaatggcttcaatggctctgaccccaacctggccctgtgcctcttgcaggacctgggggctgggcctggagcccaggcagggacagctgaggctgtctgaacccactgaggctggtggctctctgctcctaaggtgccagcctgccagccagcccctcccctcacacacttcttttttttttttgacacggagtctcgctctttcacccaggctggagctggagtgcagtggcactatctcagctcgctgcaagctccacctcccaggttcacgccattctcctgcctcagcctcccgagtagctgggactgcaggcgcccgccaccacgcccggctaattttttgtgtttttagtagagacggggtttcaccgtgttggccaggatggtctcgatctcctgacctcgtgatccacccgcctcggcctcccaaagtgctgggattacaggcgtgagccaccgcgcccggccctgaacacacttcctgcctttggggttggcagttcattctttctggttttgacaggaggagtgtgcccacttccatcacaggtttggtggtcatttgatgagggttgggcagcaaaccctccatctctcctatggtagaagtcctgaagggctgcggtaagtgtgatttgtctgcctcaaggagaagagttggatcccagctgccaggggccctggggctgatgggagcagagtcctttccctgtggagtgacagatggtttcagacatcccccagttcttgtgtctgcgccactcatttgcctgtattaatgtagcaatgtcagtttcacccctcagtaccttacctttctctccctggggttgctatgatgctctctctgaggctctcttttttttgagacagagtctcgctctctcgcccaggctggagtgcggcggtgcgatctcggctcactgcaacctccgcctccccggttcaagcgattctcctgcctcagcctcctgagtagctgggattacaggtgcccgccaccacacccggctaatttttatatttttagtagagacggggtttcaccatgttggccaggctggcctccaactcctgacctcaggtgatccacccgcctcggcttcccaaagtgctgggatgacaggcgtgagcccctgcgcccggccatgttttcttggtcataatgcctctaggtctttaatcaccctttctgctaaacacgtatcatcttctctttgttatttttttattttatttttttatttttattttcccaatcccatgggattagattggattaaatgggagcggagtagcccaaaatgggggtggaggtgtgctctgacactttcttggtccctgggattctccaagcagatctggatcaagacatacgtgtgccccaggcaggttgatcatctggcacctcttcaactggaaaatctttatatgtgtgtttaggacttacttagaggagaggcagaggctgtatttaaagcctctccctttgccacttcggcctccatttggtcccaagtaatttagtcctggtgtcaaacataccttccctgctgagccaagcaagagcctgcagtggcttggccgtcatggaaggcagaacgtgaccatctgttgttactagagcctgctttttggagctcacttctcttaccccaagcaacatttccaagggcgatttcattctcttgtgatattttcatgccctttatagattcagtgccccatctatgggccaggaaagtatttggagcagtggagatgtaagcctgtctccaggtgagcatgagcctacctcagtttctcatctgagccccacattctctacaccagggaccaagccactggtctgacagcctgtgtgcgtttgatcagagcagttcagttctcggggccgcatcagacccctccgtgtgtgctagtgagcgcctgctggcagatgcttgcttgttttcggaatagcccagtaatttattcctttttgtcaacaccggcccataatcttcatggctgctggagtctcagaggtggggctggcagaagaattaagtcatctactcagagaaacttaggtttctgtggttgtgattgttggctactgttgttcttcgggaaaaggaaggaaatttgtggggaattggctggaagatgctgttaggaggatggaagatggggaatggcggggaggctctgcctcactcttgcgagtaggatggaagacttgttctctgtctgaggtatgatctgctttctgggacaattccggtaccttccttcgtagagggagggcatgatggctctcgtgggtgttgtgtggattaattcatatttataaagtgctttgaaggtgaggagagctattgagcagctcagctgtccagctcattgcgctcctcatccgggaaagcctcgagggactgggagaggccggcacaggacttaggaaggggcagggaatgtggcaggaggaccggcaggaacagggtatcagaccagctctgaggcagcgcctcccacagcggctcccgcacaggccctccataggtgttggttgtctgagtacgggtgggaaaaagaaaactcgagttcttggctccttgagctcctccccgcagcagaaacccctgttagctgaaacctgtcagctggcccgtccatgcgtttccggctgtgtggatttggtcattgtactcgctcgtagtggagtcagagacccccaaagggagtctcgcgcttttgccagggtttatgattggaggacttcactgccagcgttggcggcagctgtttggctgagcttgagccctttgggcgcaaacctagggcaggcggcttcaagacaaccctgcgcccactgcccctgccaggcccttggtggtggcgggtgttggtgatgtgtggggggtgggctgaggtgatgtgttgagtggactgaggtgatgtgttgggtgggctgaggtgatggggggggtggactgaggtgatgtgttgggtgggctgaggtgatgtgttgggtgggctgaggtgatgtgttgggtgggctgaggtgatgtgttgagtggactgaggtgatgtgttgcgttgactgaggtgatgtgttgggtggactgaggtgatgtgtggggggtggactgaggtgatgtgtggggggtggactgaggtgatgtgttgggtgggctgagatgatggggggggtggactgaggtgatgtgttgggtggactgaggtgatgtgttgggtgggctgaggtgatgtgttgggtggactgaggtgatgtgttgggtggactgaggtgatgtgttgggtgggctgaggtgatggggggggtggattacctgctctgttctatattcttggcacttttctccaagtgactgtttgtaccagggggagagttctgcagctcacccatctctggggctgtgataggggaggctgtttgtgacatgtgaccttggcttgtccccacatgtgagaaagtccattgctgctgtggggagtagcttgcttttcttttcttttttttttgagatggagtcttgctctgtcacccaggctggagtgcagtggggcaatctcggctccactgcaacctccacctcctgggttcaagcgattctcctgcctcagcctcctgagtagctgggattacaggcatgtgccaccacacccagctaatttttgtatttttagtagagacggggtttcaccatgttggccaggatggtctcgatctcgtgacctcgtgatccacccatctcggcctcccaaagtgctgggatgacaggtgtgagccaccgtgcccggcccaggagtagcttgcatttcttagggcaagatatggtcagttggggacatgacgctgctgggagcagcgggaatgttccactggtccctgaagcttgaggagaacctgacccagagaccttgtgaagggggaaggagaaagaaatcaggccaataggcaggctacggaaggcacccccgtatggaggctgaagataatgcccaatcccacccctgcctgggcatttggcaaagagccctttgaggcgggaccatctgaggccgtggccacttgtggatggagcagcgggttctctgtccccgggtcgagacctgactggggcctctcgcccagttttttgtccaggctttatcctgtgtcctcctcctgcccttccttcctccccacacacactagaccgaaagatgaatctgggtttactggctgtatggaaaatgtcagagtcagcctgggcttcagtagatagagccagatgtggtcggctctgtggtgacctgattgattaatcgggtgccactcccctctttcttcatttttttgagacagattttcactctcgttgcccaggctggagtgcagtggtgcgatctcggctcactgcaacctccgcctcccgggttcaagcagttctcctgcctcagcctcccgagtagctgggattacaggtgctgccaccacgcccggctaattttgtatttttagtagagaagggatttctccatgttgatcaggctggtctcgaactcctgacctcaggtgatccgcccacctcggcctcccaaagtgctgggattacaggcgtgagccaccgtgcctggcctcactcacctccttcttgtccctgccctcacctctgatgccttggtgtgcctctaggtcacaggtggacatggcacacgtgattgggcatcttgcctaaggctagcagggtctccaggaagtcttgggtggctgggaggcctcaggtaaaccagagccaaggaagctcagagtccttgtcactccgggcagcttggctgctggactccccggggcatcggtggagctggtgctgcctagagaagcctggtattgagcagggatctgtgggcttactcggggctgttggggaaggatgtggccatcattaccttcgtgggattgaagggctgcttctgtgagtgttctgggctaaccccttcctcctgggcagcggctcctggtcagcagcaaaggtttaatggatcgagattacggggaccaaagacgccgtgtaattaagccagttatttctctggctgggaacatctactcctcacagccgcaattgacttcgtcacttgtggttaccccgttcgcgttacctcgggcctaaacagcccatacgtcatctttttgagggagtctctcccttggaggcaaagttttaggagaaagatccctctgggagttgtagagtcggcgtggcagtgtgtgctattgaaggtgaagttttaggagagagacccctctgggagttgtggggtcagcgtggcagtgtgtgctatgcaagagtgccccctgcagttgttctgtgcaatggcgcccacgggagcctctttgggaactgtgtctgggttctgtagagggacatagatagaaacctcatccttgggtctcccaggatcctggggtcccgtgaaaagaaagtccatcagtcctgatggattcatagaaactagtttttaatttggtttagaaagaatggaagagacaggccaggcacggtggctcacgcctgtaatcccagcactttgggaggccgaggtgggtggatcacctgaggtcaggagttggagaccagcctgaccaacatgatgaaaccccgtttctactaaaatacaaaaattagccaggcatggtggcaggcacctagaatcccagctactcgggaggctgaggtaggagaattgcttgaatccgggaggcggaggttgtagtgacctgagatcacgctgttgcactccagcctgggcgacagaatgagactccatctcaaaataaataaataaatacataaacaaactaaattaattaattcaaggtcgcagactacaagccagggactgtgcgctcggttggccctgctgtaaactgtgttctttctcccgcactcttacccttcacagcggtgctggtgggggctccttgacgctggtatttcactgaggttgatggatctgggttcatttctctagctagaaagacagttgtgaagactgcgtcttgcccccaagcccccgtgatatgaggagacagccctctgccccaggcatcctggaagcactgggagcatccaccaactgggctgcctcttcctaggggcatgagcctaaggaggtctcctcatgggcacttggagcccacgtgcctgcattgctgtgttcctggaattattggcaagaagtgctgattgttaacatacacaaacacaccccccccccacacacacacacacaaacacaaacacaaacacacccccccatacaaacacaaacacagagaaagggagagtgagaatagactttggcggttgggatggagcagggccagtgcccagtttctagagcgaggccaggggcgaggacgcggggatttggcagagcccaagcgtgctggccctgctctccagccttttaaaatccacctccacatttcaaaaggaaaataaagagagccctcagccataaatcaggccactgagcatcgaggtcctttgccgaggcccagggcctgctgggctgcagagccagctgctgtgtttgaactctcccgcgcgcagcatgttaatgacggggcagaccctccagacccaggctcacacccacgacggccctcgagcccagagagtcccccacggagaggtcagcccctggggaaggcctgtgtctggggggcttacaccttagcggagccccctttggctgggacttcaaatcaagccagacccttctgtagctctggattctggccagatgaaaggtaacccctgacacagatcttttgagcccatttcccaataggaataaaagtaacaaagcaattgattggacacctcacgggtgcaagagtagagcgagcgttctcacattcgtgatctcatttcatcttcacagtaaacctatgaaaggttgttaccctgattttaaggataagaagggggattggccattgttcttggcctctgctggtgacttctgccatggggggcaccctgagggggacgcaccaggtcttctctgccctcctctgctcaccctcttcctgcgtggcggaagctcaggcatcatctggctttgtgagtgcctctgtctagacaaaacccacgtcctccctccctcctctttcccctgcagggccagctttggtgttaatggagcagaaagccttggtagttactttgcgagtgcgtcacggggagggtcatgagagaccagctggcgtccacccagccgcgtggaacagccaccttgacttggtcgaggccagcaagcgtcttgcagaccccgtggcagctcctgacccacgttcccccttgggaggcctggatgagctggggcaccaagtgccatctttgggtgtagaatcttcagaaaccaaaggcaggagctgattcggtctcctgctccctgggaagaaaggatggaacgcacattggctgtcaggagagctgctgcttctagccggaggaccttgctgcagctggtcagctgccagcacagccaggcccttgttgtgggtgcctgccgtgtctgtcctcaagcccctccctgagtgaaggacactgttccctttccaactgcctgtggctgtgctagaccattttctctcctttgcccagaaaccttcagtgggttcagtggggcattgcctttcccaccacattcagtccagactgggggaacctcttgttatccattccagtttcccagcacactgcccattctctagccagtaaggcctctcaccatcctgcaaagctctgtgctccaaggatctaaccagcttcaagcctcagctcagctaccaccatctccaggaagtcctccaggcctgattcgagcactggccttagtgagatccctggctcagagtccctaatgctgattgctccggctcacatcgcttagcactttcttatctttttttttgagacagagtctcgctcttgtcgcccaggctggagtgcaatggtgcaatctccacaacctctgcagtgctcactgcaacttccacctcccgggttccagtgattctcctgcctcagcctcccgagtagctgggattacaggtgtgcgccaccatgcccggctaattttgtatttttagtagagacgggatttctctatattggtcaggctggtctcgaactcccgacctcaggttatctgcccacctcggcctcccaaagtgctgggattacaggcgtgcgccaccacgcccggctaatttttgtatttttagtagagacggggtttcaccatgttggccaggctgctttgaactcctgacctcaagtgatctgtccgcctcggcctcccaaagtgctgggattacaggcgtgagcgacccgcccggccgatatcgtgttgttttatagtgtttacctgcacagtgtttcatgccagttgtcatttcttctctgccagactctcaactccttagaggcacgagggagaataacaaaggcttccgtgataggatgccagacattgtcctctctgctttgctaacagtatctcatttagcctccggcaacctgctgagttcttagccatttttatcctgtttcatgcttccccaagacttcccagaggtcacacaacacatctgtcttgacgcctcagcctgtgttctttgccagaagcgcccaatgccagggcctggggcatgagacctcaggttggggcccaggcctctgcatgtctgaaaagctcctcggcttactccctccgctcgggggaccagcctttcaccatggtggttctcccttccccgcaacacccagctaggcaccgagcaggtggaaccctgggaaatgctgctttgtgattggttggagtcaggggtggctatgaagatgctgctttgtgattggttggagttgggggtggctatgaagagacgaagtgctctagggctctgggtgtctggatccagcactggggatgccccggagagtcctggagcagggaggatccaagcaggaggtggagctgggtgttaggagggcagaagggccatcagaaggggatactggagacatccaactggtggcctctctctccgcccagccagagctcaaggctttgcctcaccccgagaagataaatcactggggtatcacggggtcccccagcccccgtgccatgatggacatgcacattttgatttggcaggtccggagctcagattctgcatttcctttgtttgcttgtttgttgtttttgagacagagtctggctctgtcacccaggctggagtgcagtggcgcgatctcagctctcactgcagcctctgcctcccagttcaagcgattctcctgcctcagcctcccaagtagctgggactacaggcgcgtgccaccatgcccagctaatgtttctgtatttttagtagagacagggttacaccatgttggccaggctggtctcaaactcctgacctcaggtgatccgcccgcctcggcctcccaaagtgctgggattacaggcgtgagcccctgcgcccggcctggattctgcatttctagcaagtcccaggtgaggcccgcgctgcccacactggatgggaaggaccaggcgcctgcagcatctgccctccaagccttcgtagctccctccttcctgcaggataaactctaaactccttagcacaacgtgggagccttctcagagactgggtccaacccatctccagccgcagcctcccctcctggccccactgccacacccccgggcctccggccacactgagcctctcccggtttcccaggatacaacactcgcccattcatagtgtggtgccttttgcacgtgctgttcctctgcttggggatgctgttggtctttctcagccaggtgaagaggacgctgaatgtcacctgcttgagtatcaggaccggggactgggcactggacctagactcttggccctggagagaagccctgcatggggccgcagcctgcccccgtccctgctcacagaaaagctcagccttgcagccgcgtggagtcagacgacttgcctgtcctgctttgaacgtgtggtgttcctaccacctttgagtaaaaatagagctgagaatgaccgaagtgaaactccaccttgggctctgggagagcagaggtgggaccacgctggggagggtgggtgcggacactccgggggcgggggctgaggccatctgcgtgggctctgggagagcggaggtggggaccgcgctggggagggtgggtgcggacactccggggggtgggagctgaggtcatctgcgtgggctctggggagggggccctgtgagccgggccaagctgccaggcactgggggtctacgccctggactcagagagaccatggcaccctcaaggctgctctcacttgaaaattttcgttttggggctggacatggtggcccacgcctgtaatcccagtactttgggaggctgaggcaggaggatcacctgaggtcatgagttcgagaccagcttgcctaacatggtgaaaccccgtctctactaaaatatacaaaaattagctgggcgtggtggtggatgcctgtaatcccagctactcgggaggctgaggcaggagaatcacttgaacccgggaggcggaggttgcagtgagctgagatcacaccattgcactccagcctgggcaacaagagcacaacttcgtctcagaaaaaagaaaaaaagaaagttttcactctgggctgtggaactatttcaggacttcctgaggggtttcctctggagcttcctgagtttcctcctggacattttgtctccaggtcccagcgccaggcaggggtggctcccggaagggctgtgggtgccaccctggctgactgcagccctctcttgcacctcctcccggccatccacccgcaggaggtcttcccccagcactggcttgtgaggagctccctctgcccgggagaaaatggctcctccgggtcacaggctcccctccagggactgaggggcatttttggattgtgggaaggcgctccagggcccggttctgtggccccaggcctgttgctcggctgggtggaggcacctctgcaggccgggagcttggtctttgaacacctgcttagcctatgacctccagcaagttatttatgctctagtgagctgtgtttttctcacctttagaatgggaacaatcttaccaaccacactgaaagcactgctgagtttttcagcaaataaaaataaggatgccccgttaaattagaattttagatgaacaatgaataatttttaaatataagtatatcccatatggctgggcatattgggaggccaggaggatcacttgaggccaggagctcgagaccagcctgggcaacatagagagaacttgtctgtaataaaaatacaaaaaattagctgggagtggtggcagacacctgtagtcccagctcctacggaggctgaggtgggaggatggcttgagctggggaagtcgaggcttcagtgagctgagatcatgcctctgcactccagcctgggcaacagagtgagaccctgtctcaaaaaaagaaaagtaagtatatcccatacaaaacttaggacatagtagactgaaagctagtctgttgctcacccgacgttcatgttcactgggcgtcttgcattttatctgtagaccgaaagcttgtctgttgctcacctgacgttcatgttcactgggagtcttgcagtttatctggggtccctgagtctggattcagtgctgtgtgtgacactttgccagggtcccacctagatgctccgacatccatgttcactgggcgtcttgcagtttatctggggtccctgcgtctggattcagtgctgtgtgtgacactttgccagggtcccacctagatgctccgacatccatgttcactgggcgtcttgcagtttatctggggtccctgcgtctggattcagtgctgtgtgtgacactttgccagggtccgtcctacctagatcctccgacatccatgttcactgggcgtcttgcagtttatctggggcccctgcgtctggattcagtgctgtgtgtgacactttgccagggtcccacctggatgctccgacatccatgttcactgggcgtcttgcagtttatctggggtccctgcgtctggattcagtgctgtgtgtgacactttgccagggtcccacctagatgctccgacatccatgttcactgggcgtcttgcagtttatctggggcccctgcgtctggattcagtgctgtgtgtgacacttcgccagggtcccacctagatgctccgacatccatgttcactgggcgtcttgcagtttatctggggtccctgcgtctggattcagtgctgtgtgtgacactttgccagggtcccacctagatgctccgacatccatgttcactgggcgtcttgcagtttatctggggcccctgcgtctggattcagtgctgtgtgtgacactttgccagggtcccacctagatgctccgacatccatgttcactgggcgtcttgcagtttatctggggtccctgcgtctggattcagtgctgtgtgtgacactttgccagggtcccacctggatgctccgacatccatgttcactgggcgtcttgcagtttatctggggtccctgcgtctggattcagtgctgtgtgtgacactttgccagggtcccacctggatgctccgacatccatgttcactgggcgtcttgcagtttatctggggcccctgcgtctggattcagtgctgtgtgtgacacttcgccagggtcccacctggatgcgtcttgctcatcttgtgacttgcttctctcttttgtgccaccccctggctcctagaggccaagctgaagaaaagtttctatggaattgtcacagaaacattgagattttgcttttacagggtcgatacagagtcgacacaaaaaatcacgatgcgattgatgcagagtggccagtgataatagctaacgttagcctagcgcttgctgtgtgtcctacactgttgcaggcactttgtctgtattaactcccttattcttcacaaagtctatgaagaagatacttatcatctccagtttacaggagagaacagagaggcacaaattaatggagcaaaagattaatgttcatgttcttttttttgagattgagtctcgctctgtcgcccaggctggagtgcaatggcaggatctcggctcactgcaacctccaccttctgggttcaagggattcttttgcctcagcctcctgagtagctgggactacaggcacccagcaccaagcccagctaatttttgtatttttattagagacggggtttcaccatgttggccaggctggcctcaaactcctgacctcgtgatccacctgcctcagcctcccaaagtgctgggatgacaggtgtgagccactgtgcttggcctagcctttcaaagtgctgggatgacaggtgtgagccggggtgcttggcctagcctttcaaagtgctgggatgacaggtgtgagccactgtgcttggcctagcctttcaaagtgctgggatgagaggtgtgagccacatccattagggcccgtcaggaagcagatgccacactcaggctgaggagtgcggggagagctatgacggaaatgtgggcagggtgagggcagggtctgtgtcctagacctggaggcagaggccatgtggtgagggcttctgggcaggagcgtgcacagcccgggtggcccacagtggggagctgggggtaccacatcccagcctcatgcccttgtcttcctctcatctcctgctggggtggaagagaggatggagaagcagggagaggggatccggaggggcccacgccaggaaaccaggctgtgtctaggtgcagctgttcttgccgagtctctcctgtctgcaaagtgagggtgataaacgcctgtcccacgtatgtcctggggctgttgtaaaaatcagctgagaagctggatgctggcgacgtgtgttcacggcgctgttctctgccagagtaagggataattgttgctgttgataaacactcactgggtcctcaccacgaactgagtcttttcacatcctcagttctgctgggagtctctaacctctggaggatgtgtcggcaaaggaaagagaaattgcaacattgcagagcctggattcgaacccagcgtccccatgtaaagtccgtgcagcactgggagagtcacttaatgagcctccgcagtgaaatgcatctcccgggctggtttggggctcccaggggaatgggtgctatgattaccattagctagtggtgtagcgggtgggagaggacctaacaggtgccttcggcccggctgtaaaaggagtgacttctggccgggcgctgtggctcacacctgtcatcccagcactgtgggaggtcgaggcgggtggatcacctgaggtcaggagtttgagaccagcctggccaacatggtgaaaccctgtctctactaaaaatacaaaaattagctgggtgtggtggtacacgcctgtaatcctagctactagagaagttgaggcaggagaattgtttgaaccctggaggcggagattgcaatgagccaagatcatgccagtgcactccagcctgggctacagagtgagacctcatctcaaaaaaaaaaaaaaaaatagtgactttgaccgggcacggtggctcacacctgttatcctagcactttgggaggcagagatgggaggattgctcgagactaagagttcaagaccagtccgggcaacatatcaagaccctgtctctacaaaaaaaattttaaaaaattagccaggtgtggtggaatgcccctagagtctaagctacttgggaggctgaggtgggaggatcatgtgagcccaggagtttgagcttacagtgagctgtgatcacattctgcactctggcctgggcaaaggaatgagaccttgtcttaaaaaaaaaaaagactggacttgtgggtgacggggatttccaacaaaaccttcccaggataggtgctgggaaggagatgagactcagaaaaaaaaaaaagactggacttgtgggtgacggggatttccgacaaaaccttcccaggataggtgctgggaaggagatgagactcagacaccccagccttgtatccctgagaagggatggtgtccttggaacgggaatccacatagatatttagcaggcagggcggtccagcgacacctgcccgcttccctcagaaggcaccgtctgcagcactcgtacaggtggcggggccagagagcaaggctcgatggagtgacgttgcctccaccgcacgggcgtcccaccttgggagatttccgtatcgctgaagttccctttgtggagcgtggcctctgtgaaaagtgttaataattcacggtagaataggttctcagatgcgccacgtctgtcctcccccacttcttcaacagagaatggcaacacctccattaacctgaatgtgagctcctcgggggtggccctggctgagtcatctgcgccgcctccctccccagagcctcgtacgcgctcggcgtctggctgtcgtgtgaactcagctccacagggcagacatttggtctgtttgctgctccgtcgtacccctggcacctggaacagtgcctgaaccatgagaagtgtttggtgagtgaatgaatgaatgaaaaatgaatgaacggacattcactgggattcagttctccttagagtcagagagacgtaggtgtcaatgctggttgcatgaagctgttacatctttgagcctgtttcctcatctgaatttggggtgtaattcctactgactgtacagttgcagagctgacatttcatgaactttgcttaaataatgtgtgagtgcctggcccataagaggctgtgttagtccttttgtgtgtgtgtgtgtgtgtgtgtgtggtttttttttgttattgttttttgtttttgagacagagtcttgctctgtcgcctaggctggagtgcagtggtgtaatctcagctcactgcagcctccacctcctgggttcaagcaattcttgaaccttgtaccagagaggagaggtacagcggccctagaccccagggctctgctcctattggtgtaagtgtttcctcctgcgccctacctccctgtctccaggcagggcctgctgtgggtccctctcctctcagccccaagggacctgttccctccagaaggcacctccccaagcggcggcagcgtcacgtgtgaggcctgcagttcagggccagcatccctcatccctcgccgagatcaggccctggaggggctcccacaggtctgactcaaaggcacaggtccctgggcctccctcctcagcatcgtggacccacgaccaaggacgtggaagggattctgaagattaatggtcgtaagtgtcactggcttttactgagtgcttcctgtgtgtgagtactgcgttcctacttctcctgtgtgtgagtaccgcatacttcccttgtgcgtgagtaccgcattcctgcttctcctgtgtgtgagtaccgcattcttacttctcctgtgtgtgagtaccgcatacttcccttgtgcgtgagtaccgcattcttacttctcatgtgtgtgagtaccgcattcttacttctcccgtgtgtgagtaccgcattcctacttctcccgtgtgtgagtaccgcattcctacttctcctgtgtgtgagtaccgcatacttcccttgtgcgtgagtactgcattcttacttcccttgtgtgtgagtaccgcattcttacctctcccgtgtgtgagtaccgcattcctacttctcccgtgtgtgagtaccgcattcttacttctcctgtgtgtgagtaccgcatacttcccttgtgcgtgagtactgcattcttacttcccttgtgtgtgagtaccgcattcttacctctcccgtgtgtgagtaccgcattcctacttctcccgtgtgtgagtaccgcattcttacttctcctgtatgtgagtaccgcattcttctcttgtgtatgagtactgcattcctacttctcttggactcctgagagttccatgactaagacagtagtttaatatagttggtttcctttgtcatcctgcatagtttagttttacgcatttcaaaacattcttcagagaaaggtcccttggcttcaccaggctgctgtgggtccaaggcacgaaagcatgaagagtctctgctcatcgccagaggactgtgagtcccaaacaggctccctgtagtctgaacaggcttcagccttctctgggtaatcctaggctgtggttacaacggtggctttggctgcactgggaggcaggagatctgggtttttattctacctccgccactcccatgccagccctctgtgtcctcagctgtgaaatgtaagggttggactagccctacgcacttttgattccttttttttttttaagacagagtcttgctctgtcacccaggctggagtgcagtggcacggtcttggctcattgcaacttccaactcccaggttcaagcaattctcctacctcagcctcccgagtagctgggactacaggtgcccaccatcacgcctggctaatttttgtatttttagtacagacaaggtttcatcatgttggccaagctggtcttgaactcctgacctcaggcgatctgcctgtctcggcctcccaaagtgctgggattacaggtgtgagccaccgcacccagccattttctgtgttatatgtgaaatgtagcaatatgcaaaacagcacatacaatgtctgggtttggtttactaaagactaacgagacggctgggcgcggtggttcacgcctgtaatcccagcagtctgggaggccgaggcggctggattgcctgagtccaggagtttgagaccagcctgggcaacatggcgaaactccatctctactttaaaaaaaataaataaatacaaatttaaaaaaagaataaaaagaagaagaattacattgtaagcatgttcctgtgagctgcccttttctggttaaatttatgtttttaggttcatcttcgctcctgcctgtagctctaaactgtgcaccgtcaaagctgcctggaattccattgcaggaataaatggcggcttactcaggggtggtcacgctccttccacctgttggaagagaatccatagtggaaaatcatttcatgctgcaacgcgacacacatacgtacatctgcacacacacatatacccatgcacgcttgaaatgagcctcataaagtaatacctgcccttattaggcgagataatccttttcaatccattctagaaggtgacctaccaaactgcacgatcccttcctaggctgacctgcagcatgaatgatacggggctgagtgcaccccatcgtgggtctgcctgggtgcgcctgaggttctgtgcctggcaggcaggctcaggtcatggtcctgctgatcccaccaggctgtccgcacgcattggcgtgagagcggtgtgcctgccggttcctttccttcatctgccgggattgttggcttccccctgttccgctgggcgtgttccagcagcggctcttcccttgtagttgctgcttctcatggcctgtggcctgagggaccagccccctaggcatgttagaactgtgtgcactgaggtcgggcgcggtggctcacgcctgtaatcccagcactttgggaggccgaggcaggcagatcacatgaggtcaggagttcgagaccagcctggccaacatggtgagaccctgtctctattaaaaatataaaaattagccgggcgtggtggcgcacacctgtaatcccagctatttgggaggctgaggcaggagaattacttgaacccgggaggtggaggttgcagtgagctaaggttgcacctttgcactccagcctgggcgacagagtgagacttcatctcaaaaaaaaaaaaaaaaaaagtaatgtgcgctgtagcacgactgacttagtagcaagagagggtagtgtctgagaccagactgcccgggttccaagctttgccactcagcagctgtgtgaccttgggccagtcatctgacctatctgagcttcggtttcctcatccgtaaaattgagataatattagtgcctgcctcctggcgcggtgtgaggctgcggtgagttaacttatcgtatgtgtgtgtggactgttgttattactgagcctgcctgtgcgtcagagcctgacattgatctaattctttgctggtatccctggacacagtggctgtgttgaaatgagctcaaaaccctcggctaaaaggaggttggaggtggacggaagagccacttctcaggctgcctgtattcagatcccagcctcaccattaagtaactacgtgactatgagcaagttagtccatctccctgtgcctcagtttactcctctatgaaatggggatagtagtggaactcactattcaccaagtaattgttaagaggattacataagataatgcacataaagctttttttttttctttttgagacagagtctctctctgtcacccaggctggagtgcagtggcacgatctccactcactgcaacctccgcctcccgggttcaggtgattctcctgcctcaacctcccaagtagctgggattgtaggtgtgcgccaccacgtctggctaatttttgtatttttagtagagacgagttttcaccacgttggccaggctggtcttgaactcctggcgtcaggtgatccttccacctcggcctcccgaagtgctggcattgcaggcgtgagccaccacagcatttagctctgccgtctacccggctacccagccaggaactcaggagaggccttttttttttcttcacatgaaaagaggtttattttctcactggacactgtcgcccatgtgaagggagcagccacctggccccaggttccctctcaacaaaggctcagtcctcagaatggctcctcatgagccccctgcagccggaggcctaggctcttccccacagcatgtgccccttagatacccgtctgccctctggtgtaggctggtgggcatgggtgtctgaatttgggtccccacagcacccccattgaggatcacagtgttggagttgaacctggggccacctgggtaccaggacactgtgctccacggtgagcacctctcctgtccctcgatggccagcaggatctggtcacccacctacctgccaccctatccttttttttttttttttttttgagacggaatttcgctcttttgcccaggctggagtgcaatggcgcaatctcggctcactgcaacctccgcctcctggattttcctgcctcagcctcccgagtagctgggattacaggcacctgccaccatgcctggctaatttttgtagttttagtagagacagggttttactatgttggttaggctggtctcaaactcctgaccttgtgatctgcccgcctcggcctcccaaagtgctgggattgcaggtgtgagccactgcggccggcctagatgtctttttatcgttgagttgtaagatttttaaaatatagtctagatatgttttcttcccctctgcacattgtcttttcactttcttgatggggtcctttgaagcaaagaagtgttcattgatgacgtgcggttcccccgtgctctctgttgcttgtgcttctggtgtcgtatgtaagaatcctttgccaagtccaagaccatgaagatctacccccaggttttcttctacatgttgtttagctttagctgttacatttaggtctttgatccatttagagttattttttgaatatggtagaaagtaaaagttcaacttttacatgtggcaatctggttgtcccagcaccatttggtgaaaagattcttctttccccatgaagggtcttggtgcccttgttgacaatccgtcgaccatagatatgtgggttcctttctggactcactcaacgtgactccgtggatctgtgtgtctggaaagatgcccccagcctgacagtttaccttctttgcccatctgctccagtcatcctggaggctcccatagtacacattgctgggacatcccagagctgaacaccatctctcaagtggcctcagagctaatcacttcccacaggcatcgaggcgaccacagagagggcccagtgtgactggctggcccccagggcgcccgggaagggatctgcagatccctcctcctggcacagcgtcctggcaggaggcacggtcccagagcaggccctgtttgtgctgaggccccgccaggattgggtggatgccttggtgagggccaggtaggagggaacaaatgcagggtgggaagtggctgctggaatggggaagggagcggggcctgcaggagggaagcattcttggcactagtggcatcgtcaccaggacaccggccttgggagggcgagcactacatccatgggtaggcgccggagccctgaggacacggcattgccaagctcttgtcctgtggcttccttccctgtgtccgcagtgtgtggggggtgggcgggcaggcaggacgaggtgacccccatcctttctgtgtgctcgttccatgaaattgggggatgtggatgcttgaacgggctctcagctagtgtgccttccgtgcagaggaggtaacactccccagggcagccagacacccttgtggagtgggatggaaagctgggaggaaggggctggccggcaccatggagatattttggtttgcaggaggattctgggctttatgagcactttaatgcaaccagggcaggcagcaccacgggacgggaactgtaagctgcacctgttgaattctgaaggtccgggctgcccgtgggccccgggaagtgggggtgcccagcttgtggggtgcaggcggggaggggaccgtgtggtggtggagacgccatggtacagcctgtctcccgatcccccaggtcccctgaggccttagagatgaatctcccagaagtggcagccgcggcagggacaccaggatcatgaaggacctgggaggtgaacccgctgctcagttcctggccctcgtcccttagacccagtcctcggagcagaactgggggaagctgagatttctgtgggctgcgtgcccacctcctccctcttcgttggtcctcccacgcgcccgcccccgagtgggagcagagccatgtgagctgagttggagctgctcgctgccgagaattgcatcagccccgcctggcaggctggagcgggagcctgttgctatggtgaccaccaggcttcaaaccagtgagaaggatgagatggttgccgggcgaggttttctcaccatgtgatgcgtgtgacaggctgacaggttcggtagacctggacccagccctcccgtaggtgtgcctggacccccagccctcccgcaggtgtgcctggacccccagccctcccgcaggtgtgcctggacccccagccctcccgtaggtgtgcctggacccccagccctcccgcaggtgtgcctggacccccagccctcccgcaggtgtgcctgggtccccagccctcccgtaggtgtgcctggacccccagccctcccgcaggtgtgcctgggtccccagccctcccgcaggtgtgcctggacccccagccctcccgcaggtgtgcctgggtccccagccctccccgcaggtgtgcctggacccccagccctcccgtaggtgtgcctggacccccagccctcccgcaggtgtgcctggacccccagccctcccgcaggtgtgcctggacccccagccctcccgcaggtgtgcctggatccccagccctcccgcaggtgtgccatctgctggggggcatgatgggcactgtcccaaaagccatctgggcattggccaggctggggggtatgactgagggacacagggggccacgccaggcccatgtagtgtcagggggccttccttggtccttctgcctagttgtgggggaaggggtatggtggggatttgaccaagtgcacctgatgatggggcaagaaaggggtccagactggtccccatctcccagaacagagggcggctctggatcacagctgattaaacctgcccaggctgtgtcaaaaattttttttttaacggagtttcactcttgttgctcaggctggagtgcaatggtgcaatctcggctcattggttcaggcgattctcctgcctcagcccaagtagctgggactacaggcgtgcaccaccatgcctggctaattttgtattgtcagtagagacaggtttcactgtgttggccaggctggtctcaaactcctgacctcatgtgatccacccaccttggcctcccaaagtgctgggattacaggcatgacccaccgcgcccggcctgtgtcagaattttttttgttaaccacgtgacaaagctcatcatcttgctaaagataacagagcgcttggccaagccagtgcaatgcctgggttcagatctcctctctcatcttttgcctacaacgggaaaggaggtaaaaagtctgtgttccaggtgtgctgagcacttgttgtgtgccgggagttgtagtagacactgtcctgtctttttttttttttgagacagagtttcactcttgttctccaggctggagtgcagtggcgcgatctcggctcactgtaacttccacctcctggactcaagtgattcttctgcttcagcctcccgagtagctgagattacaggcacgcaccaccacgcccggctaattttttgtatttttagtagagatggggtttccccatgttgaccaggctggtctcaaactcctgacctcaggtgatccacccacctcagcctcccaaagtgctgggattacaggcatcagccaccagcccagcctgtcctgtctttttttttttttttttgagacagagtctcgctctgtagcccaggctggagcgcagtggcgcgatctcggctcactgcaagctctaggttcacgccattctcctgcctcagcctcccgagtagatgggactacaggcacctgccaccacacctagctaacttttttgtatttttagtagagacggggtttccccgtgttaaccaggatggtctcgatttcctgacctcgtgatccacctgctttggcctcccaaagtgctgggactacaggtgctcaccaccacgcctggctaacttttttgtatttttagtagaggcggggtttccccgtgttagccaggatggtctcgatctcctgacctcgtgatccacctgcttcggcctctcaaagtgctgggactacaggcgctcatcaccacgcccggctaacttttttgtatttttagtagagacggagtttcctcgtgttagccgggatggatgtcctgtctttctattgtatcctctccctcacttggggaggaggcagtgatgttcctgttttgcagaagagccggatcgggcagccagagagttgaagtgacctgcccaaaaagggttcaacctaaatccttgggcttcctgtccagggctctgtaggatgtcagccatccccagaatcaggcattctcaggatgtcctgtgaagaaacacacttctccatcccctgctggaaaaaccatgacaatctctccgcagggaagaacgcggctttgaggtggggagtggctgaccgaggccctttgtggtttctaaatggcagaatgagagaggtgggggcgttgagggtgtcacgcccaggaagcagttggggagggcagggctggacactgaccaagcctagcctgggtgcaggaactgagcttgggatttttgcttggggccctctagggattaggatgaattgtcagatgagttctcagcagacagggctttagggaactggtccagggaaataagacgtagagccagaggggaaccagggcctctgtgagagcctggcagtcatgagatctgacttgctgagcttctgaggtgtggtaataggaactaatcctctcttcggtgtgctttagatgtttactcgtttcatcctcacagaaaccctgtgaacttgggtgctactgttactccatgttgaaggtaaaacagaggcacagagaggttatgtgacttgcccaaggtcacacagctggtaaggggtggagcctgtgattcagacccagtcagtctggctgcagagcatgagctctgaatcaaatgttctcctgcctccattcttaccttttagaaagatgacagcaagttgcatacgtgacctcctcacccccaggagtgtgtgtgtgcacatgtgtatatatatgcacacatacgcgcaccagtagctcagcaagggagggaggctcaggaatgggctcgtgggcctctgtgtgttgatggctgggtttgcagaacctagggagtccggcgtctgtgtgcgtgatgctcctcccttcgtccctccctgctcgcgtggttcccagtgggtggggtgccctgttgcctctggtttagagccgtgcaggatgttaccacagaccgtgtaccaggagtgttcacccaaacttgtgaagggccctggactcccaggaaggagctcagatctaggactgggagtggacggcggccgccggaggagtgagagggggcagtgcgcttgccatgcccggggcccgtcctcctgggcctctctcggcgcttgggcaacctgtgtattgcccacacgtgtgccgctgcttgcagctcctggccaccaccctcctctttgtgtctggacgaatctgactgctctgagcacctcttcagagtggaatcatacaggacagtgtctaccgcaactcccagcacacagcaagtgctcagcacacccggaacacagacttcttacctcctttcccattgtgggcaaaagatgagagaggagatctgagtgcagacatcgcgctggcttggccaagtgctctgttatctttagcaagatgaagagctttgtcaggtgggtaacaaaaaaaattctgacacaggccgggcgcggtggctcacgtctgtaatctcagcgctttgagaagtgtgtcagcccttgagaagacaccgggcaagctggccttcctctcggtgtctctcccaggccgggactatggggagaaatcataacaacagggacaacagcagtgacaacgtcagtgacgacaataacagccactaacgttataccacgtgccaggccctgttcttagaacttcgcctggactaactcattcaactgtcacaaaagctgcatgggatgatgttgttatgttattatcttcatttgacaaatgaggacactaaagcacagagagatgaagcaacttgccccaggacacacagctaaaactgggagtggaattcggagagcctggctcctggcatttggagctgacaggtgcccggcaacccctacctatggccgagctgagctcgtcttgtgccagggagttggcggcaaaacagaaatgagctctgggccgggcacagtgcctcacgcctgtaaccccagcactttgagaggctaaggtgggtagatcacctgaggtcaggagttcgagaccagctggccaacatggtgaaaccccatctctactaaaaatacaaaaattagctgggtgtggtggtgcatgcctgtaatcccacctactcgggaggctgagacaggagaatctcttgaacccgggaggtggaagttgctgagatcacaccaccgcactccagcctgggtgacagagtgagattctgtctcaaaaaaaaaaaaaaaaactaaaaccagaaatgaattctggaggtgggatcttcctttgtaattcagaaggtgactcccaacccctcttcagaagctgggtgggctccaggcctggttcagccccctggcctcctgtcgatacccatgggggggtctctgtccctggtattactcctttcctgtctactttttttttaaatttagattttattctatttttttaaattatggcaaaataggccgggcgctaggtagctcacgcctgtaatcccagcactttgggaggccgaggtgggtggaccacgaggtcaggagatcgagaccatcccggctaacacggtgaaaccccgtctctactaaaaatacaaaaaaatttagccaggcatggtggcaggcacctgtcgtcccagctacttgggaggctgaggcaggagaatggcgtgaacccaggaggcggagcttgcagtgagccgagatggcgccactgcactccagcctgggtgacagagtgagactctgtctcaaaaaaaacaaaaacaaaaacaaaaaacaaaagaaaatcatggcaaaatacacatgcctaaaattttccatccagtgtacgcatcagtggcccgaggcacgttcacactctggtgcggccatcagcaccgtcatctccggaactctcacctggctaaactgagactccgcatctgtgaaaccagcgcaccagggaccggcttcgtggaagacactttttccacggaccggggaagggtggggagcgctttcgggatggaactgcgatccctcgcacgcgcagatcacgacagggctcacgctcctacgagaacctaatgccgctgctgctcggatgggaagtggggttcagggggtgacgcttgctcacccaccactcacctccggctgtgcatcctggttcccaacaggccacggactggtgccggtccatgcccgggggggctggggacccctgtattgaacaacagctccccgtttctccagcccccagctcctggccaccaccctcctactttctgacttgatgaatctaactgctctaagcacctcatccgagtggaatcatgtggtatttgcctttctgtgaccagcttctttcacgtagcctaatgcccccaaggttcatcgatgtcagaattggcctgtgtcggaatataagccgaataatatccgttttatgtaaaggccgcgttttgtgtatccattcatccacccatagacacttgaggtgtttctgttttttggcaagtgtcaataatgctcttaggaatgcgggtatttccccgacaacctttgggcttacttcactcatcagcagcaagcaggccatccttgaagcttaccgtggggtgggcccattgaccagcctggggagagtgggtgggtcattgaccagcctggggccatcatgctggctgggaaggcgtggccctcaggtgccagcttctacccaacactaagccgttggtgctcctggcacttacttacttgctggaagacattccaccttgctttcccgtctttccccagaagagggtgctgggtttctgcttctctcctgaatgggaaaagggcggctgcagcttgccatgaggctggcgtgggtggggttaggagaaaggactgtcaggtgctgtgttgggaagtgtgtgtggagcttccgtgaggctggggttggccttctgagcatacatggaagggctgagtgggagcagggtgttagggtagccggtcatgccgtagaaccaaattaatgctgaaggccgggcgtggtagctcacactaatcccggcactttgggaggctgaggcgggtgggtcacctgaggtcaggagtttgagaccagcctggccaacattgggaaatcccatctctactaaaaatataaaaattagctgagtgtggtagtgggtgactgtaatcccagctactcaggaggctgaggcaggagactcacttgaactcaggaggcagaggttgcagtgagccaagattgtgccactgcactccaggctgggcgacagagtgagactctgtgtcaaaaaaaaaaaaaacaaccaaaaccccccacaaattactgctgaaatcctcatcacttaacacaagcaagctgctgcttgctcacagtggtcctggtagacggggggctctgctccccgtggtcatgccgggacccagcctgatggagactgcaccatttggaatatgtggcctccaagggtcacagagggaggagaaagggagaaagagctgtgtgtaatttttcactgttcagccgtgaaatgatacttgtcatgtccacttacagtttgttagccaggactgagcacctggccctgcccagggactgccaagtggccagacagtacggccttccatgtgcccagaaagacaggaggatggggatattgctgggcactggtcgtgttgaccacatagtggcaggtggcttatgtgaaggatgaaggcccttgagcctgctctgtggccagggcagtggtgtcatggtggcagtggtggcagtggcggcagtggtgtcatgtagcaatggtggcagtggtggcagtggtggcctggtggcagtggtgtcgtgtggcagtggtggcctggtggcagtggtggcatggtggcagtggtggcctggtggcagtggtgtcatgtggcagtggtggcagtggtgtcgtgtggcaatggtggcagtagtggcagtggtggcatggtggcagtggtgtcgtgtggcagtggtggcctggtggcagtggtggcatgtggcagtggtggcatgtggcagtggtggcagtggtgtcatgtggcagtggtggcatggtggcaggtgtctgggcactgaagggacttgggtgtaactgacttctaggggaagtggcagaatcatggtcatcttcatgtgccccgcactgtgctgagctgtttacagacgtcatctcatggaatccccacaacaatcctatcattccgtttcacctttggggaagccagagctcaggaccacagcctccaagtgatggctgtgcttgctggtaggagggtgcttatggcagcagagaggccgggggctgaatggagtgtgggggccagaggtggtggggccacaaggatgtgatgtgtgtgtgtgtgtgtgtgtgtgtgtgtgtgtgtgtctccatgtgcctgcgtggatagaaacaagcagagacaagctggctgggcttttgcccttccccagctccgcgcacacctagctttgcaccactctggaggaatggtgacgtcgaatgtccaaggaagaggctaacctgggcacgtcctcttacctgccctccttgaatgacacaagacattggaagtggaagtcacagtcaccggtgctctggagctgggagtggggagaaggaggtgacttttgaggcactctgtgacagcccagttcaacagtagaattatgtttaaggcccaggaaggctctgggtggagagccagcattttgagccgaaggccagtgaacgtggccacccagcagcactgggcagaggtgcggctgcttctgcaggtgtatgtgtgaaggggtgcaagtggacgccttgggcgacttctgcggacaggggcaggagcccggagctgcgtggctctgggattgaagggcaccctggggtggaaggcaggggtcgtgcatcctggtcctggctgctgccaccctgcagggctgctttgagagtcttgctggcctctctggacctggcattacttgtctgttctctgaattgcctcttcctacttctcagcactagattgtcatttaatttttcataaataccctaaggacttacaaagccatagatgggaggggggctccgaggaggccatcccaggcaggtggtgagcaccgttggattgaaaggtcctcccaggtcatcgcctcctggccacccgccttctgcagctctggggctgagtggcatttcccacagggaaagacaggaggaagagcagagccttaaatcaaatcagcccaggattattacttgttatcaattcttgaggaggttcggaggggaagcaggaagtaggctgaagctgttaactctaataagggttagaactcctatgggatttgtcagaaggacttcctggcccccagaccctaaataattgaattggttgttatgggaagagatgaggaggattattaggagatcgtatcactcagccagcagttactgagcattggctctgcgtgagtcctgtcctgggcgccacaaataacaggcagtgagcagaagagggccaccacctcgcggggaagacagaatataccgataacccaaacgaactcagacttgctttctttgtagaggatttattttctttctttttttcctttatttttatttatttattttttttgagacagagtctcactctgtcacccaggctggagtgccgtggcaccatctggcctactgcaacctccacctcctgggttcaagtgattctcctgccacagcctcccgagtagctggaattacaggggcccgccacacacccagctaatttttgtatttttagcagagatagggtttcaccatgttggtctcaaactcctgacctcaggtgatctgcccgccccggcctcccaaagtgctgggattacaggcagaagccactgcacccagccctaatttttgtatttttagtagagacggggcttcaccatgttgaccaggctggtctcgaactcctgacctcaggtgatccacccacctcagcctcccaaagtgctgggattgcaggcgtgagccactgagcctggcccctgcccctttttttttttttgcctgattgactgaacgcgttattgtttgtgaaatgctctttttatctggtatctcttgtcactccacaggggcagccctgtgaactgcgcagggcagctgtgtcttgcccattttacagataaggaagtggcggcacctagagattaggtctggacgcgggacccagatctgcctcctggccccatgcccacctcgttgaatcccgttgcctttccatgggcgactcgtaacggagctgggggtgctggagtctgtgcccgcccctgcatctggtgtgtgatagcttaggagatgtttgttgagtggctgttgcttgcgtacacatgccgtcagctttcgtcgtatcatggcaaggttatacggcccgtctgcaatatgattcctctatgttcggtgggcacataactgtctttcctacagagagatgaggaattttagttccctctgccaaggtggggggattttgtcaaatcgcaggaaacaatggccttggtgcaaagagtagctttaatctgtggctcagctgtttctcagccaggtggccttggatgagactcagaagcctcagttttcccccgtgtcaaagggggccattcatagctactttgacaacctccctgggctgtggggatgaaatgagatcctggccgtgggctcaccgtgtaaaacactgcgcagataatactcagcatgtcccatccatccccaagagctggagactggtgaagccacatgcgcttctctgcccagggctgctggccaccctgacaccctgggcctcagcctctgcccttgatgtccaagaactatgattcctttgtctcaggctgtggagccctgagcttctccaggcggccacttctccaggcggctacggtctctgcctccctcttccaaggatcttggaggtggatgattggatttcatctccatggcaaccagagaggccataacacccgcccatggtggggcctcgagtctgttcccagcagtggaggcagagccggagcaaacaactcctgcaacagcagctgtcccccaggaatgagctgtcccccaggagcgagctgtcccccaggagcgagctgccccccaggagcgagctgccccccaggaatgagctgccccccaggagcgagctgtcccccaggaatgagctgtcccccaggagcgagctgccccccaggagcgagctgtcccccaggaatgagctgtcccccaggagcgagctgccccccaggagtgagctgtcccccaggaatgagctgtcccccaggagcgagctgccccccaggagcgagctgtcccccaggagcgagctgtcccccaggaatgagctgtcccccaggagcgagctgccccccaggagcgagctgtcccccaggaatgagctgtcccccaggagcgagctgccccccaggagcgagctgtcccccaggaatgagctgtcccccaggagcgagctgccccccaggagcgagctgtcccccaggaatgagctgtcccccaggagcgagctgccccccaggagcgagctgccccccaggaatgagctgtcccccaggagcgagctgtccccaggaatgagctgtcccccaggagcgagctgtcccccaggagtgagcttcctcccaggagtgagctgccccacagcctctgcccggcctccagttgccgctttgctgggctaatgaggggctccaggcctcggggtgagggtggcgctgtctgtgctcccagtggctgctacaggccaggccgagggtcctgagtgaatgagacaggggccgacccccacccacccctgcctgtctgtggttcacaatcagagcaaagccctttccgtccgtcttgtcttctcttccccagcgaatcccacagtccccaagactgaggacaagccctgcctcttccgggcagccttccctgtgctggctgaattgatcacgcgcctggctgatggcttcataggctgcttcagagtattttttttttttttttgagatggagtttcgctcttatcgcccaggctggagtgcaatggtgtgatctcagctcactgcaacatccgcctcccgggttcaagcgattctcctgcctcagccccccgagtagctgggattacagacatctgtcaccatacccggctaatttttatatttttagtagagacggggtttctctatgttggccaggctggtctcgaactctcgacttcaggtgatccgcctgcctcggcctcccaaagtgctgggatgacaggcgtgagccactgtgcccagcaagagtcttagttccatttggttgtaaagacgctcacttcagtgtccctgtctgaacctggcggctcttggccttcctatacattagagtcacctggggagcttttaacaggcctgatgcccaggccattccataccaattcagtagcaatccctggggtaggagccagagagcttcccaactccccagggattccagtgtgcagtgaagattggaacagttatcttaggattcaagtcatgaactggccgggcgcagtggctcacacctgtaatcccagcactttgggaggccgaggcaggtggatcacctgaggtcaggagtttgagaccatcctggctaacatggtgaaaccctacctctactaaaaatacaaaattatccgggcgtggtggcgggcacctgtaatcccagctactcaggagactgaggcaggagaattgcttgaaccggggaggtggaggttgcagtgagccaagattgtgccattgtactctagcgtgggagacagagcaagactctgtctccaaaaaaaaaaagaatttaagtcgtaactagtccaccagcctgtgctgaatggaggctgactgatgaacagcagagttagctgacaaagcttgctgtagtcttaactcactgcaaattgccaaagccctggtttgttttttaagggctgggaggtccctaagggttcttggtactcaggaaggagagcaggggaataatgataatagctgccgttttgttagcgccagctttgggtgccttgcatagcatatatttcctcattgtaacctcgcaaaagcttcatgaggtatagatcttgtttttatcctcattttagagatgagaaaactgaggctctgaatggctaagtagcttgcccaaggtcacatggctaaggtcacattcccgaagtgctaatctcaggaatggaacccgagtgtgattccaaagcctctgcccttgaccactgagctgtcctggctccccaacctctgctccatcaatcaaagaatggggggccctgagaaggaggtggcttgtcccgtgggaaagatgctggtttccaggattcctccccttggagccaggccctgactgaggggctcccgatggtattaaatatctcctggatcagctggggtcacctggaccctgaaggtgtctactttcccgttgcctacgacacccactcggcttcagctgagctttcccaaggacccttctgccctgatactgtgcccagttctttaacctacatcatgttatttaatgtcattttcacaaccaccctgtgacatggtatcgttatcctcatcttgtttctttgagacagtctcactctgtcacccaggctggagtgctgtggtgcgatctcagctcactgcaacctctgcctcccagtgcaatagaagactggccgggcgcggtggctcacacttgtcatctcagcactttgggaagccgaggtgggcggatcacttgaggtcaggagttcgagaccagcctggccaacatggtgaaaccccatctctactaaaaatacaaaaattagccgggcatggtggcgggtgcctgtgatcccagctacttgggaggctgagacaggagaattgcttgaacctgggaggcggaggttgcagtgagctgagatcccaccactgcactccagcctgggtgacagattgagacttcgtctccaaaaataaataaatcaataaaataaagtgcagtagaagacagtgtccttattgttgtaggtgaggtggtagattttgtatctgagccaccatccctgctgaaattgccccggacaggctgatctggtacaggtggcacctgggaagtggcagcctcgcttccgctggccagttccctggttcagggttgccggcctcccagatccacacctgtggtccagactctgctgtctggctgcccgttggatcttctgacagggatggccatgagtcttctcagtccagacatgtctccacctggacttagggtctgttcccccggaaccagctcccccttcctgtccatcgctcagccctccaagcccagaggaccctgctgtggccgcattttcagtcaactctcccatcgccagactttgcccttggttcccaccatggtcacctttgacaaagcacggaggggcggtttgccccgttccacatcatctcatgcaccacagtcagcttcgttttcctgaagtcacctctgaaatcaccttgccattttggcatccgtggctcccagcgtgcgtgaaatctgactattcaggatagtgttccaggccctctgcagtctgacccctccagagctcggcttcagtggtaccagtctgttcatcagggccaacctcctgcgtcctgcccccattctgcacgctgataccctgccgcaaatggaccttttccttcctcacgctctgtgactggttgtttcttccatatgaacccctcagggcagcccacacacttcgtgtttggtatttgtatgagtcctacatatgataacattttaagagcaaaggttgtggagttggatgacctgtgtccatctggtttcccacctgactgccgtgaaatcttgggcgagtaacttaactccctgcgctttcatttcctccattgtaaatgagtcataatggtacggaggcagaaatttaaaaacaaatatgtatgtatttactccaagaaaagtaacaggcaaggcaagggttaaaaagaaaaaaaaaacaggccgggcacggtggctcacgcctgtaatcccagcattttgggaggccgaggcgggtggatcacgaggtcaggagatggagaccatcttggctaacacggtgaaaccctgtctctactaaaaatacaaaaaaattagccgggcatgatggcaggcacctgtagtcccagctactcgggaggctgaggcaggagaatggcttgaacccgggaggcggagcttgcagtgagccgagatggcgccactgcactccagcctgggcgacagagcgagactccatctcaaaaaacaaaaaacaaaggaacaaaaaaaacctctttttttttctgcctagcaagctcactttaaggagttataagataacgctgtttaagaagccaaggctaaagaaatgggctccacacacccgccttttagagcaaggttgaaggaaaaaagaaagagaaattcctttactgttactcctttccctggcttcctaagcataactgtgtttacaaatgtctggatttagccagtccttgtttttcttttgacacagctacaagccacaagttatgcactatatgattaactgcttttgttttacttttgtgaagtctgcttataaaaaccccattctgtctttattcaatgctaagctttttaaatgcaaatccactgagctagtgcatacctaaaataaacagtccttcccttctccatatcggtctctccggtcctcagtttcctgcaacagtacaacttagattttaaatttttaagaagtttttcaggcagagtgtggtggctcatgcctataatcccagcactttgggaggccaaagtggaggactctttgaggccaggagttcaagaccagcccggcccacatagcaagaccctgtgtctacaaaaactttttcgaatcagccaggcatggttgtgcatgcctgtggtctcagctacttgggaggctgaggcagggggatcatctgagcccaggagtttgaggctgcaatgagctatgtttgtgccactgcactccagcctgggcaacagagcgagactctgtctctaaaaaaaacaaaaaacaaaaatcaaaaaacaaaaaaaagcttttcaagtgcaccagtcttaagcatagagcttggtgaatatttccatatgtctgcttgtgtaactaacacccagatcaagatatggaacatcttcagtgtcctggaaagttgcttcctgccccttcccagccaacactccctgtccccgtcgtccacccccagaaagccactgccatggacttctatcaccatccatttgtttcgcctgttcttgagctttgtatttaggctggtgcaaaagtagttgagagctggacgtggtgggtcacacctgtaatcccagcactttgggaggctgaggcgggtggatcacctgaggtcaggagcttgagaccaacctggccaacatgctgaaaccccatctctactaaaaaaaaaaaaaaattagccgggtgttggtggtgggcacctgtaatcccagctactcaggaggctgaggcaggagaattgcttgaacccaggaggcggaggttgcagtgagccgaaattgtgccactgctctccagcctgggtgacagagtgagaccccgtctcaaaaaaaaaaaaaaagtaattgtggtttttaccattatatattacctttgctccaacctaaagtaaatagcctcctgcggtgcaggcatacctcgctttacggcactcctgtgatgcgggcgtaccttgctttacggcactcatgtgcaggcgtacctcgctttacggcacctccatgcttagttgagcttcaaagatgctgcgttttttttcaccagttggaagtgtgtggccacctcgcattctctctgtgttacgtgttggtggttctcacgatctttcagacttttttattgttatgacacctgttacagtgatctgtgatcagcgatcctccatgttagcattgtcattgttttgggcaccacagaccggacccggcaaccttcatctatgaacgttgtgtgttctggctgttccgcccaccagcctttcccagcctctctcctctccccgctccagcctccctattccctgagacacaaaaatatccaagttagtccagtgagtaaccctacagtggcctcgaggtgtgcgtctgtcactttaaatcaaaagctagaaatggttcagtttagcccgggctcggtggctcacgcctgtaatcccagcactttgggaggccgaggcgggcagatcacgaggtcaggagttcaagaccagcctggccaacatggtgaaaccccatcgctactaaaaatagagaaattagccgggcgtggtggcgggcgcctgtaattccagctactcaggagtctgaggtgggagactcacttgaacctgggaggcagaggttgcagtgagctgagattgtgccgctgcactccagcctgggtgatagagactgtctagaaaagaaagaaagagggagagagagaaggaagagagaaagagagagagagagagaaaaaagaaatgatttagtgtagtgaggaaggcttgttgaaagccaagataggctggaagcggagcctctcctaccagttagccaaattgtgaacacacaggaaaagtgttttaaggaaattcaaagtgcttctccagtgaacacaagaatgataagggaaacagccccactgctgatatggagaaagtttgagtggtcggataaagatcaaaccagccacaacgttcccctgagccggagcccaatccagagcaaggccctcgcactctgcaagtctgtgaaggctgagagaggtgaggaagctgcagaggaaagtttgaagctggcagagatttgttcatgaggggtcaggaaagaagccgctttcataacagaaaaaggcaaagtgaagcagcaagtacggatggagaagctgcggccagttgtgcagaagatgtagcaaagactgtaaaggaaggtcaccgcactaaacatcagatttttggccaggcgcggtggctcacgcctgtaatcccagcactgtgggaggccgaggtgggtggatcacttgaggtcaggagttcaagatcagcctggcctacatggtgaaaccctgtctttactaaaaatacaaaaatcagccaggcctggtggtgcacatctgtaatcccagctactcaggaggctgaggcaagagaatcacttgaacctgggaggtggagcttgcagtgagctgagatcgcgccattgcactccagcctgggcaacagagccagactctatttcaaacaacaacaacaaaaccaaacaaaacaaaaacaaaacagatcagattttcaatgtagacaaaacagccttctattggaagaagacatatgtaggactttcatcctagaaaagggatccgtgcctggcttcgaagtttcaaaggacagaaggacaggctgactctagtgttaggggccagtgcaggggtgactttaaaccagtgctcactgaccattctgaatatcccagggactttaggagtaatgctcaaacaatggtattcttcacagaaatagaaaaaaaaaaatgctaaaatttatatggaaccaaaacaaaaataacaaaactggaagaatcacattacctgactttatttgtttattttttttgagacagagccttgctctgtcacccaggctggagtgcagtggcccaatcttgcctcactgcaacctccgcctcccgggttcaagtgaatctcctgcctcagccccccgaatagctgggattacaggcacctgccaccaagcccagctgatttttgtatttttagtagagacaggctttcaccatgttgaccaggctggtctcaaactcctgacctccggtgatctgcctgctccagcctcccacagtgctgggattacaggtgtgagacaccgcacctggcctctctgaagacttttgatgcagctttggtggaataatggtcagggctgggctccctcagctgctcttccctctctcattcccatcctcaattcttgggcagaaaataagtttatcacttaacagtcagcctctgtatcacccttgcgacaggctggagggtgtcgctccagcctgggcaacaagagtgaaactctgtctcaaaaaaaaaaaaaaaagacaaaaagaaaaagaataaaaaataaagttagcaatattcagcaatgatgtggccggcaagagcctgcagaggatcatgggccaggtcacccatcctcactgagtcctgcacggctctcggctcagctcacgaggctctcaggagcaagtccctgcctcctctccagcacggccctctccccctctgctcactctgtgttctagccctcctggctatttatagtcccctccaggggccctgctgtttcccactgggtgccactgccaagcctcctctcaccgcctgaaactctgctcctgtcccccacccgcctggcaggcacccacacagctttcaagatccaattaataacagtaataatagcagctgagatggattgggtgcttcctatgtgctaagtgccgtatgcgtgtcatccagtttaacccccgcagcggcccgtgcacttgatcctgtgtcgtcccccgtttcacacggatttgctaaacccgtatccatttagtagcagccaccctgtgccaggcactcctcggaggcacagagaggttaggaagtgccagagcgtgggctggaacctccgctgccggaccgcagggtccctgctctcagccacagcgatgaactgtcttccttagcgtggcaccaaagcctccccagccacctcccctccccgagtgttgcccacaccctccggtccgccttgccgggcctttgaggcctctgtcgtagcatctcggagatttgattgctgattggactcgcttcctctctgggctgtgaggatatcatttggaaatgtgttcattgtaagcagcagaaaacccaatatatagggacttgtatttcccatgagcaggaaatgagacaggctcttcctagtgtggctcagctgaacagcatgagggaaatggctctgttcttttatttatttaatttaatttaattaattaatttttatttttttgagagggagtcttgctctgttgccccggctggagtgcagtgctacaatctcagctcactgcaacctctgcctcctgggttcaagtgatctcctgcctcagcctcctgcgtagctgggattacaggtgtgtgcaaccatacctggctaatttttgtatttttagtacagacggggtttcatcatgttgagcaggctggtctcaaacttctgacctcaggtgatccacctgcctcagcctcccaaagtgctgggattacaggcgtgagtcaccacccggctaatttttgtagtttctgtagagatggggtttcaccatcttgcccaggctggtctcgaactcctgacctcaggtgatctgcccgccttggcctcccaaattgctgggatgacaggcatgagccacgcgcccggcctctgttctttcttgacctgttcctggtggcagcagtaaagccaccgtaactccaatcatcacccatgagttcaaggcaaaatgtctctttgtaatcatcaaagtcagggccttgccagaggtcccagcatgcttcacttgggtctcagtggccagaatggtgtagggcagccgttcctggtaatgagagaggcagagaaagcgggtatcttgcctgggactggtctgttgccacttcctagaaaacgagggtagagtaagcaaggaagaagggaagacgggtgtcgggtgtctgccagtgccctagagcgcagagaccgtacattaattttttcaaaatttccagaatcggaaggctctaatgattttgtgttgtagccttccagtcttttttctatgcacgtatgtttttacttttttcagacattgtaacatactttaattattgttattaatctctttttgcacttgataagatgctattcatcatccatatagtttttaatgctatatagcagcccatcttgtagaaaaaccataattgactcaaccagtctcataattcaggttgtttttaatatttcacacttacagacagccctgtgacttacaactttatttttatgttcatttataactagtatcatagatcataatcttattacgctgggtataaactgtaccaaccactaaaccttttgataccagttaccagattgactctagaaaagttgggccaactttttttttttttttcgagacggagttttgctcttgctgccaaggctggagagcaatgttgtgatcttggctcaccgcaacctccacctcccaggttcaagcgattatcctgcctcagccttcccaagtagctgggattataggcatgtgctaccacgcctggctaattttgtattttagtagagatggggtttctccgtgtgggtcagcctggtctcgaactcctgacctcaggtgatccgtccacttcggcctcccaaagacctggggttacaggcgtgagccactgtgcccagccaaagttgtgccagttataggcagcctccaagagtttctgtgagtacctatgccctgacagctctggatattgttattattatcttaaaatccttgccaatttgacacgaacagtgaaaactatatagaactttacattttctttcattacaaatgaggttaacattctttttaatgcattttgaatatttgtagttctcttttaaattttctgttcatttcccttacacatttagaaagttgaggttttcatcttttctcattggcttgtaaaagtgctttattggccaggtgtggtggctcacgcctgtaatcccagcactttgggaggccgaggtgggtggatcacaaggtcaggagttggagaccatcccggctaacacggtgaaaccccgtctttactaaaaatacaacaattagccaggcatggtggtgcatgcctataatcccagctactcgggaggctgagacgggagaatcgcttgaacctggcaggtggaggttgcagtgagctgagatcgtgccaatgcattccagcctgggtgacagagcgagactccatctcaaaaaaaaaaaaaaaaaaagtgctttcggtattcaagtattatcataatatgtagaatacaggaaagttcctgggagagggcacagatgaggcagatttgagggcaaaacaggatttcaccaggtggacaaggggtaaggagaggtatatatatatgtgtatgtgtgtgtgtgcgtgtctttgtgtgtgtgtgtgttcatagagacagagtctccttatgttggccaggctggtctcaaactcctgggctcaagtgatcctcctgccttggaggatgccccacatcatagtgatgggatgacaggcgtgagccaccgcgcccagcaaggagggttttctaggcacgggagcagtgtgtgcaaagaggggggagctgtgtgcgtggcaggcactgcatttggtgtgcaaagaggggggagctgtgcgcgtggcaggcactgcatttggtgtgcaaagaggggggagctgtgcgcgtggcaggcactgcatttggtgtgcaaagaggggggagctgtgcgcgtggcaggcactgcatttggtgtgcaaagggggggagctgtgcgcgtggcaggcactgcatttggtgtgcaaagggggggagctgtgcgcgtggcaggcactgcatttggtgtgcaaagaggggggagctctgcgcgtggcaggcactgcatttggtgtgcaaaggggggagctgtgcgcgtggcaggcactgcatttggtgtgcaaagggggagctgtgtgcgtgtcaggcactgcatttggtgtgcaaaggggggagctgtgtgcgtgtcaggcactgcatttggtgtgcaaaggggggagctgtgtgcgtggcaggcactgcatttggtgtgcaaagagggggagctgtgcgcgtggcaggcactgcatttggtgtgcaaaggggggagctgtgcgcgtggcaggcactgcatttggtgtgcaaagaggggggagctgtgcgcgtggcaggcactgcatttggtgtgcaaaggggggagctgtgtgcgtgtcaggcactgcatttggtgtgcaaaggggggagctgtgtgcgtgtcaggcactgcatttggtgtgcaaaggggggagctgtgtgcgtggcaggcactgcatttggtgtgcaaaggggggagctgtgtgcgtggcaggcactgcatttggtgtgcaaagaggggggagctgtgtgcgtggcaggcactgcatttggtgtgcaaaggggggagctgtgcgcgtggcaggcactgcatttggtgtgcaaagaggggggagctgtgcgcgtggcaggcactgcatttggtgtgcaaaggggcgagctgtgtgcgtggcaggcactgcatttggtgtgcaaaggggagagctgtgtgcgtgtcaggcgctgcatttgtggcttaatgctgccattagagattgccatgaacttgatggcttagaacagcagaaatcgatgctctcgcagtctgaagaccagaagtctgaaatcaaagtcccagcccctccccaggctgccggggcagagttcccacttactcccctctttcagtgtctggtggctccaggcattccttggttggtggcagccccagtccaaaccttgcctctgtcttctcttctgtctgtgttttccccctttctctttccatagggacacagcattggatttaggacccaccggttaatcgacaatgatctcatcttgagacccttcatttattcacatctacaaagaatgttttccaaataaggtcacattcccaggtcccaggaattagaatctggacataccttgtgggggggccactactgaacccaccgcagggagctagaaggagtccgatgtcacagggcaggagaataggaccctggagaggtggagcaggtgcagaccacaaagggccttgagctgaggagcggggctgtgtccctaagtgaatggggggcaacacggtctgatttgtgacccggctgctgtggggagggtgctggaattgtccttgtaagagttggtgagggtggggaggagcggggatgcctcacagtgcaggagatgaggggcgggaatgtggaggcatctagaatggctcccaggttccctacgtgtgtggtctttgggaaaaggctgcgtttgaggctcctaaaggtggagatgcccaggagtctgcagacctgacttcttccgggagcaggaacacaattcgggagaggaaggtgatgcgaggttgatggaagctggcgagtaccagtccctgccaccaccaccattttatcatgaacaattgtaagcacacagaaaagttgaaagaattcacagtgaacacccattcacctgctgtctaacgttcccagtgatgatttttatgcgcttgctttatcacacagctgtccatctttccatccctctgaacatcatcattccatcttggtttttttgttgttggttggttggttgtttcgagacagagtctcactctgtcacccaggctggcgtgcaatggtgcaatctcagctcatcacaacccccacctcccgggttcaagcagttctcctgcctcagcctcccaagttgctgggattacaggcacccgccatcgcacccagctaatttttgtatttttagtagagagggggtttcaccatgttggccaggctgttcttgaactcctaacctcgtgatccacctgcctcggcctcccaaagtgctgggattacaggtgtgagccaccgcgttcagcccatcttattttttatgtatttcggagtaagttgcagagagttgtacacttcactccagcatgtcactcactggagcccaacatttgctgaagtgcatgaatctttttttgttcttgtttttgtttttgtttttttgagacggagtcttgatctgtcgcccagtctggagtgcagtgtcgcgatctcagctcactgcaagccccgcctcctgggtccacaccattcttctgcctcagcctcctaagtagctgggacaacaggcgccaaccaccacgcctggctaatttttttgtagccagtatggcttcaccatattggccagtatggtcttgatctcctgacctcagatgatccgcccgcctcggcctcccacagtgctgggattacaggcgtgagcccctgtgcctggccctgtcatctaggttttaagcccctcgtgcattaggtatttgtcctaatgctctccctccccttgccctccaccctccaacaggccccagtgtgtgacgttcccctccatgggaacagcaatttttaagggatgggtagagaaagaagatttcaccaaggagcctgagaaggacggtgacagtcagaggaaaagcaccgaagcggggacgtcagggaagatcacctgggtcagttaccttaggtttgactgcagataatagaaaaaccaagtaacagaggctcaaattgcatttggcactttttctttcttttatgtaaaaacgccccgaggtagaccttcctggggtgggctccactgtgccctcagtgacctggactcccagcttgtgaaaacgtcccgaggtagaccttcctggggtgggctccactgtgccctcagtgacctggactcccagcttgtgaaaacgtcccgaggtagaccttcctggggtgggctccactgtgccctcagtgacctggactcccagctttctgctcagctgtcttcagtggtggcttctatcctcagctcacctcatggttcaggatggctgctggggctccagccatcccatcaactctccaaaccagcaacagaaggaggaacaagggcagtgtggatagtgtacctttcggctaaatcagtctcttccagcagcttcctgcaagttccacacatatccctgtaacatcttgttgtctagaacgtaatcatatggctcacaccatcaggaaaggtgtctttgaactagctgctgggtgcactgccgctccgaatacagtaggatttctgttagtcggcggggaaatggatattggctgccagcagcctttgccttgtctgccttttcttcttttttgagatctggtgcccaagccgctgtctgctcagcatacccacctgtggccgtcggagactgaagcctgtgctcagtaggtccccatcttcctcccccagggttcctgccttctccgaggattggtttccccatcttttctgtaccccttttcctggttggagtctcctgggctctcatggttttgtgggggcagaaatgaaaggggaaggccctggaaatgttcgcaggccgagccctttcgccgcccctgggcctccgcccaccagcaccctgtcctcaggccccctgcgttcagctccatggtcagccccccttaaccaggagggatatggaaggggacttctttggagtgagattcagagggaaagggagggcatttgagacctgggttctgatcctgtgatcttcggcaattgtatgtaaattgggaaaaataagaactgcctccccgcggaacatccaggctggaaggagcaggggatggcagggcccgtggtcctctgctctgatcaggatgaactgtgcatgtggggagactggcagagaccttccctaccgtcccttcccccccgttgatcttggacgatctcccaagtgtgtggggtccattcctgcgacccctgggaattggtcagtgtacaggagagtctgcttggccggctggaatctaaactgtgggcaaagccgcggtccactattgcttattttccctggactccaggcaccaacagggcagcctggagcctcctggagaggaggagggaggagggaggggccggcgggaggctgccttccatcccctcctgtgcttctccagagtgagggggtgtcaccaaacggccaggcccttcacggacccagactcaggccagctgggtgccgctgtgcctcttcctcctccccctggaaggaccagagtcatttcacatcccttcagccacagacacaagtgtcatggtctccagggcactgggccttatgtcctaggtgcgtggcctacacacatctcagtgggagggcatcctgggtcctgcccaggtacgtggcgtacacgcgtctcagtgatggggcatccctgggtcctgcccgggtgtgtggtgtacactcatctcagtgatggggcatccctgggtcctgtggttcttcatacacaaccctgtctagggaaaaaactagtccatgtcccctggcagctgaatggggcattggctcagggacgaggagaggcagccgacagaagcaggtgcagcgagcctaggggaagcgctcggctgccaaaaggccagattgggcagagtgtggccacggccaggcgtcccggtgacctgttgacaccattctccagctgctggttgcctgtgggctggtgtgttgtgacagaggagggaagagctggggcccccgtggagaacttggctggctgggacttggctgaagcctcagacctgagacagacggtgcgatcctctgctcattcattcgctccacgcactttccccgagagcctgccacaggtggggttgtgggtgctggcgtacagtgatgactcagatgctcacctcctgccccaggggctcaaggacaaaggggcaggattcactaaggtgccagggggccaggtgccatggggagggtgacctggaggaaaggatgtctgggcagatggcagggcaggctcagccagcctcccccatcacactgtgcgagatccgaagatgcctggccagggagtcccgcccggaagatacccggggaggtttaacaagcggacgccgccactgggcagtccagtgcgtaggaggctcctgctggccccaaggctgccggcacggtgatcttcgtgtctccaggacgccctgcggtgccagctcccgctggcccgcacgagtgctgaagcttacccctgctctgcgatgagtgtgagaggggtgtccaccccccgctggcggccccagcccaaggaggtccaccacagccctcgggagcaacactgccacgttctccgttgccagtcgtggtgggtcagagctggggagcaaacaggccaaggggcaggggccggtttgtgggagggtccctcctatagccatgctggtggggctggacgcaggggcctttccgaggccgccctcgtaacccttttggaaaatgtgaagccctgagctgctgacctgcacaccccgctcgctgcactggctcagcctcccctcccaaggtgggtgggctccgtgcctgggctctggagcccaagtggtgctggcagccctggggggttaatgcggctcaacttcccggtcgcctttccttccctcctcctttgaaggaagcccacactggggtgatagaaataagcaccggctccgaggagtctgctgtgagcccctgtccctgccaggcctgggcacagcctcctcgcccacgccctgctgccttgggctccgtcctccgtgcggggccttgttctgagggctgagggctcccctcccacactccagaacctgccctggacccctggagggagtgggctcagtacaaatggtacccaaggaggagggccacaggaagtgacatcgaccggccccccccacctccttattccctataaaaagcaaaatggtgactcagagaggagagttggaagcgtcctgcctcttgctcccactgttaatttttacacttggaattaggcagaaggcaaagaaaacagcagcttgaaatacgcggctgacatgctcttcatcgggtagcaacagcagagccgctcctccccgcctcccagcagccccggagcgggcagggcccggtgcctgctggctctcccccgcccctcaccaggcccaggcccccgcacagcccccgcccgggccaggcgtggatggtgcggccggggccatggctgccgggggccgccgccggcgcccactacgctaccagtccctggcagctctggtggaggattctcagtggcctttcttgttccttgtctcagacttcagctacgggacggacgagtacgacggagaggggaatgaggagcagaaggggcccccggagggctcagagaccatgccgtacatcgatgagtcgcccaccatgtccccgcagctcagcgcccgcagccagggcgggggggatggcgtctccccgactccacctgagggactggctcctggggtaggtacaccggcttttctttctgggtttggggaggggtgacgggaaggcctgggcatcgtgggccaggccctgcttgggttggtctcgagagattgggactggagacgtttggacctggccgttcttggtgcctcgtcatctcgtcctggccctggacccctctcaggctcgggcttccctccccacctgctttgccaacgctgccgcccctgtctctccccgtctactagccgtctgctccccaggcctcccagacccctccgtgcctctttcagctttcccctgttagcctgtctcctccagaggacccaggagaggaccaggctctcctcccctctgcacccaggccaggcagtggctgcatgcgtggcccgtgggctccaggtgttcagatgctgctcccgcaaagccagcctgggcctggtgctccctgtgggtgcaatgagctgcccgctccagccctcctctgttcactctggaagggaacaaactctgatggcatccacctctccttgttgacagagacaagagttctgctccagagagaagcattgtagaaggaatattaagtatgtgctctgagacaggccagggatagaaactgtggagggtttgcggtccttgtcattaacgtgttcctggcgacagggactgacgctgtctgagcgcagctcgtgtgtgcctgtcggagacacatgaacgagcaaaacagaggttctgggggttgtttgcctggagctggtgggggagaagaatccaagccggtcctctgtggggggtgtgtgttgcaggaggcggtgggagtgccccatccttgcttggtcctgctcgtccgggtgtgttttgtagggggtctccgtcctgccttctgacgtccccagaggagcagtcgctgagatgccacgggctgcctcttcttcctccaggggctagtgcccccccaccccagctgaggccgcctgaaccctcccattcttgagaaccccctgctccttccagcccccccggccaccctccaccccccacagagctctcacccctcttcacacaccggggtggctgttatagcctttggcaacaagggccttggcaacgggcttcccacttgggggaagccacattgctgccatggcaacagaggccgaggccgagtttagcggcagtccaggcgtgcacctgtgggaagggctggcggggggcaggtgggaggcaagggggccggcgagggggttggtcagtgtgttgttgacctgccctaagacgggaggcgggttagagacaagcgtctcggacctgcgggggcagggtttttgccctggttctcctggaggcattgggctcagggtacaaatagtaacccaaggaggcagagcaggtgttcagggacctgaacgggggccaaccaggggagagcaaggaggagaagactctcgctcccatctctgccttcagctctcaaaccacagcagggctcagagccccgcccggggggactcagctctcaccccactgtgagcagctgcaggaagatgctgcggaatcccggtgtggggccagggtctttgccgctgcctgtccccgcgccacctccctctttgctccctgtccctgtgccctgtccttgtcgcgtgaccaccatgactggtttccgtgtccgtcgattttccgattcctttggtgctggcaggtgccttctctcgggagacagatcacgggcgtcacgcacagatgcccccgcctggcgctccggggcttcggggcagaacttgacttggtggctgtgcgtcttgcttggtggctcacgagggactcacttggcttgaggaccttgaaatccagagatgctagagtgactgccccctaaagtgcttgtggcccccagggttgatgtttacaccatcgactagaagccacgcaaggcaggagtagggagcacttgtccagcctggggatcgtccgggcaaaggtcccatccgcggcacctgccttccctcctcagggagcgtttctgccctttctgctgggtcaccggccccacctagtggactctgcagggattgctgtttacacggggtgcctggagggagctgacgcctcttcctgagtacttggggatgttttggttaaaaacactattaataaaagaccgaggtttctgcggcttggctgtgcttatttggccaaacaggtcccctcccctaccaggcttcctgctggggccttgggaacaggggggacttctggaccaaatcagacaattgttgtagatattcagatatctggcttctggcaccgccttatcgctgggccttccacgcccaaatatgcagccaacgggaagcccaaggttgagtctttgtgttagtcagtgttctctagagaaacaaaaccaacagggtgtgtgcgttatctgtatctatatctacatacgaagaaaagtattagaaggaattgattcaggtgattatggaggcttagaggtcctaatctctgcagtcaatagctggagacccaggacagccaatattggttccagtccaagtccaaaggcctgagagctaggagagccagggatgtaaattccagctcataagccagtggactcgaggctcaggaagagccagtgtttcagtccgagtctggaggctggaggaggccaacatcccagctcacgctcaggtagtcaggcgagaggagcttcctcttattctgcctttttgttaattcaggtgttcagtggattggatgaggcccacctacactggggaggagtctttttactcagtccaccaatacacatatcaacctcatcccaaatgcctcacaaatatgtccggattaatgtttggacaagtatctggacaccttgtggcctagtcaggttggcctagaaaatgaagtgtcatactattattccttcagccacccaggatggaaagcagataagctttgcgcagatgaaaatctattactctcaggctgggcgcggtggctcacgcctggaatcccagcactctgggagactgaggcagccagattacctgaggtcaggagtttgagactagcctggccaacatggtgaaaccctgtctctactaaaaatacaaaaattagccgggcgtggtggcacatgcctgtaatcccagctactcaggaggctgaggcgggagaatcacttgaacctgggaggtggaagttgcagcgagccgagatcttgccactgcgctccagcctgggtgacaaagcgagactccatctcaagaaaataaaagaaaatctactctttagctgtgagacattgggcaagtgtcctcataccgctgagcctcagtctccttgtctctagatagctctaactcccctgaaaggtagtggggaggaggccccactgtgagcagctctcagaccacagcagggctcagagccctgccttggggactcagctcccatcccactgtgagcagctctcagaccacagcaaggctcagagccctgcctgggggactcagctcccatcccactgtgagcagctctcagaccacagcagggctcagagccctgccttggggactcagctcccatcccactgtgagcagctctcagaccacagcagggctcagagccctgcctggggggactcagctcccatcccactgtgagcagctgcaggaagatgctgcggaatttcagcatgaggggaggcctgcagcattaggcctggctcaccaaagtgcacagcccttggccaccagggcccacaagacttttctcgccaggtttagagggctggggagccaacagcattaccactgcaaagaccaagtctgatcaatatctgctgcaccatgaccgaacctgcttttgcaatcaacctcctttctgccacatggggtggccccgggtgaagccgggtctctgcggtgttggcaggacatgctcctctctccccagcacgcccttccacagccttgcactctgcctttgtcttcttttgtgtccccaagacatggatcccacagaggtattagggtgaaacctgaagccctgccccataaaccctgcccaagtccaggctgagcagggcagcacggcagggccaggcccacagaccacgggtggctccattcagcggagactgcccagtttcactctgagaagaaagggccaggactcatctcagctgacaagtgggggtgtaggttcctaaggcaggaccatggtcttacagaaaacccgcctccccacaggccacagactcctctgtctgcttgcctcttgggaagcttagtaaaaaggggctacaaggcagagagaagaactgggttttgtccccactctaccactgtctcactgtgtggcctgaggggtgtcactcatgactccccaccagagctgcagtttgctcatctgtagtgtgaagacactgagaatttcctccctcctgacctcacagggctcaaacctcacagctgttgtgaggtttctgtgagatggtgtttggcagaatgctttgtcaatgtaaaatcgaaacaggggattagactccagcctgcaggagaacccaaagataagggtggaggcgaattgaaatcctcaccattggccgggtgcggtggctcacgcctgtcatcccagcactttgggaggccgaggtgggtggatcacctgagatcagtagttcaagaccatcctggccagcatggtgaaaccccgtctctactaaaaacatacacaaaaaattagctgggtgtggtggcaggtgcctataatcccagctacttgggagactgaggcaggagaattgctagaacccagtgggggcagaggttgcagtgagctgagatcacgccattgcactccagcagccagggggacagagtgagatgccatctcaaaagaaaaagaaaaaaaggaaaaaaaaaatcatcatcattgtccctatcatcctcttcctcctcctccccctcatcacagctgcttagagaggcttgtgctgaacctttcacgtgttggtttcatttaagagccccaacaactctatgaggtaggtgctataaccatctccacattacaggtgcgaaaactggggctcggagaggtgacgtaatttgcctaagattagctgggcatggtagttcactcccataatcccatctacaaggggaactgaggcaggaggatcgcttgagcccaggagttggaggctgagaggtgctaggatcacgcctgcgaataggcattgtaccccgcctgggtgacagagcaagactccatctcttaataatagctattaatattattgtttgtccaagaccatgcagccagtggggcagcgtgttattgaaacttgggtttctatgatgccagagcctgcacagcgctgtcaggtcccgctcacacgccctcccttgtgaagctttcacacccaccccgccgctgatcctactgcagtttgggaggtgtgcacggtcacttgtggggtgcatccgccctgtgagatcaggaccttaatccctgatcatctctgtggaccccagtggaagcttcttggcacctaggggttctcaactggtatttgtggaatggaaccaagtagttctgggatgttcagtcaggaggaagggaggagcaaggaaggctcaggcaataacgctgggaagaactcaggctcagggataacgctgggaggaactcaggctcagggataacgctgggaagaactcaggctcagggataacgctgggaggaactcaggctcagggataacgctgggaggaactcaggctcagggataacgctgggaggaactcaggctcagggataacgctgggaggaactcaggctcagggataacgctggggaggaactcaggctcagggataaagctggggaggaactcaggctcagggataacgctgggaggaactcaggctcagggataacgctgggaggaactcaggctcagggataacgctgggaggaactcaggctcagggataacgctgggagaactcaggctcagggataacgctgggagaactcaggctcagggataacgctgggaggaactcaggctcagggataacgctgggaggactcaggctcagggataacgctgggaggaactcaggctcagggataacgctgggaggaactcaggctcagggataacgctggggggaactcaggctcagggataacgctggggaggactcaggctcagggataacgctggggaggactcaggctcagggataacgctgggaagaactcaggctcagggataacgctgggaggaactcaggctcagggataacgctgggagaactcaggctcagggataacgctgggagaactcaggctcagggataacgctgggaggaactcaggctcagggataacgctgggaggactcaggctcagggataacgctgggaggaactcaggctcagggataacgctgggaggaactcaggctcagggataacgctggggggaactcaggctcagggataacgctggggaggactcaggctcagggataacgctggggaggactcaggctcagggataacgctgggaagaactcaggctcagggataacgctgggaggaactcaggctcagcgataacgctggggagaactcaggctcagggataacgctgggaggaactcaggctcagggataacgctgggaggaactcaggctcagggataacgctgggaggaactcaggctcagggttaacgctgggaggactcaggctcagggataacgctgggaggaactcaggctcagggataacgctgggaggaactcaggctcagggataatgctgggaggactcaggctcagggataacgctggggagaactcaggctcagggataacgctggggaggactcaggctcagggataacgctgggaggaactcaggctcagggttaacgctggggagaactcaggctcagggataacgctggggaggaactcaggctcagggataacgctgggaggaactcaggctcagggataacgctggggggaactcaggctcagggataacgctggggaggactcaggctcagggataacgctgggaaggactcaggctcagggataacgctgggaggaactcaggctcagcgataacgctggggagaactcaggctcagggataacgctgggaggaactcaggctcagggataacgctggggagaactcaggctcagggataacgctgggaggaactcaggctcagggataacgctgggaggaactcaggctcagggttaacgctgggagggactcaggctcaggcaataacgctgggagggactcaggctcagggataacgctgggaggactcaggctcagggataacgctggggagaactcaggctcagggataacgctgggaggaactcaggctcagggttaacgctggggagaactcaggctcagggataacgctggggaggaactcgggctcagggataacgctgggaggaactcgggctcagggataacgctgggaggaactcgggctcagggataacgctgggaggaactcgggctcagggataatgctgggaggaactcgggctcagggataacgctgggaggaactcgggttcagggataatgctgggaggaactccggctcagggataacgctggggaggactcaggctcagggataacgctgggaggaactcaggctcagggataacgctgggaggaactcaggctcagggataacgctgggaggaactcaggctcagggataacgctgggaggaactcaggctcagggataacgctgggaggaactcaggctcagggataacgctggggaggactcaggctcagggataacgctgggaggaactcaggctcagggataacgctggggaggaactcaggctcagggataacgctgggaggaactcaggctcagggataacgctgggaggaactcaggctcagggataacgctgggaggaactcaggctcagggataacgctgggaggaactcaggctcagggataacgctgggaggaactcaggctcagggataacgctgggaggaactgcagcctcttcttccctttcttggtctcttcagaaggcttagggcttgggattcgaggttgctggtaggtgcgtgaagaggcggcatggcagccaggaactcctgagatggtgcctgctccactccctcctgactgctccggacctgggttgtgtggttcagggactcctcgagtttcagcctccgccccccagcagccggcccctgcatttctccccttcctggatcttgggtccctgctgcaaagagaaggacacgagctggaccctcccgtgtgccaggtgctgtgctaggagcccaggggctgccctgccacccaagtcctccagccatggggctgcccccgtttagtagatgaagacactgaggctcagggtggctcctgggcttgtcccagttgggaaggaggtaagtcggaagtaggtagactagtgccttggttgtgaccctgggtcccgtcatcgctggctcccgtcctctctggccctcctacattcacacctggctgggatcttgctcacctctgcatactgttaatcttccctgatgaaccacacctggctggcctggctcatcccacagctctcacgccctgtctgggatctccgtcttctggctagctagcagccctagagttgatgccgtaattacccccattctatagatgaggaaacggaggcacagggagactagatgacatgcccaggtcacacagttggcaagaggcagagctggggctcacatccagagtgcaggggagttttctttctgttttagtttatttgtttcactgtataaacagtgttgtgtaccggcttctcctcaacattagctttattttattttatgtaatttatttatttgagatggcgtctccctctgtcacccaggctggagtccagtggcgcaatctcggctcattgcagcctccgcctcctgggttcaagtgattctcctgcctcagcctcccaagtagctgggattacaggccaccacatccggctaattttgtatttttagtagagatggggtttcatcatgttggccaggctggtcttgaactcccaacctcaggtgatccgcccgcctcggcctcccaaagtgctgggattacaggcgtgagccacctcgcccagcctatgtattttatttttttgagacagagtctccttctgtcacccaggctggagtgcagtggtgtgatctcggctcactgcagcttccgcctcccggggttcaagtgattcttctgcctcagcctccctagtagcggggattacaggcacccgccagtacgcctggctaattttttgtatttttagtagagacggggtttcaccacgttggccaggctggtcttgatctcctgacctcaggtgatctgcccgcctcggcctcccaaagtgctgggattacaggcgtgagccactgcatctggccaacattagctttatgtagttgaactatgtatatgattttggagtgacctgtactagaacagagaggaggcagagggaggagcaaggtgatctggaaggtgacgaatccagtcccatctgtggctgcagttagtggctgcaactgccctggcacttgccctttggtgtcagttcccattggctgaagagctactgagcttcatacagtctggaggtggggcttgagtttctgccaggaaagctgggagagccagggagaagccaagaggcgggagaaagtgcttcaagccgaggacctgccgttgttaaaggcctggaagtgagaacgtgccaggccctttgagaggttactgtcaacagtgagatgggtgagtcatcagctggggccccacggctcttgtttgggctggcttggtggcttcctgctgggcatagagtgagcagtgttttagaaagagtcatctgatgtcagcaggagggatgcaggatgaatgtcctgtcacacctgtcctgaaatcctccagcaccttcccttcgcctatggggccccccttccctttgcacagctgtcaaggccttgtgtgacctgacccctggaccccctgcctacctctgtggcctcaggaccaactccgtgctagaattgtgaactctcacgagagagagattttgtcggttttgtaacaaaacttgctcattgcagtctctggtgccgagaactgtgcctggcacacagtaggtgctcagtaaatattagctgaatgaatgcatgaaccagccagactaaactcatgtcattgtgcctcacatagtctctctcctgtctgttccccagccccaccagcatctctaaccactgctttttttttttgagacggagtctctctctgtcacccaggctggagtgcagtggcgcgatctcggctcactgcaacctccgcctcctgggttcaagcgattctcctgcctcagcctcctgagtagctgggactacaggcgtccaccaccacgcctagctaatttttgtatttttagtagagacggggtttcaccgtgttagccaggatggtctcaaactcctgacctcaggtgatctgcctgcctcagcctcccaaagtgctgggattacaggtgtgagccactgcgcccggccataatttttttttttttttttgagacagagtcttgctctgtcgcccagactagagtgcagtggtgtgatctcagctcactgcaaccactgcctcccggattcaaggaattcttgtgcctcatcctccagagtagctgggattacaggcctgtgccacccctcctggttaatttttgtatttttagtagagacagggttttaccacgtagaccaggctggtcacgaactcctgaactcaagtgatctacctgcctcggcctcccaaagtgcgggattaaaggcgtgagccactgcgcccagcctaattttttttttttttttgagacagggtctttctctgtggcccagtctggaacacagtagcacaaacacagttcattgcagcctcaatatcctgacccaagcaatcctcctgcctcagcctcccaagaagccgggaccacaagagcatgccaccacactcagctaattattttttaaaatttttatagagatgaggtcttgccatgttgcccagctggtctcaaactcctgggcttgagtgatcctcctgcctcggcctcccgaactgttgggatttcaggcgtaagccactgcacccggcctatatgtatagtttattcgtggacacaaataaggaaaaatgtataactaactcttagaggctccctctgtcagagggaaccagaggagactttctctttctttattatgtgtgtctacagagttagaattgttagtgatgtaacaggaaaataaagaagttaaaatagaagtgccacgattgggaacgtagagtgggctctgagggcaccagcgggcacatctgacgcagccaacggggagtcacgggaggctccctggaggaggtgacgtttaaagtcgaatctaaaaataagcagtgggccaggtgccgtgtctcacacctgtaatcccagccctttgggaggccgaggcgggtggatcacctgaggtcaggggttcgagaccagcctggccaacatgatgaaaccccatctctactaaaaatacaaaaattagccgggcctggtggcgggttcctgtaatcccagctacttgggaggctgaggcgaaagaatgggttgaaccgaggaggcggaggttgcagtgagctgagatcatgccactgcactccagcctgggtgacagagcgagactccgtctcaaaaaaaaaaaaaaaaaaaaaaaaaatcgcaataggtgtttccatgttatcccttccagaaaagtggcacctcagctgcagagttctgacactgctcccctccccagtacggccttgcccctcccttgacactgccttgggagtcagtcaccaggtcaatctgtccctgagactgtcagctccgcgagggtaggcacggggttccctgtccatggctgcattccgatgctagcacactgcctggtgcacagcaggcggctaacaaatgcttgctgattgggtcaggcggttaacaactgcttgctgattgggtcaggcgttaacaaatgcttgctgattgggtcaggtggttaacaaatgcttgctgattgggtcaggcgttaacaaatgcttgctgattgggtcaggcgttaacaaatgcttgctgattgggtcagggaaggagggaatggagggtgggtgtgggggaagactgtggggagtcaaccattggagactgagatttagacttgatggtgtcagaaatctcagtggctgcgaaagatttcaaacagtagctaggtgtggtgtgtgcttatgcccctcaccctccatgatgctgttcagcccacttctccaagttcatcttctgtcctctagcaagcagcgcttcttaacctgccttccttcctctcttccttccttccttcctccctccctccctccctcaagacagagtctggctctgttgcccaggctggagtgcagtggtgcgatcatagctcattgcagcctccaactcttgagctcaaacgatcctcccacctcagcctcctgagtacctgagatttcaggtgcgccactgcaaccgggttgctgaagctgcttaaccctttcctttcgggccttctcttctttgcctggaaacccttccctatttccagatgctactcagaagccactgtcctgtgaagctttcactctcaggcagcgttagtgccactgtcctccatccccagggtggctggtaaacgagaacactgcctcgtgtgttcacacgtcctcaccccagacggatcgagagcctgagaacggcaagggccccgtctcccagcctcgtatgtgtgccatgccaggccttttctgggtatgaatgaatgaatgaacagacagatggacagacaagatcaggagccaaagtggggaagtacgtgtggtcgtgtgggtgtaagaggctctaaagcttggtggggtggtggctttggcaaaggaaaagaagaaccgaaggacttggtaaaagggatgtgggggttgagggaaggaagactcgtaagatggcggccgcactaacagaagtggaaacccggaaggggaagctgtttcagaaggaggaagggtcctttggtccagatgtgtggagtggaagggccgtggctgggcttccaagtgaggagacccagtggccggggcaggtgctagacctagagcccagcaagacaccagggctgcagctggcagcgggccaccactggcctggaagggagaagggctgcttctctgggggaagggagcagagggctgaggctgggcccaagcaagtgactccacatttacaggaggcgggagaatgaagggccagcctacaccagagagtggtcggggcagtgcctgcatcaacagggcagctgagggcttggagaaactctagactgcagaggccaaagagtcggagagggaggcctctggctttggaataaaccgtttgggggggcctttgaagcaggctgcttctatggagaacattaggagccaggccgaggcagatggagtgtggagctcaggtccagggctggctcagggcatttgtcagggaaggggagggaagctgtggggactggtgagtcacttcccctccaggggggcaccgagggcctgtgagtggagtctgtgtctgatggaggggcactctcattactcactggaatttccagccaccggggacagggtggagtagagaggccctggatactcagggagtcacttgtgtggggttcagggattttgggaagaagtgggcgtcagtctcaccatgccgtgtagaggtgtggggaacggggacgaggatatcctggcagacttccaagggcacctcatgtcctcttgagtggaggaaggaacacagcaggggcctgtggggttttaggcccttcttcgtgtcacctgcaggtctgactcatgtgggcagcccatgccatgcacttggagcccgccgggcgggagacagaagaacccgtggtaccaggccctgagctggcatacttgtgccctggggaatgccaggcctggtcgttcccaagccctcgccacagcctcacccgcccgcaccaaatgaggaattgtggctgaaagggcccttcagatgcgccctggctatttataacccacccaggcagggacaggggaaaaccaggggctggaaggagatgggtggggtgggggtgtgcctctgttgaaccctggtggcacagttccctgatcaaaggctgttagccctggggcccctcaagggctcaccccgcaatcccctgctctgtatttcagctctgcaacaggatggagcctctctccagggagggcagcttctctgctgccaatggaattgcatgagccccacctagagcccagagcttctgaagaattctggggggagtggggggctgtggcctgaactcgggccacaggtgtggttcatttagacggcaccatgttgttttaaaatgttaattatttgccatcgttttaaaatcaggagcattcctgttaataagccagattttagcttattttgaacagagatcaggcagccatgagcttgcgtttcctccagcagccatcggctggagtgagtggtggtttcaccctgccctacctggctcgcttcaccggctggcctcacccgcaggcctcacccgcaccctcatgggtgccgtttgcaacctttgctccatcgttgggttgtaaaagagcttttcccagggcctcctctggactcctcctcccatggaaggaggtgtatgtgcatctgggaactagggccagggggaccagaatgtggcctcactccctgcacagttgggggttctgcaaccattggagaagccaggggaagctggctgggagtgggcagggccggagatggtgcctgtcctgggttctgtgtgcactccccttgcaggatggctccctgcggtggggtggctgggggggctgcttggaggaggtgggggtgctggtctcagcagtgcctgtgagtaggtgggaggctgctcagaggaggtgggggtcctggtctctgcagcgcctgtgagtaggggggctggtctgtgagtgggggggctgctcagaggaggtgggggtgctggtgtcagtagcgtccgtgagtggggggactgctcggaggaggggggctgcttggaggagggggatcctggtccctgtgagtgggacgcccaccgctcctgtgcaggacagtggtggcgccgcgctcctgcctgggggcaggtcaggcctgtctgttgcaaagcctgactcctccagcggcggcgggacgcggctgtggcttctgggcgggccggggcctcccctccggaagggggctccggcgcatggggactccggggtggctctgggggtcgcccctgctcgccgggctcctggctcggccgcgcgcggggaatgaagatgcgtctgggaagcggcctccccgctccaccccaccccggcccggccgcggcctcctcgctcctcctccgccgcagaagcctccgccagccgcggccccgcaaccccagaggacgggcggctccacctcgcgacgcgcgtttcctgtgtgttcggagcgagcgcgagcccgagccccggagcccgggaagggcgggccctgcggggccgggcgggacacggaggagggcgctgggctgctgtgcggcgggttcgcctccgccacgggccgggcacggcgtcaggggctgcccgggccttgctccccctttcgccgggcgaggacgcgcgaggcggcggcggcggcggcggagcgggctggactaggtccgggatgcagtcccgggtcgggagccccaggccgggcgcgcgggtgtagacctgccccccctcccgcccgcctcctccctcctccctcctcccgccgccgctgcgtggaccccgcttcctgtctgccctccgcgggctccggctgccatggaggaggaagaggaggcgataggcttgctggacaaggttctggaggacgaagatgtgtttctcctggaggagtgcgagctgggaaccccgaccagccccggctcagggtcccccttcctggtggctgtgaaggtgggagcgtgacacgccctgggcgctggggggggccgggccggcgctgccgaaggtgcgcgggagaaatggctgatgcgggcgcagagcgcgcggccgggtggaagccctcggcggagggtcccggccccggcagctgttcccgggggagaggggcgggcctgcctccccgaccggtgtcctcggggcagtggtggccgccccctccaggccagcccagctcagggctccggcggctgtgccaggagtcacctggcgcgcctgtcagcccgagcctcgccgcctccctggagcgggtgggcaggaatcccccgtttccacggcaaccgcaagagaggggccaccctcttcccagccaggagacagggacttggtgtctccgagctgaggcaagagggtgtttgcaaagggcaagagccagaggtcactgagcttccttgaaggaaaagcactgggtcagctgaaggggggagggaacagctggcttggaggctgcagccaggtgggcaggtgcccttcccgaggcgggacaggcagggagcatctgctgggccctggcccacccgctctggggctgacggcgttctctgcagcagtgacccgtcctgtaggagaggttggctcccggtggaactggagggcagtggtggccagaatcccttgaggagcggggcggccccggaaccacgccggctctgtgagtctggcccggcacaccacagcggtcttcctttttctctcctggacacacctctcagagcttccacctcagccttttgctcagctgctctctggttctgtgtcgagaagggaggcccagtgaggatgcgtttcggggagtttgcagactgctaggcgaggctgcctaaccgagtgcccatcggcggggcctagaaggcatgtgcagccagcattgctggggacgggaggctgtccctgaacctctctgggcctccctgcccctcacagaagatggggatcacagtcctgccccacccactctacagtgtggctctgaggaggagccaatggaggtaaaaatagatgcagaaccacgggagatggctgatgtgtgagtatgggtggagcggtggctgcaggcctgggtggggagtggagctgtagggaggctggcagtggctggcaccccaccctgtcttctctgatctggtgctggcgtagggccgtgggggtaagtcacgtctccccgtgggctcagggaggcctctgcacttagggtctgaccagcctccccactaggaacagggtgggaaagtctgctcctgagccaggagtcaggctgggagtagcaatgctgggatgggaggtgtgtggccctcatgggcctcctctgggaagcccccagcacagatgtgggcccactcagaggctgcctcctggacctccccttctgctggaccccggcgtatgcctcagctaagcccgtatttcattctgctcagatgctcagaactctagacatttgcctccgcaattatatcccattctcctggaggaccaggaccatgtcatattcattgctgaacactgcacagtgcttggtgtggggctggtgcctgtgagagtctgcacaatgtgtgaggcccgctggggcccacgaagggtgcaccaggttcccagcctcgctccatctcagaggtgtcctgctgtgtacggcggtggcccacggatgccaagagagcctgagcacgtgtcacacctgaaaacgctgctcctcctgggtccccgtgagcaccgggatggtgtcttcccctctactttgctgccagcatgggggaaggagacctttctcgaatgccggggagttccaggctccctgctccatcctgaacacctctagaattcctccctcctctaccggcattggcctcagagggagaagacaagcaggtggccacagagcggtgggaagaaagctcctggattcattcaacaaacactctcaggttaggtgctcttcagagcaccctgcctggcactgtagagatgacaagaggaacaaggcgtgatcttccctcacaaggcgttcagagcaaggggcaggtacagggagtaggaatagagtacggaagtaggcagggtgggccagatgcggtggcacacgcctgtattcccagcactttgggaggctgaggtgggcggatcacctgaggtcaggagttcgagatcagcctgaccaatatagtgaaaccacatctctactaaaaatacaaaaattagccgggcgtagtggtgggcgtctgtaatcccagctactcaggaggctgaggcaggagaatcgcttgaacctgggaggcagaggttgcagcgagccaagatcatgccactgcattccagcctgggcgacagggtgagactcagtctcaaaaaaaaaaaaaaaaaaaagactgtgagaagagtactgataaaagggcaccaaattcaggggagaagggaccacttctagtggagttggggatggcctggatgcgtgcatgtgtgtgtgtgtgcaggccaagggtcatttctggatgatacactcctgtcctgggctgcagaggttcttggcacacccttccctggcagctagtaggaatccaaggcaattctctttgctattactttactttaggggtacttaccttaagcagcagttgcgttgtgagcatgtgcccaagtgccaggcccataaatcaatcctgtttccagtgtcatttccaagacgcttcatcttcctggggggcagaggtaaagttggctgcagttttctccaaagctatagctggagtttgctgcatatctcagcccagacttacctttgaagagttattgatctgtaaaactggtaatgcaaataaaatactgatagcagcgtcatgttgcatttgtaaaatggcttacacttgccaaaaatgtttcatgccattctatttaaagataggtagggttgtgacgggggcgttgtagaaggtgctattttaaggaacttatttgtcaggaataaaaacccttttgtaatgcagattaaccctttaggtatcattctgtgccatttttttttttcttttgagacagagtctcactctgtcacccaggctggagtgcgatggcacaatcatggctctctgtggcctccacctcccagactcaatcagtcctcccacctcagcctccccctcactacaggcacatgccaccacgttgggctaatttttatatttttgtagagacagggtttcaccatgttgcccatgctagtctgtaactcctgggctcaagcaatctgcccctcttggcctcccaaagtgctgggattacaggagtgagccactgagcccagcccaattctgtgccagtttttaatggatcatctgaaacatctctatttctgtttcacctgcccaggtctcttgtgcctgcacatcatgcctgtatcccccatttggatgtttttctaagtgcgggccccacgtggtgatttgagaaatgatcggtggcacctcgatctatattttgcattttaatggttaagtatatattttaatatatattagaaaaaatatgacctgtacatttttcttacgatttcaaatacgtgtagggtaagactgctttttacaagtcagttcttgggcgcagtggctcatgcctgtaatcccagcactttgggagactgggcgcggtggatcatgaggtcaggagttcaagaccagcctggccaacatggtgaaaccctgtctctactaaaaacacaaaaagtatctgggcgtggtggcgtgcacctgtaatcccaactactcaggaggctgaagcaggagaatcacttgaacccgggagatggaggttgcagtgagccaagatcctgccactgcactccagcctgggtgacacagtgagactctgtctcaaaaaaaaaaaaaaaaaaaaaaagttactgtaaagaacaatattgagtaaagaatagtgcaggtggtggtatgtgagtatggcaaaattttaagggtgggatatgaacaaccaaagtttcaaaacattgcctgtgccctatggtgcctgcctaagacctcagacagcaatagggagcccagaatacggggatccacccttcaggagagaggggccactggaatttggtctttgtcccccagcagttgacccgtcttctctgttctaaattctgccaaggaagcagctgaaagagacttcctcagcgcctagcgctgggagaggagagggtctctcgatgcctctacactgcctcagctgtcctgagactgagatgggccagttgtcctgaggttgatgcttggtgtgggtataagccccaggcacggccacccccacccccaggcccagtggcatctactctgagcagatcctgctgggtactcctggcagccagctgtggcccgtgaactgacttctaccgtctgtgaagcctcagaccctcgctgcatgccctatagccttgagtcgcagccagagagccagccctgcttgttgtcttggaggccagtgctactggagagattgtgtctttgcttggcctggaaccagatgtttggaggctttatttagcctctcaactctgtggaggaccaggcctgagctggccacgccttatctctagacattgttcctaccagagtgacctgacgtctttggtttggcggcttcaagctgccacactgtcagcctagcagattgtgcaggatgctgaggataaacgaacccaccaggactgcatttcacaagttctggctgggaggaagtgaggacaggcagcttcccggtgctggagacaggtaggcagcgtggcagaggctgtgggacctggaactctttagagaactcgctccggagcattctaggcacgtgggcacctctccttcaccttcgtattcccagtgcctggctcccggtgggaatgggtgagtgagtggtgagcctggtttttgatgagacaagagacgccctgcaaagactgaagaaacaatgtgaatttcctcatggctctaaactgggaattgtggagtctgaggaaagctggaaaagatgggagatggaacaggccttcctttggtggtgactgagcaacgggtctcctgttagccaagtgcaccgaggctaatttcccatccgtacgctctccaacgcctttgctccaatctcagccaaaactgcagcgtgaacggggcccagagcaggactcttggggctgactgttgcctcttgagggagggtcttcctgagttgtcttcccatcagaaccagcctttcaagagtggactatgaatggaagtcttgaggggaggatcttgcagaaatgggcgattacagggcttccagggtctatgctcgtgccaggggggatgaagcttgtttgtggctggggctgcaaatccctttcttccccccatcctagtccaaccagctctacagttacagctcacggtgtggcatttgctaaaccctcaggcaaaaccttggttggcagggaacaggagggagtgctagcccccagcacaggggatgagttcccatttgtcaaggctgggaagcagcaggaagacccctgagggtctgacctggaggggctggagctgggggctgttccaggctctgatcttgtcccccggggctacgtgtgctggaggctgtgcaggcctctggcagtcccgactctcggtgcctcaggaagatgataacacctgccaggttttgagactccggtgaattgaaccacaaagatagctaagctcagttcctggaatttgtgaagccgccaataagtaactattgcccttgcctgaagcgtggggtctgtcttgcttttctaatgctgctgaaacaaatcgccacaaacttaagggcttaaaaccacacaaatttattctcttatacagaaatctaaaaaggatctcggcccggctccatggctcacacctgtaatcccagcactttgggaggccgaggcgggcgcatcacctgaggtcaggagtttgagacgagcctggccaacatggtgaaaccccatctctactaaaaatacaaaaattagtgggtgtgatggtggacgcctgtaatcccaggtactcgggaggctgaggcaggagaatcgcttgaacctgggaggcagaggttgcagtgagctgagatcatgccattgcactccagccctgggcgacagagggagactttgtctcaataagtaaatacataaataaatagattaattaaaataaaaaggatctccagggctgcattgcttctggaagctctagggcaagcttttccagcctgcggccatacggcccaggactgctttgaatgtggcccgacacaaatttgtaaactcttaaaacattatatatttttcttttagttcatctgctgtcgttagtgttattgtattttatgtgtggcccaagacagtcgtcttcttccagtgtggctcaggggagccaaaagatcggaagcccctgctctaggggagtgagttcattttattgccatttccagcttccaaaggctctctgcattccttagctcgtggccccatcctctgtcttcaaacctaccagtgtagcatcttccaagcagtccctcaccactaccctgtctccccggccctctcactccccttctgtggccacgatgcctcagggaaagatggcattttaggcagcaggtaaagaacgaaccgaaagctagagacctttgaagatgaggaggctggttctcctgcgtgtgggggagactgagcgatgtcctggctgtgggaaagactggaagggtagggacgggcatccgggccactgcaggtggctcataaaggatatggtgggccccatgtcccagtctagggccgaatctttacttgttttttaaatgtctttccggcagggtgcggtggctcacacctgtaatcccagcactttgggaggccaaggcgggcggatcacgaggtcaggagatcgagaccatcctggctaacacggtgaaatcccggctctactaaaaatacaaaaagttagctgggcgtggtggcgggagcctgtagtcccagctactcgggaggctgaggcaggagaatggcgtgaacccgggaggcggagcttgcagtgagccgagatcgcgccactgcactctagcctgggcgacagagcgagactccgtctctaaaaaaaaaaaaaaaagaaaaaataaatgtctttcccactagagtctaagccacttgagaacaggggccactgtctgtttcccatggtatctatagggcctggtggacattcagtaaatatttattgaatgaataaataaatggacacatagcccagtggaatccccaagtactcgcgttttgcggtattcatactcggtccttggcaagcatcgggcaaggtggcactcttaggagttgaatccagctctggtgtgtgggacaggcaggaggagaggaagagagggaggaaaagtcggttcgagaacccaggtggaaaatagattgagggaagcaaaacgagatgttacaggaggaatatgggtgattgtcttttccttttatatttctgcatgttttgtatattttttataataatatctgacttttatcccctatgaaagtgtcgcttaaaataaaaggaaaggggaaaggggggccgggcgcggtggctcacgcctgtaatcccagcactttgggaggctgaggcggacggatcacctgaggtcaggagttctataccagcctggccaacatggtgaaaccccatctctactaaaaatacaaaaaaaattagtctggcataatggctgggcatggtggctcacacctgtaatcccagcactttgggaggctgaggtgggtggatcacctgaggtcaggagttctatatcagcctggccaacatggtgaaaccccatctctactaaaaatacaaaaattatctgggcatggtggcaggtgcctgtaatcccagctactcgggaggctgaggcaggggaatcactggaacccgggaggcggaggttgcagtgagccgagattgtgccactttacttcagcctaggtgacagagcgagacttcgtctcaaaaaaaaaataaaggtcgggggggaagggcagggaagcagaccgtccacgcagggttttggcctccttgctcatgagctgttggctgtgctttgcgtttgtgcaggtggaagcagggaaaggcctggagatgaggaagctggttctctcggggttcttggccagcgaagagatctacattaaccagctggaagccctgttgctggtgagtacagtccctgctctggggccttccggtccccccgcccgtgttgggtgatgtcatgctctgaagctgcttttggagttggagaggaaaggggaccgtacccgtccctccctgtggacagagtctgcagctggtctgcttctggctgggcatcgggcagcccgggtcattgccagaaagggcctgtgcctctcagctccagctctcaaaaggcaggagaagcacacccggcttagagatggcaaacacacctgtcacccacgaccctggcatagggcatcgtgaacccatcatggtgctctgcctgcctgggcgggggccgagcgccttctccacgctgtgctctgggcagtcattcccaatcaatccagttaagaagtctctgccgtcttgtgtccaagtccttctacctccctgggtgagggaaccgttagtgccatcctgaggccccgtgtcaggaaatatgaggtgggaggctgtgttctttttttttttttttttttttttaagacggagctttgctcttgtcacccaggctggagtgcagtggtgcgatctcggctcactgcaacctctgcctcccgggttcaagtgattctcctgcctcagcctcccgagtggctggaattgcacgtgcacgccaccagtcctggctaatttttgtatttagtagagacaggattttatcatgttggccaggctggtttccaactcctgacctcaggtgatctgcccgccttggcctcccaaagtgctgggattacaggcatgagccactgcgcccggcctgtctgtgttcttttgagaagcggcacagctctgaggcatcaggccaagctcagccctcggtaacatgcctcagttcccctcccagatggaggcatcgttgtgagagtctgattgggaggggaatatgaaaatgttttcggaagataaaagtactacacagatgtgaggtggttttgccttggaagaaagtgctccttagatgtgtctggatgttatgcagagtgatcgtggcgtgtcaatctttcttttgggtattttgcagcctgagacataaggtaattgtcagaaaagggagacgcagaagtgtggatctgtggaagctcattcttaacaagaattctaagatgcacatttaagtacttgccatgacgtgaggtgttgtcacacgtcaaccctgagatgctgtcagtgtcccaggggacttgacatttatgttacccaggaatgactgtgtaaatgtgcaggtgcaggccgggcgccgtggctcagtgcctgtaatcccagcactttgggagccccaggtgggcagatcacttgaggacaggagttcgagaccagcctggccaatgtggtgaaaccttgtctctgctagaaatgcaaaaaaaagccaggcgtggtggtgcatacctgtaatcccagttactcaggaggctgaggcatgagaattgcttgaatctgggggcgaaggtcgtagtgagctgagagtgcgccactgtactccagactggacgacggaagtgaaattcctcaaaaaaaaaggctgggtgcagtggctgacacctgtaatcccagcactttgggaggccgaggtgggtggatcacctgaggtcaggagttcgagaccagcctggccaacatggtgaagccccatctctactaaaaatacaaaaaattagctgggcgtggtggcgggcccctgtaatcccagctactcaggaggctgaggcaggagaatcgcttgaacccgggaggtggaggttgcagtgagccgagtttgcaccattgcactccagccggggcaacaagagtgaaactctgaatgtgcagctgttttgccacacgccaggctgagtacgtcccatctctccaggagtttatctgtgtgtacggagctgttttccaagtgaggggcagtgtggcaggtagctgagggtcctggtctggggccagagctagggcaagacttggccctgccattaagagcaggcgtattgcactgtttctcaaactgtgcctctcagcccatcagtgctttgggttgtgaaatcagtacagtgggttgtgaaaccagtacagtgggttgaaccagcatttttaaaccaatgaaaaaatgtcagcatgcatcatacacgggaaagataagtgagggaactttcggtttgttgtctgtctgtgtgcctgtatatatatgtaattgccgggcccatggtgtcttacacctgttgtgggtttgaaaactgctggctttggccgggcgccgtgtctcaagcctgtaatcccagcactttgggaggctgaggtgggcggatcacaaggtcaggagatccagaccatccttggccaacacggtgaaaccccgtctctactaaaaaagtacaaaaaaaattagccgggcgtggtggcgagcacctgtagtcccagccactcgggaggctgaggcaggagaatggcgtcaacctgggaggcggagcttgcagtgagcagagattgcgccactgcactccagcctgggcgacacagtgagactccatcacaaaaaaaaaaaaaaagaaaagaaaactgctggctttgggcaagccctacataaattccttgagcctccatttctggatctgaagatgagagggatgccattctttctctctctttccatggggttgagaagatcgggagatgctttcgggacctcatacagcgttgagttacttaagacactcaactgttagtggaagaaaggaggacaggcaaagagacaacccgtcagacattcgtgaaacacgtcttccaaaccgtgaattgctgtccaaaaaggaacatagttgtcattactaacagggtgtgtatttgaaaggagttcagacagaggatctagactgcctggccgtactggctccaggctttcagcaggtgaatgagctatcgtgcctcagtttttccatctgcaaactgggtatacaaatagtatgcttttcatggggtcgttgtgaggattaaaggaatttatacacagagttctttttttttttttttttttgagacggagtcttgctctgttgcccaggctggagtgcagtggcacaatctcggctcattataacctccgcctcctgggttcaagccattctcctgtgtcagcttcccaagtagctgagattacaggcacccaccaccacgcccagctaatttttgtatttttagtagagatgagatttcaccatgttggccaggctggtcttgaactcctgacctcaagtgatccgcccgcctcggcctcccaaagtgctgggattacagatgtgagccactgtgtccggcacataaagctcttagaacacagcctgagtgttcgttgacactgttaatttctctattgctgggagaggagacaggttagggcttcgtggtttctgccacaacacacccgttccctgaaggagggagtggcgcctgtccccatcagacacggagcccttagatcccacctgccacccacgagcctcttcctctgggccaagaccaagagcccctccctgctctgcctttctaacagctcatgccccaaaggcagaatctgtggggcaggggcccccttcctgatatgcctggcgcaggttccccccttccccagctgtctcctcccggggcaggttccccccttccccggctctctcctccccgggcaggttccccccttccccagctctctcccggggcaggtttccccccttccccagctgtctcctcctggggcaggttcccccattccccagctctctcctggggcaggtttccccccttccccagctctctcctcccggggcaggttcccccacttcccccagctctctccacccggggcaggttccccccttccccagctctctcctcccggggcaggttcccccccttccccagctctctcctcccggggcgggttccccaccttcccccagctctctcctcctgggcccctgcttggctctttcttgagcagagaccagagggagcaaaggaagaactcgctgggaggccaggtctgtggtaggagggctcaggaagaggagtaggaccctccacagccacagcctcagaagaaaacctcagagtgaaagaatcacacccttcctcctctcctccctgagctgggaacccctgcaccctccccacccctcagctaggaggaagctaaaccttctgctcttcggggtggcctcgcaaaggtgccagcttgaaggagaagaaattcgttccctccatgctcgctttcccactcctgaccccattcccaccgctctgccccagcctgtttgctttcatctgaacacttcctgatatgcaaagggctgggtgtgtgtacctaaaaccatgtgcacacacggggcagacgagcctccacacagaagcctccgtcctggcctctggggtgcttgtgggggtcatcttctggggccctcctgcttcctggtgggctctgattacaggaaaagcctgggagcctgggccgaagtagggggtgaaggaaaaaagatgaagccaactgcattgaaattctggatctccttgacactgggaactgagcttgggaactgtgtcttgctacgctggggccacagggtgaggccactccccagagcccctcccaccgctggccacgactggccctcctggggtggactcctggccacgctgcatcgcaggctctttatctataaaacaggtgaatgaggccttcctccctgggctccagtgacgagtgactcgggtggcatggcagcaagcatgccaggccttctggggcaggaggtggaggaagtgggtacatttctttcccttatttcgaaaggccggtcgctgggggacagagctgacaaacggctatgtgaagtcccactggcaagtgagaaccggcccaggcccgtcttcctgagaagcagctggtatgggagccagggttgaagtcactcacgggtcctctccgagaactcgagtggtgaaatggagagccggggcctgcccttgtccctgcagcaggactggggaggagggggtgcctgagtggtgtgctagcgctttggcagaatggctgtgccgtgccgaagctcagtgtgggtcaccttgcctttcagtccaccctcctgcccctgagcccatacgcaggacttcaccagagacaaataacggcctcgagggtcctggccagccaagggcacacacccagccctgtcccctccccgcgagtgaaatcaggagtaacagccaaggtccccatcgtgtcatgagaaccatctgatgccccaagcgcaggccccgtccttgtgactggctgtgggtgagcgtccatttcttccccttttgcagacggggtgggaagttgaggaggaagcataaccattgtgttttgtcttcgtgtgggtggcagatgagcgcgtcgcggcttctgagaaatcccgtctccttggccttcctgggactgctgaccttcctgcttcccttatttccccctcagtggggactgcgccaaggcggggacaagaattcttgggtatggggattctgtggcgactctgcgggctcctccgtggggtcctgcgttgaggtgaaaaggataaactcttacgacgatgtcaatcctgaagctagttccatgtccctcatggagggtggggagtccccaaagctttcagctcacccacctgggcttggggggacactcttcccttgctcctgcctcccggtgccttctgtttccctgtctggcatgcctctctacgcccccactcctccacctgctcagctctccaaggacctggtatgtgtgcctcctccatgcagccctccaggctactccagcacaaccttggaaccatgtggttggtgcttacagtcagtcgcatcgtccatagtcatttcatctgtgttggcccattttgcccaactggattataaaggtctcagccaggcatggtggctcaacacctgtcatcccagcacttcaagaggccgaggcacgtggatcacttgaagtcaggagtttgagaccagcctgaccaatatggtgaaaccccatatctacaaaaactacaaaaactagctgggcggggtggtggacacctgtaattccagctactcaggaggctgaggcaggagaatcgcttgaacctgggaggcggaggttgcagtgagccgagattgcactattgcactccagcctgggtgacagagtgagactctgtctcaaaaaaaaaaaaaaaaaattgcagtctgggaccatgatcgtgtacgcactgacgggaatgccagtaggtagcgcatggctgtattatcccagtttcacacatgaggctgctggtgacacgaagcccagggatgctgagtgatgtgcgcacagcagagctgcgactcaagcccaccctgcctggcctgcaccaggtggaaccccatgcgcttgcctagcaaggaccagacaccgaggggccgttggttctaggacggcgagggtcagaaggagaggcctgaccggacgcagaggggccgttggttctaggacggtgagggtcagaaggaggggcctgaccggacaccgaggggccattgattctagcacagcgagggtcagaaggagagtcctgactggacactgaggggccgttgtttctagcgcggcgagggtcagaaggagggtcctgctttgtcctgcatggattgttggatctgggctttttagagctcggaggatgaaggagccagaaggcagagcaccatctgggtgtctgagtagatgagacgacttcttccagtgaacatgggttctgtctccatcagagtgaggcgatatatctgagtagatgagacttcatcagaatgaggtgatgtgaggctggagtgaggctgggctgggagtttgccgtggttggctggagctggtggtcgtcgttcagagggagctggcgctggctttggtgttcccttcagtgcagcattttcagcagtggagtcacccattctctgctagaatgcttctcttgtcggaaagctcactacttaatcctatgggggacagctctagtgagcccgaatctgaccccataacttttccccactgttcctgggtctgcagagcaacgtagattaagtctaagcctcgtttttgtttttggagacagagtctggctctgtcacccaggctggagtgcagtggcgcaatcttggctcactgcaacctctgcctcctgagttcaagagattctcctgcctcagcctcctgagtagctgggattacaggtgtgcaccaccacgcccagctaatttttgtagttttagtagagacggggtttcaccatgttggtcagacttgtctcgaactcctggcctcaggtgatctacctgcctcggcctcccaaagtgctaggatgacaggtgtgagccaccgtgaccagccaagtctaagcctctttccacgtggccttcaggtaggtgaagaacatcaacagaatccgacatggctggccgggcgcggtggctcacgcccgtaatcccagcactttgggaggccgaggtgggtggatcacgaggtcaggagatcaagaccatcctggctaacacagtgaaaccccgtctctactaaaaatacaaaaaaaattagccaggcgtggtggcgggcgcctgtagtccctgttacttgggaggctgaggcaggagaatggcgtgaacccgggaggcggagccgagatcgcaccactgcactccagcctgggcgacagagcgagactccgtctccaaaaaaaaaagaattcgacgtggctgctctccctctggccaccctgcccttccctgccacaccttccctgtatggcaggttatcaggccctgtgtcctgcagggcctttgcagtacagcctggtcatctttggtttttttttttctgattattcatattcattcattgtaggtgatttataaaatgcagagaaccacactgaggaaatgcctgcacgtcccgttatcccacggtcccactgctaggctggaaggtgatggcatcagctcccggccagtgctgggggttggtctgtgttatctgccacctcaccgtctacactggcaggccctggagcatcttggtatagacaggcaggcattgagaaagagtctgagactggagacccctgccatgcgcagtgggaaggaccatcacggtcgcttagcaatgtctgccacgggggtgggctgcagtgggggacacgtgaacgcccatgcctctccctgtgccaagtgacgggaacttggaacatcagtgaggccaagactggtcttgagtaacttcgggtccctaccttctgagtcctagaaccacattctgtttcttggaaggaaacagctataggcttgagttccctgtcaaccctcccttccactgaagtgtgacaaggagcttatgactcggggcacaggctatcgtggaagaaagacgcggatcctgttaacccagtacaggctgctgctgagctcagctgcgtggtaggggagtgagcccaggcaccacccctcgggcctggcacagctgccaggccaggttcctgctgtcgagtgtgcggcttgttggggcctgtggcagtggctccttgatacaaagctcgtttcagtgccctgcctttggcagccttgtctgggcaggacttgggcagcgggaagggctaacgatcggccccggggcctgccgacactctggtttgtttacccccgacctctgctctttcttcctctgtttctcccagcccatgaaacccctgaaggccaccgccaccacctcccagcccgtgctcaccatccagcagatcgagaccatcttctacaagatccaggacatctatgagatccacaaggagttctatgacaacctgtgccccaaggtgcaacagtgggacagccaggtcaccatgggccacctcttccagaa

SEQ ID NO: 15347 - DNA, 37854 bp, Homo sapiens
aagaccaaggtcaacaaggacaacaatgagatcgtggacaagatcatgggcaaaggacagatccaggtgaggccagggcgccggggcgaggctgagggagcctccaggaggtggttccagttgaaaaggaattctggtcaaggagcctgctctttcgtgattttggttccaagctggttggaggaaagttcccaggaggtggttctcccctccctgctagaggtggctgcctgttgtggccccggaagcccaggcgtgtgcgtggctcctcaggtgggtcatctgcgcttctgcaagatggaaacaaccagctttgttttcacacgccagctttagtctatgggtggttgtttcccggaacgccatgttgagaaggactcagaggctgcgtcggtgaacgggagggaggaatgctgtgtgtgaggagccgtgtctgccattgacgggggaccggagttaggcacacggaccaggcgtttgctcttctgcccgaaagacttagggtcctgctggttggcttggggggaggggggtctctgacttgttgttagggtggccggaccttactcagctgcgttgggagtctgtggcttcgggtggggactctgggtgttagtagaggctgcacctcgggttaagggtatttatgcttctgggtgcggtggctcacgcctgtaatcccagcaccttgggaggccgaggtgggtggatcacgaggtcaggagttcgagaccagcctggccaacatggcgaaaccccatctctactaaaaatacaaaaattagcaggtcgtggtggcgggcgcctgtaatcccagctactcagtaggctgaggcaggagaatcgcttgaacccaggaggtagaggttgcagtgagctgagatcgcgcctgggtgatggagtcagaccgtgtctccaaaaaaataaaaataaataaaaacagcatttatgcctcaactgtgcttttggctccctataaacatatatagggaaaaggcctctgtgtgtgcagcctgtgtctctgaaacattctgccaattttgaagatggctgctattcaccaacctattaagagaagtaggcttgggagcgggaaaaggcgtgacgtggtggagccgctcacactcccgtctggtacctcgtgtggcctcgtgctgtgccgcaagtggtctggtttgggggtagattctgtgaccatgaaatgaagggagacggtaactgacccgtactgaggttgagcctcgggcgttgggcgtgctgagcttcttgacagtggccgcagacgtgatccaggcacagctgggcgccgagcttcttgaccgtggccccggacgtgatccaggcgcagctgggcgccgagcttcttgaccgtggccccggacgtgatccaggcgcagctgggcgccgagcttcttgaccgtggccccggaggtgatccaggcggcagctgggcgccgagcttcttgaccgtggccccggacgtgatccaggcgcagctgggcgccgagcttcttgaccgtggccccggacgtgatccaggcgcagctgggcgccgagcttcttgaccgtggcccaagaggtgatccaggcgcaggctgcgatggctccgtctacaacagggagctgaacgatgctttttagcaggaagcatttgttctctgatgcattgtcatggccaccgagtttggtatctggctcttacctgcaggtccttggtagcattgcccctggggagctgtgtgggtctcccactcgctgccccatctcaggctccagtgtttgaaccaggggccccacgtggaggggcctggcctctgccgcatacgccccgtgttcctaaacacgtctctttccgatgctgtggggtctgcaccctgcttctcagtactcgtcactagggagacagggctgccaggcaactgccagccagtccttcgtgatttaggaaatgggctctagagattcagtccctgggacctgctctctgtggggataaggggagggagccccatctccctgtccctgggctgggctagagggacaggcacggaagggttctgggctggcctgtgcagccccaggagacgcccaggcaagagacgagtggtcgccacgccacactccctgggccactggtggctgtggaatagaagagttacaaggatgtgccgggcagccagccccgtgggcacggtgggccccagcccctcgagaactcagctcccaaggcccgagggcacattcccccacctggacttcagccccattgcttccctccttctcactcagctgcacaagccccgggggaaacacaccatcagtcactgcaagcctcttggagacaggagcagatggaggcagtgggggagggaggaagccaggttatgtttggcaaagcagaaggcagagtctggtaaggaaaatgtttctgtgtttaagcttcgaggaatgttaaatgcctgggagttgatattaaaagaaacataaaccttcctgctgccagctgacctgggcctgtgagcggacagttcagagccagagtcccctgcaggcctttgaagtcccccagcactcagcatgccaaggcccggccctggccctccgctgcagaaccatctcaccagcctgcctttggtgggggaggcatgccccaggggcgggctgtggcttagaaagtctcgccccgtgactgccctcagagccaccgtggatggccaggctgggtgacgagtccacacggagctgttcccacgaacccgggccccacggagccacggaacggtctgtccccacagcttgtctctgccttcactccggccacacatctaaggaagggagctggcactagcctctggaatgcagtctttctgcccgccagcaggcgctgaggacatagtcggaggtggctttgagatagggcccagccctcggggatattcagggggcctgtaggaaaggcaggaggaggagggcagtctctgaggcccccacttctctctaagccccctcccagcagcccatccagagaaagcaaggggccctacggcctaagcgcaggcatttgctgctgtgatgaggcccccactctgggtcgcctgatggggcagtggggcaggagtctcagcggcggggtggggtgggggaagcatttagtgacagacagacggcagcatgcgtcaccaatgtgtgtccagcacttgtgctcctggaggccgcttcccaaatgccatctcctcgtgtgatccttgtcgtgatcctccagggagaatgacagtccctcctccccatcttacagatgaggacactggggtactgaggttaagtaccttggccaaggcatctctgcgtatggtatgtgggaaaggccatgttccctcctctgtgccatgtccccacgtctcaggcctttgtcaacgaatcccccagcccggacagagggccgtggcatggctaatggcctggagaagcagctgaggtgctgctttatggcataaggtgagcgtcctttgtcttggagtcctctgggcaggggacacttgtgcctggtgcccctgggaggaaggagaggagcacgtgcgggaaagagcaggaggccgaggtgggctgatcacgaggtcaggagttcgagaccagcctggccaacatggcaaaacccctttcctactaaaaatacaaaaattagccaggcgtggtggcacgcgcccataatcccagcactttgggaggccgaggcgggcggattacaaggtcgggagttcaagacccgcctggccaacatggcgaaaccctgtttctactaaaaatacaagaattagctgggtgtggggcccacgcctgtaatcccagcactttgggaggccgaggcgggcggattaggaggtcgggagtttgagactcgcctggccaacatggcgaaaccccgtctctactagaaatataaaaattagccaggggtggtcgtgcgtgcctgtaatcccagcacttcgggaggccagggcggggggatcacctgaggtcaggagttcgaaaccagcctggtcaacgtggtgaaaccctgtgtctactaaaaaaacaaaaattagccaggcgtgatggcgggcacctgtaatcccagctacttgggaggctgagggaggagaatcacttgaacctgggaggtggaggttgtagtgagctgagattgctccattgcactccagcctggacaagacagaatgagattctgtctggggaaaaaaaagaaaagaaaacagcaggaggggtacttagcatgcgtctgtgaggtccccagcccaggagggggtcctggcctccagggacccactgtcagattggaaagacgagtatattggtccatgttctccagtgagaagaatgctagatgtcagccacaatagccgtacacacataagcgagcccaggacgagcccagcacggtgctaaatgcttccatctgctgtctcaggagatcttcccaggaccctgtgggagaggaatatcatcacagctagaaagatgaggaagctggggctaaggagcccggacaaggccatgtgcccaggagtgggccagggcgggcagctggctgcagagcccatttctagatgtcctgctgcctcctgctataagaagacggaagattgtcctgctgtaagaagacggaagattgtcctgctgtaagaagacggaagattgtcctgctgtaagaagacggaagattgtcctgctgtaagaagacggaagattgtcctgctgtaagaagatggaagattgtcctgctataagaagatggaagattgtcccgcaggaattcagaggcagaaaggtcaccatgggctggaattagggaggcttcaaggaggaggtggaacgagagcgatttggaagccctgggttttttaattccaaaagcaatgtttgtatgagaaagaaaattgcagtagaagcaaagagacttgaaacctaatcagaaaccatccttcctccggctcctccgaagcagccagtttattctgtgccttttcccttcttgaggtatacacatttttatgtagatttaatcagggcctgttttgtctgtttttctgttttcatggattattataaacctccttttctctagagctgtatggagtcttcttaagcacctttttggatactttgttaaaagtactttatattctttgtagaaatcttggtatagagcggccagcgcaattgctatgctaaggctctgtgttattccagcaaggtgcgcaggctccgcttccgcagaagggagtagggtgggagttctggaggacagacccgcctggcagggaggcacgaatgtgaagggagggtcccaggaaagtcaggagcctcagcaggggtggcggggagctgcaagcaaggccagtagaaggaatgaataaaaggaggggattcctgggggtttggccggaagaggtattttttttttttttgagatggggtcttgctgtgctgcccaggctggagtgcaatggcgcaatcttggctcactgcaacctctgcctcccaggttcacgccattctcctgtcccagcctcccgagtagctgggattacaggcgcccaccaccatgcccagctgatttttattagtagtagtagagacagggtttcaccatgttgaccaggctggtctcaaactcctgagctcaggtgatctgtccacctcagcctcccaaagtgctgggattacaggcctgagccacggcacccggcctggaataaatcttagagggcgtttaatccaatcctgttttccggagagaaggaaatggacaccagcaagggtgagcgaggcagccgcggtcacagagcttgttagtgggtgaacaagggccccagactcagggaccccatccaggtccgcttagctgggagccccccctccaccggctcttgcccctgcccccggcgtagtctgccctggctcctggtcccaggggactccactgtgtttatcctactctatttccagccttgccgctccagctgcaacctacccgctagctgattagcatattcccagggtccggcccttcttggcgggctgggcctgaggagagcgctttcccttggggccccacagctcagtttctgccagcgtccccagactggagaagggcctgagaccaagaagctacttaaacctgaggggccctctgcaccccctgcccgccccccggccctgcgtcattccctcgctcaccgcaggctggggacagcccccaccccacagtccacctctgctccctgtgcctgggaggcagctccacttccccacgtgcctgccagggcagcccctccctgggcacagcagcgctgaagaccctgtggtgggaggggcaggttccaggccaggaagggagtgtgagccaccgcgtccggcctttattctttttaaagaaaaaatagtggtagaagccaggcatagtagctcacgtggtgtagctgtggactacttgggaggctaaggaggctagagtgagctaaggattgcgctactgtactccagcctgggtgacagagcaagagtctatctccactgaaaaaaataaaaaataaaagattgtagtgaaatatacataacataaagttaccattttaataaattttaggggccgggcgcggtggctcacgcctgtaatcccagcactttgggaggccgaggtagatggatcacctgaggtcaggagttcaagaccagcctggccaacatggtgagaccccatctctacaaagattaaaaaaaattagccgggcgtggtggtgcacgcctgtagtcccagctattcgggacactgaggctggagaattgcttgaacctgggaggcagaggttgcagtgagccaagatcatgccactgcactccagcctgggcaatagagtgagactccatctcaaaaaataataatttttgggtgcacagctccgtggccataggtggatttggtgctgtgcagccgttgccagtgtgcatatccagaacttgttggccctccccagccgaaaccccatccccattaaatcataactccccactcctgcacccttagcctccagtaaccacctgcctgctttctgtctgtacgaatttgtccagtctgggaaccttacgtaggtggaatcagacagcatttgtcctcctcatgtccttgagcttcacccatatgccgttgtgtgtctgaatttcctccctttctgaggctggatacaatttccctggatgtagatgccacgtctctttatctgcccgtccgtccgtggatgtaggtgccacgtctgtttatccgtctgtggatataggtgccacatctgtttatccatccatccgtccgtgaatgtaggtgccatgtctgtttatccatccatccatccgtggatgtaggtgccacgtctatttatccatccatctgtggatgtaggtgccacgtctgtttgtccttctgtctgtccgtggatgtaggtgccacgtctcttcgtccatccatccgtctgtggacgtaggtgccatgtctgtttacccatccatccgtccatggatgtaggtgccacatctgtttatccatccgtccgtggatgtaggtgccatatctgtttgtccacccacccgtggatgtagctgccacgtctgtttatccgcctgtccatctgtggatgtagctgccatgtctatttatccatccgtccgtggatgtaggtgccacgtctgtttatccatccgttcgtggatgtaggtgccacgtctgtttattcatccgtttgtggatgtagctgccacgtctgtttatccatccatccgcggatgtaggtgccacgtctgtttatccatccattcatggatgtaggtgccatgtctgtttatccgtccgtccgtggatgtaggtgccatgtctgtttatccgtctgtccgtccgtccatccgtgcacatttgggttgtttccacccaaaacgctcttgcctttcgttgagaaaaagaaccttgtccctgaggatggagacagcacagcctccttctctccagacccaagctctgtcccccacctgcctcccagctgtaatagatgagcaggacccgtgaccctagggcatgactggtcactattagtctcctgtagttgaagcacacagttgggccccctgcctcggccttctctccccctcccggccaagtgtccctgccccttgaccccttcacccttcttcctgggtcagctctttcctcccctggtcagtggtttaggtgcatcgaatgcagacgcagtcaccctgaggccgcgggaacaacctctggtcccttgacttcttggcatctcagtttcttcttttatttatttacttatttatatttatttgagatggagtctctctctgtcgcccaggctgagtgtaatggcgcagtcttggctcactgcaacctccgtctcccgggttcaagtgattctcctgtctcagtctcctggttagctgggattaaaggcgcccgccaccatgcccagctaattttcgtatttttagtagagacggggttttgccatgttggccaggctggtctcgaactcctgaccttgtgatccacccgcctcagcctcccaaagtgctgggatgacaggcgtgagccaccgcacccggccaagtttctttattgattcagtgggggtaactattcctaccccaccttcagcactggcttaaaggatctcacatacctggaagagccagtcggtgctgtgacgtgtgcgtccacgctttcacctgttcactcacttgtttctgtttacgatacatcctctgaatggcaggccctgggctgtgggtacaaagaatgaccaggacctcaccgtctggtaaagaaaacaagagaacttaggccaggcacggtggttcatgcctgtaatcccagcactttaggaggccgaggcgggcggatcatgaggtcaggagttcgagaccagcctggccaacatggtgaaacgccgtctctactaaaaatagaaaaatcagccgggcgtgatggtgcgctcctgtaatcccagctactcgggaggctgaggcaggagaatggtgtgaaccaggacccaggaggtggaggttgcggtgagccgagattgcgccattacactccagcctgggctacagagcgagactctgtctcaaaaaaaggaaaacgagaacttggatcgttagccagtgttgccggggttttgaggccagacagatcttgcggggctgagtctagctttctccatcgttagttgggagaacagagcgagtatctttgcctctgagcctcagcttcctgacctgtcagatgggctgtaagaggactgaatgtgagggtccatgaaaccctggacccggggcctggcatggagtcagtacgtggtttgccctaagctggcgggttcaggcaccctgtcccccacccccttccagtggttctgggtgtcacttgtccagcagccccctcctaaaggctgtcacctataagtggtcccctgggtcggggcctttggctggccgaggcagcattattttcttaagctgatggggtcagactggctttgctgaaccaacctcatagcaggggcggggaagtcaaggctggggccctcaatgccggctggcccgaggtttccctgccatgacccagcacggcagctctgagcttggcctggtgtggtcggaaacaaggggcctttgtcagcggctggggagcagcttctggtttcaattactctggagagcacgaggaagcttgcagagaacgtggggccggagcccgccagggcaggagtcaagggctcccctgccccacttccctccctctgacccccaaggggtgtcttgtccccattcgaccctgcctgagggtcctgcgcgtgcgtcctgggggccctgggttgtgagcccagagccccttccagctccggccccctctcgttcttcatagtggtactgggacccctcccaggaagatgatcgacggccggtaacgtgggtcctcagtgcttccccgttccaggcctcacgcgtgggccacactgaccacagccgggcccctggccctgagggaggccttgattcaactgggaaggaacacaggcctttccctttggttccatctctcccgtccccaacccctgccctggcactcacagcccccatagctccctgtcgtgggacaccggagtgacctctccctggaagatcagcccgcgtcggcgcccgccaaggccaggagtgcatgtcaggccccgcctcggctcctggcttaggagttccgcctccctgctgcttgccaccctcacagctggcccacgtggggctcttccctctgccgccacccccacccctgtgccagttccccaggcacatagggaccgtggaggctgagccccaggcctggttctacttcctgctgactctccacttcctcccagggccccgtgactgcagccattgtcctgctctggccctgcccaccccagctgtttcgggcacatttgttctccagcccagactcccacctgctgtccctcttcaaggcaggtctagacgcctggttctccttggagagtgggcagcagagactgtcctgggtgggggaagtcgggggagggtccctcgagagtgcctgccctgccgtcgaaagcttttccaaacgtggggcacgaacctctctcgtcagccctgctcagctgcctccatcgcccaggtgttcctgattttgggagcctggactctgcccagtggattctgggcaggaagcatccagcaggaagcagatggaggtgtgagtcggctccccccgctcccctccacccctgggaagtgccgcctcagcaggcaggcttggcgcccgctccccctgacccgcctctgaagggtgggcaccatgcagagaagccggtccagacaggacctcaggagccgatgcagtcaggccctgagaacatccagcctcccgacagaccaaaaaaaggtgttctcagctctgggtgccgggctcccagactcagaggcacgggacctgggtttgatcttagccggccaacctcgggtgacccttcagagagtgtcctctcgggtccgtggcattcagcgaactcgccgaggcgaaagccgcagacatagattcctccccgtgagccgctaacctccctgctggcggaggctgctgcttcctcctaggaatccaaaggatcagctccagggttgtcccactttccgtgttttctgaaagcttcaagagaaggatgccacagaagggttgccagagaatttcttgagttagggctgaggctgcagatgaatgctgagcgggggtcacctttagggtgggctctgctggcctccctcaagcctgcggccaccgcagactcacagcagcccctcgtggccagccccgcccttgccgtggcctgggggcgtggacattggtggtgctgggcgagggtctaagccccagtgtagcctgtagctttgggctggggcagggagggatgggcacaccgtgttcacgccctcggaggcaagtgctgagctgccctggcttcaggaaagaccctagcgcggctggagacgcaagatgacccagacacacccgcctgacccactagacaggtgctgtcccctctcgaggctgccagggcgaacccacagccactgagcaaaagccctgagtttcccaaaggagggagagaagcagagacacgactggagctgcaggttcagcgtctgacccagaggtgtccttacaaagcccctaatctctcagacccccacgtcccccaccccgagggagagcgaggccttcgggagaactgcctctaggagctgctgggaacctaaggtttgagctgtagatgcctgaaaggagggcggggcgctgaggtgtgcctcagattctgcctgtggggcgtgggaattccggggagggacgtgagccccaaggcaggcgaggggtggtggaaaagcaggtgtgagccagtgggccccacgtcccctcttcagccagggcgcctgctctctctgcttctgcttttatccgacgaggtgggcagggagacgtcggcataaaatttcatttggaaaaaacggcaggggtgcgtcctcagcagaaaagaaatctcaccggagaccatgtgtctgttccgagctcctgatttgacagctgtggaaactgaacccagagaaaaacacagccgttgagtccacaggtccctggctcccagggctttgcttctggccaccatgagctcggagcttgggtggaagggaggtgttcgggaatccagaatgaagaaagagcagggaggctcggcgaccccatcccaccttcaggcctcagcccctcctgcctcaggctgcaatttatggctgtgctgggagacccggccacaccccctccttcccgggaggaggagcaggcaagcagcccaggggggctccagcggtagggacagcatactgaggggccacgccctgcccactctgtccctgggtgagttttgttctagataagcaagatgttcccaaaggctcaagtgcatttttcacccttttccatgaccaaatgtgctgtgagaatcgctagggtttgccagggacgggctgtcgggacacttctcctgcagcagacaagctcttgggctgtttcagcctctcctccgtacctagaaccaccgagcaccctggcgacaccagcctgacgtggccagagagaggctggaggtcaggcagagggaggctggagctgtgtgagaagcagcacgtactcgggactgccctatgagccggcacaggcctttggggagttgggaggacagcaggttaccttgggcaggcctaggtctgggccgtagagcaactgatttcatcctgactgccttcttccttacactgtgcccatcttcaaccttgagcccaccctggacccctctcccagccccacctggatggatgggtgggtgggtggatggatggatggatggatggaaggatgggtgggtgggtggatggatgggtggatggatggatggatgggtggatggatggaaggaaggaaggatggaaggaaggaaggatggaaggaaggaaagaaagaaacaaacatagctcctagggtctaatctgccattggctgctgggtgactcctgtccccaggctgaatgcaggctctgaacattgcaaatacccagaggtatccgatgggtggggagaaaaacctagagtgagtctcagtgtctcattctgggaagacatttggccttccagtccgcaggttttggttagggtcggtacaggaaatggtcagaacacacagtaagaatgcagtgaccacagagccaccgagttgggggacactcccgtccccactcccccacagctgtccccggaacgtgccatcctcccgcccaactcgcacgccctgtgtgggcgctgggcaccccgggctcccatgctcggcctgcttgtctctctctcatcctggagcctgcacctgtctttgggcaggagccactggcaggctctctgcagcccccaaagcctcgggtccgccctgctctcctccagcaccttcttgccccccagcctcgggtccgccctgctctcctccagcaccttcttgtcccccagctctggtcctctgatgcccagccggtgccctgatcctctggtgctgagagagggagtgttcttggcagacctgagccacatcccctcggtccccatcctcagctgggtgccaggctcctcctgggctctggactctctgggcggcctcttggggctctccccgccccaactggctcccaggctatccccactggggcgcctgtggccttggtctagctggctgctcagaaaccccctctcctggagtcatttgcgctagcggataggacgaggaatcggggttcaagtgtgggctgggggagaggagcgtcgttctggtgggaaaaaggaggtcactccaggaaagcggcagctgcatttctaggttctgaggcagaaccttcctcctggtgctcacaggctggaggatttgcctggaagccgtccccacccccagctgtcaccgaggcagccccactgcagcctttgcccctcccgctcgcacagggcaggatgtgaccttttttcctcgttgatgccgccactgaacaccttaacccgattttacctcagtcacagctgtgctgggtggcatgaccccctccctaggtgtaatgcggggtcccacccacgtctccccggggacagcccctctcactccccttgcagagagcctggggaggggctgagggaggatgggatggtccactaggaatgtttttaattccaaaggcagtgacatctgttcgtgggggccttaccaccaggctctgtttatccagccgggggagtcttgcaggtcgtctgaggagggctctggcaggtgtgggggatggaaggggtggggggagcaggtgtgggggatggaaggggtggggggagcaggtgtgggggatggaaggggtggggggagcaggtgggggtagaaagggtggggggagcaggtgtgggggatggaaggggtggggggagcaggtgtgggggatggaaggggtgggggaacaggtgtgggggatggaaggggtggggggagcaggtgtaggggatggaaggggtgggggagcaggtgtgggggatggaaggggtgggggagcaggtgtagggggtggaaggggtgggggggagcaggtttaggggatggaaggagtgagggaggaaggagagtggccccttcccaggtggttgggatagcctgagctgaacccagcagagatgaggaggggtccgtggtgggctgcagcgactagaattcagacttctgcttttgctggggacatctgtcttgcacagatcttcttccacccaagaccattgactccaggaagcaatgagtcgggcttgggggagagaaggcaagtctgcgctgtccccagaggaagcccccagtccatagggaggaagggaaagatgagcgtctcaggggaagactcccaactcggctacccatctgcgaaggcacttatgtcaccatggagaccagctggccatcgttcatccagtccgagcttgctttacctagacaagtattgagcctgtggtacctaagacagatgagtgccgggccttgggaacgggattcacacggcccccttctcccccacacccggcggcagggaggggcgtgcattctcgcagtctgcaccctgtggcctgggacccagcccgagggaaggggaccataggccagtgaggggccgattctgaagttaagtcacggcaccaggagcactgtggcgcaaacgtggagagcagttataatggcatcctaccagccagttacatgacagccattgcacgtttgctggagggaggtagagtaaagctgggacccagtgagggtggatggcctttccctacagccccgagggccccacgctgacccctctcctccaggaagccttccccagttgcctccagctggaaattgtatctctcgatgttcgtggcattttgtctgtcctgttctgaggccgtaatatgggattttgtgcgggttttgtccatctgggcgtggtgcctagtaggtgcacaagtgacccgtgccaaatgcacaaatgcttgtctgcctcctgttgatggacatctctgctttcttggctgcccctttgtcaagcactgacttttgattcgtctctgtgatgccttaacccccaccccagggtcgggcacgcagccaggccctcagtcactacctctagagtgacatgagtggggccaggtgcagtggttcatgcctgtaaacccagcactgtgggaggctgaggtcaggagtttgagaccagcctggccagcatggtgaaacctcgtctctgcgaaaaatacaaaaattagccgggcgtggtggtgggtgtgtgtagtcccatctactcaaggggctgaggcaggagagttgcttgagctggggaggcggaggctgcagtgagccaagattgcaccactgcactccagcctgggcaacagagcaagacactgcctcaaaaaaaaaaaaaaaaaaatgacatgagtgggaccaagcagtggggcctgaggagtgagcagagccttcctggaggagatggctttgtggctgtgtgaaggggctgtctgggtcctcctggagccctggaaggggcaggcgaaggaggggtggagaagggtgactgaggcctcagttaggggacacaggcatgttcctacctccgtccgtctctccacctccccctcaggcggtgctggtgaggctgttgtggctcagcccccacttagcagctcaggtttgaggaagttccgtgtgcaccgtccaggggtgcgtgtgacgtgtgagccaggaagaagtggagctggtctggccgcccctgcagggacagtgaagactgaggcccggttctagcccaggcaggacgccccaaggcccccctccaccagccaggtggaagatagtccagggccagatcctgccacactagggcatcacagtgagtgacaggggtgtgggctttggagttagccagacctccgtttgtgttccagcttgtcctggccttggacacgtagctcagcttgtcagagcccttcgtttcctcagaggtaaagcggggatgctggtactgacttcatacagttgggaggggtaagtgacttaatccatgatgcctggtccctgccagccttccacgaaggacagctctgactacggctgtctctgcagggaagccacctattcctcaaaaacaccaaggcctctgaggagaaatcccgacacctgcctggctggtgacgccggatgccgagggctcgtctctgggccccgacccacctgccttggggtcaaccaagaaatgtcctgacccagctctttttcctgaatccaaagcatcatccatgtttgagtaaggcacagtgcttgtgagcaccaagggctttggagggacctccccatcctcacttggcactgtgtaaccctggcaagaactggacctcctgaccccctgtcctcacctctctagaacagggcagtaacaccaacatgacaagaatgtgaggctcacatgcagtcgggcgtttgaaagacctggttcgcggttgccacggtgcaaatactggtttcctttctgtgccgtgctggggtctgcagaggtccgaggccccagacacccctgggttttgcatagttaaacatttgggattcagcctttctcttttctctgaataccgtactctaacttgcactgttaccttgagacgtaatttgtgtcctagtctctgcggttagaaagttcactaaataaattgaaggtcaagaacaagttcttctctctctcaaggcgcccagcacggacacgggtggttgcccgtggcgtcctctgcgcccagcacggacgcgggtggttgcccgtggcgtcctctgcgcccagcacggacgcgggtggttgcccgtggcgtcctctgcccctggcagcggaaaccttttttggtgaggtgcaaagggccatggttcaaagtgacccctcaagaggcatctctggctggacgtgtgacccgcgtcgtttcgggcttttgctcctgtccctgagcagatcagtgacccgattcccactgggattcccacactaggggtctcctttatccttacatttctcacctgaggaggcttctgagtgccggtccacaagggtctggccgggtcaccaagctggctctgaggaaggtgcctggggcagaagttgggggtggggaagtgcgaccccagggcagtcagagtcttttgcccggggaggagggcagctgtttgtggccaaaatgcagcccccgcctggcccccggcccctccgcttggcccctggagcagcccggtgggcaacacggggacccagcagggagggactggggtgtggggctggtgtaaactttattgcgagggagggcggcggggtcggggaggagcagcgcccttgccagggatgaaacccggggttggggcttggaggggcggccctgggcctgggaggcggcgctcagcctgggctgcagcctcgcggagggcggggaaggagggatgcggaggagggaggagggaggagggacgcggacggagggagggagggaggggagcgcggggagggagggagggagggaggcgagcgcggggaaagccggcgggactagggaactagcgggactggcagccgggactgagcgctccacaggcgccttctctccagcgccgcgtcccgtcccccccggcatgaccgacgtcctgccccagcccgactgcagcccgaaggcggggcgcgaacccctggcgctggaggagtcggggagcaagcgcccccccaacaccggcgcccggctctggggccgcgtgcgcaacaagctgctccgaaacaaggtgcccgcgggggctggaggttccggggggtgggggctcgggggcgctgcggggctcggggggctgcgggggctgcgggggctgatggggtcccgctcccgccccctccgtggagtcccgggacagagctggggtctgtgcgcgtccctctaagtggcttgaacttgatggcgaacgctggggccgcccccacccggaccctggcgctcgggcatctgcccctgcctcgggagaagggaggtttcttctcggcaggtggaccctgctttccactccgggagtgcaaacagcgcacggggagacgcctgcctctgggtctatgtcttgccgccctgttcagcctctacctgatccctgcatccagcgggccttgctggctgcccctttgctgaggggcgccgaccgcagcaccgtctgccgtgtgaggtttctctgtgcaggattgtggggaggggagatgctgccgggtctgggggctcgaggcttcccttcagggaccacccatctgactgtgggcccagtgcccgccgggcaccaggcgttccgtccatgtgccagggcagaccgccggtgcccctgcagccccagacctgagttgggattaaaatctgagatagaagccgactgtcctgcagctgggcaggctgcctcggggctggcttggggccctggcatcaggcacgtgaggaagagccagacccagcgcccagcgcacaggaagtgctcgataactctgcagatcaaatcaactgtccgagttagctgtctcagagtgccagtccggctggccagggctgggcccatccatcaagagagcaacaagggaggccttggccagtccgtggtggggatctgcagctcctcctgaggctcacaggacctctctgcaggctcttactgccagccggcattgaggctcctggcatcagccaggacgaagtgatcttgggctcactggcccctcgttttgtttcagctcctgccatggggcatacttgacctcccagaggtgacatcagccctggaaagtgctgggcagggcagcaacttgagctgtactgcactggcccctgtgtcaccttcagcctccctggggactgggctagcagagccctgctggccccagctgctgccagagcccctctgtgctgaggcagctgtctgtgcccggcagcgtggactcatcccctccccagcccctgctgaggccagcaggcaccagcccagagctcaccatccatccccaaacgtcagggttggcaagaaactgacctggcaggttccgggtccagcgccagccaaacagggcgcttccagtttacctgcccctttgaggaggtgcctggtgggcagggggcaacttttaaacctgaggtcccagactttcagttctttccctatgcatttgtggccggcagaactgagaagccccttcaagaattccttagctgggtttgcctctggcagtgcctggtggctccgtgtctgatggggatctctgggcaggggtggtggccaggcagacgccgggctattgagctgctgagcagttggcgtcagtgcagctcagggtggccccggccctgggctgctctgtgtgacgagcgattccatcccctaacgtgtgctgtgtgccacagtgtgtccgtgtcgtggacgcaggggtcagcgctgtggcggacggagggacgtctgccacagtgtgtccgtgtcgtggacgcaggggtcagcgctgtggtggacggagggacgtctgccacagtgtgtccgtgtcgtggacacgggtcagcgctgtggtggacggagggacgtctgccctgtgcttcccacctcactgtgcgcaggccagcgggtgagcagcagagtcaaagggccaggcctcttgctttctatcctcagccacattaacctggcattttcctgcaggagcttcacagttgggccgaggggctgggactaggcagtttcgtttcggtggggtaagggaagggtgcctggtactgcccagactggcaggagggattgcctcattaactcctcgttaactttgccctgagtgatgctgtgggtgcgagaaacaccggtggccctcctgcttccactgacctgaaggttcattaaaggctggaggcggggcgtgactcatccagggctgggattaaacaatctgttcagatggaaaggtctcatgatcagaactgagcctttaaatagtgcagggcctctggtttctgggggagaggaggcagggacactcacggaggatcctttgggtaccagcgggggtccctgtggttgggctgttcttgtcaccggaggagagttcaggggccaaagcctcattccagcccctgacttggcagtcagctttttgtgcgagtgtttagctgggagacacgtggcatctgggtttgtgggttcagccagggctctcggtattgaacttcgcgtttctacttttctttccttttccctgtttgtttttttttttttttgcctcaaatcacactcaagtagaccaggcccggtgccttcctctccctcccatccttccctcttctagattcttggttgagctttggatgggaaggggctgaattctagattctcgcttgagctttggaggggaaggggctgaaggaggaacccccccaccctgcccccgcagcatccccttgtgggagccgtgaggaggctaagagggcctgaagggaggccggtccagaagcatttgtctgtcggggaagttgaggcccttatagagcaaccaagtccaagacgctcctgacccagaccaggccagatgctggccggcggtggggactcaggctgagccggcagggtgtaaggagattgagtgcagcttcaggtgaccttgtctctgccctgaagcacagccatgtgggtctgagaatcccctacttccaaagagctcctcttaagctggacaccggcactgctgacccccacggtgagtcccgtgttctgtgatgggagctgctgcctttgcttcagagaggatcagaggtgttacctgaggaagggcggggtggagagcccctcttgggccattcggggaagcttcaggctcatgatggtcttagaagaaggtccctttcttggatcacctgatgtcaggagtccaagaccagcctggccaacatggagaagccccgtctcaactaacaatgcaaaaattagccaagtgtggtggctcacgcctgtcatcccagcactttgggaggcagaggcgggtggatcacctgaggtcaggcgttcgagaccagcctggccaacatggtgaaaccccgtgtctactaaaaatacaaaaaaaaaaaaaatagccgggcatggtggcgggcacctgtaatcccagctgctagggaggctgaggcaggagcatcgcttgaacctgggaggtggaggttgcagtgagccgagatcatgccactgcactccagcctgggcaacagagcgagactcggtcttggggtggggggaggaaagggtccctttctttgtcagcttgatcgccaccgcaggacaaccccacccctcacagagcctgtcgtttattccttcttgatggtaccaggtgtgcagaccacgtgcacaccccagaggttcactctaccactcacttggccatcgagggtacacaggtgctgggtacaagatacagatatgtcttgggctcgtctactttattttataatccagtctgggcgtcaggaaagatctcgcagccttctgcaatagaagtctggcctggcccggctgcccaccgcccttccttgtttcccggtgggaagaaagcttcatcgtgcgtcttctctgttcacacacacccccatagcgacccctcagccacagacaggggactacagtgctgcctcccccgagagctggaggcccctacaccagcccacctcttcctgggcctatgtgtgggtcctgactgcggccaggctggctgacaggttggcagtggggtcgggcgaccctccctcttttccacagcacttacccacctgccgagtgggcagacctcactgctggggcctcatgagtactctctgatctctctgccaggccagctcccaagaggcttgcttgagtccgcagagcgggaaccctggactctgagaatctgatgaaggttctggaggccactcagacacagagccaccccatgcacacactgtgtgcgacttcagagggggctgcagacatcaaggcgggaaccctgctctgagtgaacttggcaaggtgccgcttcttggtacctagggagggtagaagggcgctggtcctccccggcctccctgcaggccacagacggcttggccagccagcggtgctgggcgcggtgccccagcttttggatggctctggaccagggagaggagaacctgccaatcaagggggttcctcaaaggccaaagctgcctgagcccagtgttgctgtagtacccagaggcaatgaggccccagacattttggaaggagcccccaagcctgcaggtgtggctgggggagctgccccaggcattttggaaggagcccccaagcctgcaggtgtgagtctgggggagctgccccaggcattttggaaggagcccccaagcctgcaggtgtgagtctgggggagctgccccaggcattttggaagcgcccccaagcctgcaggtgtgagtctgggggagctgccaggtgttggccacagggcgctggtgctggagaggcctggccctctgctgagtggcctcgctcactgcccaggtggttgggaactggtcagcaggtgctgttctttgacctcgtttcccctgtgaactcatgctggggcaggaagatgtttgtgtcctgacggccccccagcaccttcgaggaacagacagtcccctgcgcctgtgacctgcctgccccaccctggggagaaacgcagcgtcagtcctgggtccagtgagccgtagacccttggccctccaggatgggccctggagaggcgggaggggcccgtggagctggtcctgggcttctgtagagaggccaggaggccccaggatccccacagagacttccccagtcccgcttcaagacagcggaaccagctcctgagccgaaatctggagggatctcctttctggaccgtgaccccagccggggctggtaccgatgaccggcacagccagagccgtgacatccacagcgcccttcccatccgatgcctggatgccgtggctgtgctcggggaggcctccggggtccccagcccctcaggctcatgtggcacaaggtgccagagaagacagggcgccaggccggtgggagtcaaggtttcccatttttctcgtctcagtctgctacttaactgctgtgtgcccgcgagtacatccctttgcctctctggttctctggtatcagctcaatgaaggagctgaacaggatgatctcctggaatccagttcatgtgatgatcttggccatgtctcaagattcctagtcctaaaccttaaaccctgagcaccctgggagagtctgtcacagggctgcacctgggccaatgccagccattcagtggacacgggagcagggggtttagtgggaacacagggcttcttgagccctgtcctgaagcagccccggcggggagccattgtcacctccttcccccatgccccagttggttcctctggcctgtgagtattgccggagcaccttccacgtgccaggcctgcaggaactagggacacagaggcgcccgagacagacgagaccctgtctgcaggaggagtccgtcaacaaatgagatccttgccggtcagatgagtgctgtgaaaaaaataaacacaactgggtaacgcagtagagagtgacggggggatgcctggcttgagaggatcacttttgaacgaagatttaaatgacaagaagaattcagccataaaaaacctgggggcagtgcattccaggccaaagaaccggcaaggtccacaccccgaggcaggtgtgctcagaggcagagggggacagtgtggggcgttacgtggggtcaggggacggcggccaggcgacgtggggccctgcggttcaggacagggcctttaatccgaatgcagtgggaagccgcggggtgttcaagcacagttctgtgacgatatgttttgaacacgtactgtacgaggcatcattcttagcctgtgacgcaactgaggtgacacttacaaggtgctgttattcacactgtttatttatttatttgtttgggttcttttgtttttgtttgctgttgttgttttgagacagagtcttgctgtgtcgcccaggctggagtgcaatggcgcgatctcggctcgctgcagcctccgcctcccgggttcaagcgattctcctgcctcagcctcctgagtagctgggattacaggtgcccgccaccacgcccggccaagttttgtatttttttttttttttttttgagacggagtctcgctgtcgcccaggctggagtgcagtggcgcaatcttggctcactgcaggctccgccccctggggttcacgccattctcctgcctcagcctcccgagtagctgggactacaggcgcccgccacctcgcccagctaattttttgtatttttagtagagacggggtttcaccgtgttagccaggctggtcttgaactcctgacctcaggtgatccacccgcctcagcttcccaaagtgctgagattacaggcgtgagtcactgcgccaggcctaaatgtgttttgaattttgttttacatttttaattttttttttttttttttttgtgggagtctcactctctcgcccaggctggagtgcagtggcaccatctcggctcactgcagcctccatctcccaggctcaagcaatcctcccacctcagcctcccaagtagctgggtctacaggcatgtaccaacatgcctggctaatttttgtattttttgtaaagacgaggtttcgttatgttgcgcaggctgatgttgaacttctggcttcagtggatccacctgcctccgcctcccacagtgctggattacaggcgggagcccccgtgcctggcccagactgtttttatatatgaggaatgaggctcagagagtgactcagatgaagtcacgtgagtggcttagccgaggggcgacgttcagaccccggccactcagcctcagcgcaggctctcacccgcggtgtcctgccttccgtggccggttggggttgggctgcgtgccccagatgggagcgtctggagacgccgggctcctgcccgtcaggcatcagtgtggtgcccgtcctggcacgctgtgcatagcaacaggcaagacggttcttctcgacgacgccactgaacgtgagactcggagcaaggcaaggcctgggaggggccgctcagagctgacctgggccctggaattgctggagcccctcacgtccccggcagcaagctccatgcccagaaagtgttctgggcccgggcagggagggtgaagctggtatcagagaaggctgttgatgctgctttttttttttttttttttttttttgagatggagtctcgctctgtcgcccaggctggagtacaatggcacaatctcggctcaccgcaacctccgcctcctgggttcaagcggttctcctgcctcagccccctgagtagctgggtttacaggcatgtgccaccacgccggggtaatttttgtatttttagtagagacagggtttctccatgttggccaggctggtctcgaactcctgacctcaggtgatcctcccacctaggcctcccacagtgctgggattacaggtgtgaaccaccgcgcccagccctgttaatgtttcttaaccactccaggtccagctcgaggcttcagagcccatggaggtctgacaggtccttggccttcccgtggcctccagcgtgaagcttcctggtcaggaccacagaaggcctctcatcttggactttgacctctgagggcgcccctttcctttcaggacagggcctccgtgttgctttggccctggcctgttccttttctcaagagggccccactgcccctgcccttgccactctggcatcctcgacctgccctgggctggggcagggccggcttcctggctggtatttgtagcccagttctgagctgaagctgaagcctccaggctgcctgcacagggaggcagtggtggggtgggctggccctgaggaagacggagccctaggccgctgggggagatgtgcctggctgtggggcctccaagagcagcccaggtttggattttgtctgcttctcctcaaggtcagccatgcccagcccgggggctaaaagcaaagtgggtgccagggcaggcagaggctctggagtggacgtggggccggcagaggcgctggagtggacgtggggccggcagaggcgctggagtggacgtggggccggcagaggcgctgtagtggacgtggggccggcagaggctctgcagtggacgtggggccggcagaggcgctggagcggacgtggggcaggcagaggctctgcagtggacgtggggccggcagaggctctggagcggacgtggggcaggcagaggtgctagaatggacgctggggaaggcaggttgctgcgggtgctaagaggctagcctgccttggacaaaagcgtcgttcagagctgctaatccccttcctcccatgaggcttggggaacttcgaagttctctggtgttggaggggaagccagccgaggccctgggacacggcatcagcccgagcctatctgtggctggcctgggtatggcaggtgggcacaccttggctgcaggacaccttggctacaagggagcctggctgaccctgcagggtgagggctggagaggcggagcctgcctggcctagcagtgtggatgccaagccatgggaagatgtgtggagagtttatggagcctggcccggtgtccccaacccagctgctgagctggaagccaggggtaggtcctggcagcccctccctctctgccctgcctctctcggagtcgctcggagcagtcacgttgacggaatcctccggcgcctcctcgagggaggagaggcagggtcttggcaactcccgtctcccccgttgccagcttgccagccccgccgtgcctctcacgcctgtggtctgccccaatgacaggccggcttcggtgtcccaaggggacccagccctgagcgtggggctgcccttgggggagggcaggggaaagccagcccgggctgccaccgtggccgctggcctgggagccccaggaaacgtgcccaccctcagacccgatgcctggctcagggcctgggctccgcggcccctccagggcaggcgtgaaatgtgcccacacagctccaccttccacgtggttccctgtccgggggccacttgcactgaggtccttctggagtcattttctgtttttttttttttttttttgagacagagtcttgctctgttgcccaggctggagtgcagtggtgctatcttggctcactgcaacccctgcctcccgggttcaagtgatttccggctaattttgtatttttagtagagatggggtttcgtcaggttggccaggctggtctcgaactcctgagctcgagtgatccgcccgcctctgcctcccagagtgctgggattacaggcatgagccaccgcgcccggctgggagtcattttctagcgttcctgtcccacctctcaggaacagatttaccacctttgttgtgaagaagcattttttttttttttctgccgccaggctggagtgcagtggcacaatctcaactccggctcactgcaacctccgcctcccgggttcaagcgattctcctgcctcagcctccccagtagctgggattacaggcacccgccaccacgcctggctaatttttgtatttttagtagagacggggtttcgccacgttggtcaggttggtctcgatctcctgaccttgtgatccgcccgcctcggcctcccaaagtgctgggatgacaggcgtgagccaccgcacctggctgaagaagcacttttttttatgaacctctgcaaccccctctgagggaaaccctcccgcattctgggatgccggggctcagagggtggagggtagaagagcgccagccgtgagaggcaggatggggcggcccccgagggcagggctgtgcctggaggcagggctcctcggggggtcagctcctgggcggtgggagtgaccgagtgggctcctgagggaagcggctttcaggaaggaggcggaggcctgggagctcttggggccctggcaaatgtggtcttcagattcccgtcgtccagtgagcccctggatcacgtcctgagtggcgtccactgaaggctgcttgggacctctgctcccccctccactgagacccccagtggccagttctaagtcccacctgccttgggcagggccaccacaggccccttactgtggattaaagggccctgggtgagggcttgtgggaggggaggtggtggaaaccatctccgaagaccttggggcgagctgcgtgctggagtggagagtgtggcccagcaggcaggagcactgggttggaatgggggctctgccacctccgagggagcaggagtggagaccggagggagcgtgcccctgaatccgagcacggggagctggccgggagcagccctccgggcagaggcaggagaaatggggtcacctgccccagggggtgagaggtgagccgagaggaagggctgagaccctcaggggcatccccaggatgttcctgaaactcagccctggaggacgctcaggtgtgcgtggagcaccctctgccctggagcctcaaatcctctccccgctgcggggccactttgctgattcctgccccaaacatgaggtcacttcggtccagaaaggcgaggcgacctccaccagccacctacgggattcttggcagagaatccacgctcaccttcgggtcttcactcctgctccctcggaggtgacggagccccatttcaacccggtgcccctgcctgctgggttttcgccgcaggggacctggtcgtctcctggacatgagcccccagcgccagcgtttctctttgggagaggcctgaatgcgcagtcatgatttgaccaggcgaagtgcccagacaaagagaaaacagtcggccggatgcaggggctcacgcctggaatcccagcactttgggaggccgaggcgggtggatcacctgaggtcaggagttggagaccagcctggccaacacggtgaaaccccgtctctactaaaaatacaaaaattagccgggcgtggtggctcgtgcctgtagccccagctactcgggaggctgaggcaggagaatcgctcgaacccgaaggtggaggttgcagtgagctgagatcgcgccactgcactccagcctgggcgacagagtgcgactccgtctcaaaaaaaaaaaagaaggaaatagttgagctgctctcagtgaccatgtacggcccagtcgtcgacccctggcccagtcgttcgtccgccttttggctccacgatgttttgcagcctgtttctgtctcctgcctgtggcccaccttggggaggccccagtgctcgtgtgcccctggtggtcttcccagcctgacccttcacgagctccctctgtctccctgcttcaggtgatcagacatcccccaagtacctgctcccctgggcccatggaaggcacctgtctgctgggaccagagggtgagcagtcaggtgtcccatccaccaacgtcccaggggccagcccctccaccccggtgctaatctcatcaggaaatagcacagtccacatttcccaggagttataaatagccagcgcagttgcgggcagcagcgtttctctggaaaatgtacgctgtgcctctccctccctcctctgtgtttaaatgatatcctgaaatagacttggtttctggaggctgatagcctcctgggaaacagagcgtcgttgtcagggcaccgtggggccaggcaggcctctctgagcggataccagggccacacctgcagcaggcaccagggccacacctgcagcagataccagggccacacctgcagcaggcaccaggaagatgtcagggcttgaggggcttacagcttaggaaagtgcccctggcccaggcctggcctcagaaggggctggagtgtgtgagacagcagcaagtgtcgcctgggaggctgcagagggtagatcttagtggagcaggaaggcagagaggacccaaagtttcccactgtgacctggggctctccgagaaggctctctggaggaggcggggcgagaactgggccttagcatcaggaggtgcagtcctgggtcagatgtgcccaggttgaacctggcagctggagcggaagtgatgggcacgaggcagcgggagggctgtactgggggtggcctcccagcaccaggtctgcccaccgggtcgggacacacaccaggaggcccgatgttgcctttctgaggaagcagcagttacagcagctgcgggtcatggacttcacacattctgcagtttcagcagagagggtgctgggggccttgattttgaaccccagctctgacttcctaggtgtgcactgggtaaattcctcactctcgttaagctgcagcatcctcatctgtgagatgggagcggctatgagagcttaaaccgcatatgtctgctatcatgatcatgaacgcagatgctgtgtgtagaggattcatcagtgtcagacttgcaggaagagctcgagataagtccgttgctctcactcttccataacagccctgtgagtcaggtgtggatgcctccatgaggaaattgaagttcacggaggtgaaaggccttgcccgagtgcgcacggttgaatgggagactcagatcagcctgcctccaaatcctgcacactccccccgaccaggttgtgtccaggtccccctgagacttgggaagggaccattggctcagcttcctgcagaagctgccaggaggcacccagtcgtgggaagctggggcggaggaggggctgtgggtgaatcggaccaggggccatggaattggcctgaggcttatgctgatgtgtggagagacctgcctcaagaaggggtggtctcaaaacatcgaactgcgccccataaatacatacaactgcaatgtgtcaattaaaaaataagggcccgggccaggcgtggtggctcacgcccgtaatcccagcactttgggaggccgaggtgggcgaatcacgaggtcaggagatcaagaccatcctggctaacacggtgaaaccccgtctctactaaaaatacaaaaaattagccgggggtggtggcgggcgcctgtagtcccagctactcaggaggctgaggcaggagaatggcgtgaacccgggaggcggagcttgcagtgagccaggatcgcgccacagcactccagcctgggcgacagagcaagactccgtctcaaaaataaataaataaataaaaaataagggcccacacagtggtacatgcctgtaatgccagctcttcaggaggctgaggcaggaggatcactgaagcccagggcaacatagcagcctggacggcacagtgagaccctgtctctagaaaaataaatacaggccgagtgcggtggctcacgcctgtcatcccagcactttgggaggccaaggtgggcggaccacctgaggtctggagttcaagaccagcctgggcaacatggtgaaaccccatctctactaaaaataaaaaaattggccaggcatggtggctcacacttgtaatcccagcactttgggaggccaaggtgggtgggtcatttgaggtcaggagttcgagaccagcctggccaacatggtgaaaccctgtctctactaaaaatacaaaaattagccgggtgtgatggtgcgcacctgtagtcccagctaattgggaggctgaggcagaagaatcggttgaacctgggagacgggttgcagtcagccgagatcacaccactgcactccagcctgggcaacaagagtgaaactctgtctcaaaaaaaaaaaaaaaaaaaaaagagggcatggccgctccagaatgtttcttccaagggtagcatctcagttgacaaagagcatttgattcctccaccctgtgtggctactgctgggggacagagctggggacagacccaggcccggctccgtgtccagacgagatgaaggaactacgagggacagcctgtgtgatccaggagggtttgcaaagaacagaagcagcttagaggggagagaggtttcgggaaagtaaggccagagctggggcttcctttgagaccctgtaggacccctgcctccagccgggctggtgatggcctcacgcttcccgtgtgtgaagaggtgcccggagcagtggttctccctgaggggcacttggttctctgcacacacccaacttctgtctcctgttctgggttccatcccttctctgggcagggcgaacccagtgcagacccagaccccgtcggaggcttgggtaccacctgcccccagccggtgtgtgggtgatagatgtgggaaggacctacatcgagctgcaggaagcccaaggctgacccagatccagtttcccttccgtgatgacagtggcctgttatagcaactgcgttcaaaccgtggcacgcacacctcagagtgcacagagacgttctgagggcgacgtgggcaggagagttttcaggaaatcagtttgcagattctcagctgccataggtgctattgccagaaagccatctgcctgagagccagcatctcgccatcctgtcctctgcagaggagaggcctgaggctggctgtcggggcttggcccggggtgcgcagacctcctgggtggggaacagaggggcttttagaaatgttggggtaggggccaggcatggtgggtcacacctgtaatcccagcactttgggaggccgaggcaggtggatcgcctgaggtcaggagctcgagaccagcctggccaacatggtgaaaccccatctccactacaaataaaaaattagctgggcgtggtggcaggcacctgtaatcccagctactcgggaggctgaggcaggagaatcacttgaacccgggaggtggagcttgcagtgagccgagactgcaccactgcactccagcctgggcgacagagcgagactccgtctcaaaaaaaaaaaaaaaaagaaacgttggggtcagtgttcagaaagtaaaagactctagtggccacttagaacctttcaaaagtcaggtggtatccagttctttgccttccacaaaactgatggaggactcaattttcaactgagagatcatttcaagtaattttcagtaataggtatatatgcgatttaaggcggatagcatggagagaggttaaagaatggtgtaacgcggctgtgataaaactcttttcgacctcatctacttctttatgtgaacaaaatgtttcattgttcacatatttcttgttcattttagagacatggtcctacattgcccaggctggtctcgaactcctgggctcaagtggtcctgtggctgggagccacagcacctgcacatctttacaacaaaaccagaaacatgaaccaaattgatgctgagcctcgtttcactctagcaaaaaataataccctatagatacgcgaactaaagcaaaaaatgttccgcccatctcattgagagagcattccaccaaaaagttactctgctacttaatatttattaaaatgtataatgaggccaggcgcggtggctcacgcctgtaatcccagcactttgggagaccgaggcgggtggatcacctgaggtcgggagttcgagatcagcctgaccaacatggagaaaccccatctctactaaaaatacaaaaaattagccgggtgtggttgtgtgtgtctgtaattccagctactcgggaggctgaggcaggagaatcgcttgaacccaggaggcggaggttgctgtgagccaagatcgcaccattgcactccggcctggacaataagagcgaaactctgtctcaaaaaaataaataaaatgtatataatgtgtcggcttactttttttttttttttcttgagacagggtctcactctgtcgccaggctggagtgcagtggtgtgatcttggctcaatgcaacctccacctcctgggttcaagcgattcttccatctcagcctcccaagtagtagcttggactacagtgcccgccaccacacccggctcacttttgtatttttagtagagacagggttttgtcatgttggccaggctggtctcgaattcctgacctcaggtgatccaccagcctcagcctcccaaagtgctgggattacaggcgtgagccaccgtgcctggctgtctttttaattatgtactgccaatcatggtactaactaatcctgaatatattttgaatatttggagccttgtggtctctggaaatttttgttttcaatgtatacagattttttttgtggaagcaaaatgtaatggtgaataaaggacttgaaaatataaaaatataaactaggacaacattctttaggagaaatggaatagaaacaaattcaaggagagaagatccaggagctctgtgagggaaagaagagcttgtttgtgtagttttttgttgttgttgttttttttgagacggagtctcactctgtcgcccaggctggagtgcagtggtgtgatctccgctcactgcaacctccacctactgggttcatgccattctcctgcctcagcctccccagcagctgggactacaggcgcccaccaccgcgcccggctaattttttgtatttttttttttttagtagagacggggtttcaccgtgttagccaggatggtctcgatctcctgacctcgtgatccgcctccctcggcctcccaaagtgctgggattacaggcatgagccaccgtgcctggcctgttttcttaatattgaattttgagagttttatataataagccctgaaattgggtaatattagccctatagctgtgttctttttcaacattgtttagatgttttttctttttttttgagacggagtctcgctctgtcgcccaggctggagtgcagtggcgcgatctcggctcactgcaagctctgcctcccgggttcacgctattctcctgcctcagcctcccaagtagctgggactacaggcgcccgccaccacgcccggctaattttttgtatttttagtagagacggggtttcaccgtgttagccaggatggtctcgatctcctgagctcgtgatctgcctgccttggcctctcaaagtgctgggattacaggcgtgagccgccacgcctggcctcgtgtagtttttaaatggatgagtgtgggtatcacgtcgctggggtatttagatcccactgaatccatgagaaggaatgatgtcacacttttattttaggatggcaatattgacatgattttggaaatcatactctttgcaactatttaaacttggaaatgttcagattttgacttcagaaagtgccagggagcgcacagttgctcagaattagttcgcaggtgcacaggcagacgggcgcgaaggcccccgagttacagaaacagaacgtggaacagtcctgtgtgagggttgcctctgacctcccctggggtccgcacctccctgggctccagcccgagcctggggacttcccctgtggaggatttgcttatttgggagccaatggcttgacccaagttttctccctgaatcttcccagcaatcccagggaggcaggttctgttgcagatggaataactgaggcttagtgagtttaaaacttgccaggattcaaacccaggcagcctcctgtgcgcgggctcctgactcttcaacacctccacgtggatgggctggttccctcctgatggacttgagcgcctcctaatcaggtgcttaccttttgtgagcctcagtttctgcatctgtgaaatggggtaataatacccatgtcccgggctggcagccaggagtgcctaacagggtgtgccctgcctcccccacggtgggtaacagagtgtgccctgcctcccccacggcgggtaacagggtgtgccctgcctcccccacggcgggtaacagggtgtgccctgcctcccccacggcggccacaggggcctgggggctagggtccccccaaagggttgatttccaggtaaacatcagcttatcccagctgctcacttccgccttcctgactgtgtagctggctctgagcagtgctgacccacggggagatctctggcttggcctccgagctggcacctctctcacccacattctctctctgcagctggacccacaaaccgtggagaccaagaactggcacacggacgtgattgagatgaacggggtgagccggggatgggaatgatcagtggcgtgagccgggaggtggaacgtctgtgcagcaggtgggcagcccggccctgtggctgctcctggggccgctgtgccgcctcgacctccccgcagcccagccccctctcccctcctgcccacaccctgcccgctgctgtcctgcaggtgttgtgttgagggagacctgggtgtgagctagccctcatttgcagtcttggggaggggacccctgtgttttgggggcattcctcgggcactcacaccctggggaatctttacctgcctcaccccccaaccagatcaaagtggaattttccatgaaattcaccagccgagatatgagcctgaagaggaccccgtccaaaaagcagaccggcgtcttcggtgtgaagatcagcgtggtgacgaagtaggtgctgcctcgggtctcccagtcctggcgtcggtgccccgggtcccccccagcccgggccccccagccctccccgccggtgcccatcctggcacctaatcagttaccccccgctcggcggtggcagatggccggtgtggatctagagtggccgcagaggcgctcacaggacacttcagaagcacgcgagccagcacctaaacgctggaaggtctcttgtgagatcccagatcgtctgctcctcgtaacaagcgggaagctctgtcagccgggggcctacgtttgggctcggcaccaacggggactggcggcccctcgggaaagggcacgtgtcccccggttcaccaccaccctggccccttgtctcaggcctgacccacctcctcatgtgggctgcctgctgggcctcctacaagcatctga

SEQ ID NO: 15348 - DNA, 87986 bp, Homo sapiens
ctcctttgttgcgcgatgagggtcgggtttcggatctgaccgagccgccgccgcgggatggagccgctcagccaccggggcctgccgcgcctgtcctggatcgacaccctctacagcagtacgtgtgccgggcgggggcgggaccccaggatcgggatcgggaccccaggatggagatcgggaccccaggatcgggatcgggaccccaagatcgggatcgggacccaggcaccgggctggtccggggagcgcgggcgggggcgagatcggggtccggatcggggtcgggttgggaatcgggatcggggtcgggacccaggagccgggctggtctggggggcgcgggcggggggtccccagagaggattcctgcggtccgggggcggggaccgtgggcggaccgagccgagagctgcgtcccccctcccacctgttgtgaacccggcctccgcgagcctcaggggagggaggcccttctgggtgctgcccccgcccctggaccggcagcttctctgtccaggctgaagccgaaaggccgttttgggagcagtcgttggcacccgagtttgccaccccaggggcaccgggtcatgtgtggttcagggcccaggggttcggtgctggggtgggatcgggtgggaggggagacggggggtgcagatatccgcgggggccgtttggatgcgggagctgaaaatcccgggctcagcaatctttcctgccagcctcatcaccacccccaccctcatcatcaccaccaccctcagaagaaaaaaaaaacaaaccttctcgagttctccaccccctcgctcccaaatctctctggatcatgtgattgctcttgcatggccccgggggatgcgtaactgatcacgggtaatggtgtgggggggcttggggcgaaccgagagccgccccccgcccccaccaccgcaccttgctcctgctccgttgctagaaaggcaccgccccttctccccacccttccctgagacacctttcccgaaagctctcagggattaggaagagggtcctcctgggcttacatagtggatttcgcccttcctggcccacgtgagtgggaccctcccactctctcagcacatctcccaggcaggagttgggggaggcacgtggggccacgtggagcctggttcagcctgattctaggcactggatgccatggaacaggagcgttttctttctttttttttttttttgagacggagtctcggctctgtcgcccaggctggagtgcagtggcgcaatctccgctcattgcaacctctgcctcccgggttcaagtgattctcccgcctcagcctcctgagtagctgggattacaggtacccaccaccactctcggctaattttttgtatttttagtagagatggggtttcaccatgaggccaggctggtctcaaactcctgacctcaggtgatccacctgcctcagcctcccaaagtgctgggattacaggcgtgagccaacaagggcatttgtaagggtcatcccagctagagttccttgataagtcatatggggggggtggggggagtagagaagggtgatgccttgagccccaaagccttactctggaggctgtgtggtacccaacattcaacctctgacctcagcatccccttgggtccaggtcattccctgtatcttcttctccacccgcctcctcctccatccatgttccttcctctcctccccccaggagctgtccttgtgatggttcattctgctttggtttctcaacatcaaaggggcaaagccggatcccctgggcataggtcctgtgccaggtgccgccgctccatctgctccttcccctgcagaggccagcgtcgttgggtgaaggtcagggcccatggctgtgtggcatgtgcgtgcacgtgcgtctgcatgaatgggggcacacatctgttcggagcgcagatgcagatcagctcctgacccggaggcaggattagtggccctctcttagctgtgtgcttgcaaacagccgtcataacaatgcctcagattcacgcgtgcttatgttcctgagtgtttctggctctttgcaaaacccagttcttgtttccctatttcccgaagcctggaatcgtatggaaccctgtctctagctttctctgcagcagaagactcctctgagctgatcatttccaagtcttccataccccaccctcttcctcccacgcctggagcaaaaaagcaaaattgcctgaggccaccttgaaaattcctgaccagaggaatgccagaaaagggaattaggccaaggcctcttagggggttctgttgggcagccctgattcaggcagattggcacctgagctgtctaccctcctgctgctgccctggcctctgggcggctcctggggtggcctggatggtgggtgggagggggcactgatgtggccgcagtgtgaggagtccctgcctccctcttcggaacagcttagtggagagctgtagcaggaggcttcccggggaggtgctgtgcagtcatgtttgggctgttagccatcaactttcctcttgacaagagcctaaattaaaacaaatacccgagctgtcatttgcctggcagcaaggttttgtggctcccagaggaagttcctctgcttctcaggaagctgtttgcttacaaggctcacagtcctggggtgacaaatctccacaaatgccagatccatcgggaactgtaaagggggtatacccagggcacagggtggcagtgtgacttagagatgggaatgactcggtgttagaggttccctgccttcctctctctgagcattgttcctggtaacaatgataatagcgtctcctgagcacctactgtatggcaggcactgggatagtcactttctctttctttcttttttcttttttttttttgttttttgttttttgttttgttttgagacggggtctccgtctttgcccaggctggagtgcagtggtgcgatcttggctcactgcaacctccacctcctggattcaagcagttcccctgcctcagcctcctgagtagctgggattatgggcgcctgccaccacaacccagctaagttttgtatttttagtagagatggggtttcaccatattggtcaggctggtctcgaactcctgacctcaggtgatcttcccaccttggcctcccaaagtgctgggattactggcgtgagccactgcgcccggcctgtgctaggcactttctatccattctctccaaatctcacaactctgcaactcttacagagtaggaaagtgaggctcagttagcataaatcatagacctaagatcacataagtaacaaatggctgagctggaattcaggttgtaccctagaataatgaggaggatcccgagtaccacctgggtatgtctgagtttattcaaggtcttgggatgtcacggaatgggggacgccattctctatggtcctctgttgcagagttctccctgaaacggtccagcagggtaaatggcttcaatggctctgaccccaacctggccctgtgcctcttgcaggacctgggggctgggcctggagcccaggcagggacagctgaggctgtctgaacccactgaggctggtggctctctgctcctaaggtgccagcctgccagccagcccctcccctcacacacttcttttttttttttgacacggagtctcgctctttcacccaggctggagctggagtgcagtggcactatctcagctcgctgcaagctccacctcccaggttcacgccattctcctgcctcagcctcccgagtagctgggactgcaggcgcccgccaccacgcccggctaattttttgtgtttttagtagagacggggtttcaccgtgttggccaggatggtctcgatctcctgacctcgtgatccacccgcctcggcctcccaaagtgctgggattacaggcgtgagccaccgcgcccggccctgaacacacttcctgcctttggggttggcagttcattctttctggttttgacaggaggagtgtgcccacttccatcacaggtttggtggtcatttgatgagggttgggcagcaaaccctccatctctcctatggtagaagtcctgaagggctgcggtaagtgtgatttgtctgcctcaaggagaagagttggatcccagctgccaggggccctggggctgatgggagcagagtcctttccctgtggagtgacagatggtttcagacatcccccagttcttgtgtctgcgccactcatttgcctgtattaatgtagcaatgtcagtttcacccctcagtaccttacctttctctccctggggttgctatgatgctctctctgaggctctcttttttttgagacagagtctcgctctctcgcccaggctggagtgcggcggtgcgatctcggctcactgcaacctccgcctccccggttcaagcgattctcctgcctcagcctcctgagtagctgggattacaggtgcccgccaccacacccggctaatttttatatttttagtagagacggggtttcaccatgttggccaggctggcctccaactcctgacctcaggtgatccacccgcctcggcttcccaaagtgctgggatgacaggcgtgagcccctgcgcccggccatgttttcttggtcataatgcctctaggtctttaatcaccctttctgctaaacacgtatcatcttctctttgttatttttttattttatttttttatttttattttcccaatcccatgggattagattggattaaatgggagcggagtagcccaaaatgggggtggaggtgtgctctgacactttcttggtccctgggattctccaagcagatctggatcaagacatacgtgtgccccaggcaggttgatcatctggcacctcttcaactggaaaatctttatatgtgtgtttaggacttacttagaggagaggcagaggctgtatttaaagcctctccctttgccacttcggcctccatttggtcccaagtaatttagtcctggtgtcaaacataccttccctgctgagccaagcaagagcctgcagtggcttggccgtcatggaaggcagaacgtgaccatctgttgttactagagcctgctttttggagctcacttctcttaccccaagcaacatttccaagggcgatttcattctcttgtgatattttcatgccctttatagattcagtgccccatctatgggccaggaaagtatttggagcagtggagatgtaagcctgtctccaggtgagcatgagcctacctcagtttctcatctgagccccacattctctacaccagggaccaagccactggtctgacagcctgtgtgcgtttgatcagagcagttcagttctcggggccgcatcagacccctccgtgtgtgctagtgagcgcctgctggcagatgcttgcttgttttcggaatagcccagtaatttattcctttttgtcaacaccggcccataatcttcatggctgctggagtctcagaggtggggctggcagaagaattaagtcatctactcagagaaacttaggtttctgtggttgtgattgttggctactgttgttcttcgggaaaaggaaggaaatttgtggggaattggctggaagatgctgttaggaggatggaagatggggaatggcggggaggctctgcctcactcttgcgagtaggatggaagacttgttctctgtctgaggtatgatctgctttctgggacaattccggtaccttccttcgtagagggagggcatgatggctctcgtgggtgttgtgtggattaattcatatttataaagtgctttgaaggtgaggagagctattgagcagctcagctgtccagctcattgcgctcctcatccgggaaagcctcgagggactgggagaggccggcacaggacttaggaaggggcagggaatgtggcaggaggaccggcaggaacagggtatcagaccagctctgaggcagcgcctcccacagcggctcccgcacaggccctccataggtgttggttgtctgagtacgggtgggaaaaagaaaactcgagttcttggctccttgagctcctccccgcagcagaaacccctgttagctgaaacctgtcagctggcccgtccatgcgtttccggctgtgtggatttggtcattgtactcgctcgtagtggagtcagagacccccaaagggagtctcgcgcttttgccagggtttatgattggaggacttcactgccagcgttggcggcagctgtttggctgagcttgagccctttgggcgcaaacctagggcaggcggcttcaagacaaccctgcgcccactgcccctgccaggcccttggtggtggcgggtgttggtgatgtgtggggggtgggctgaggtgatgtgttgagtggactgaggtgatgtgttgggtgggctgaggtgatggggggggtggactgaggtgatgtgttgggtgggctgaggtgatgtgttgggtgggctgaggtgatgtgttgggtgggctgaggtgatgtgttgagtggactgaggtgatgtgttgcgttgactgaggtgatgtgttgggtggactgaggtgatgtgtggggggtggactgaggtgatgtgtggggggtggactgaggtgatgtgttgggtgggctgagatgatggggggggtggactgaggtgatgtgttgggtggactgaggtgatgtgttgggtgggctgaggtgatgtgttgggtggactgaggtgatgtgttgggtggactgaggtgatgtgttgggtgggctgaggtgatggggggggtggattacctgctctgttctatattcttggcacttttctccaagtgactgtttgtaccagggggagagttctgcagctcacccatctctggggctgtgataggggaggctgtttgtgacatgtgaccttggcttgtccccacatgtgagaaagtccattgctgctgtggggagtagcttgcttttcttttcttttttttttgagatggagtcttgctctgtcacccaggctggagtgcagtggggcaatctcggctccactgcaacctccacctcctgggttcaagcgattctcctgcctcagcctcctgagtagctgggattacaggcatgtgccaccacacccagctaatttttgtatttttagtagagacggggtttcaccatgttggccaggatggtctcgatctcgtgacctcgtgatccacccatctcggcctcccaaagtgctgggatgacaggtgtgagccaccgtgcccggcccaggagtagcttgcatttcttagggcaagatatggtcagttggggacatgacgctgctgggagcagcgggaatgttccactggtccctgaagcttgaggagaacctgacccagagaccttgtgaagggggaaggagaaagaaatcaggccaataggcaggctacggaaggcacccccgtatggaggctgaagataatgcccaatcccacccctgcctgggcatttggcaaagagccctttgaggcgggaccatctgaggccgtggccacttgtggatggagcagcgggttctctgtccccgggtcgagacctgactggggcctctcgcccagttttttgtccaggctttatcctgtgtcctcctcctgcccttccttcctccccacacacactagaccgaaagatgaatctgggtttactggctgtatggaaaatgtcagagtcagcctgggcttcagtagatagagccagatgtggtcggctctgtggtgacctgattgattaatcgggtgccactcccctctttcttcatttttttgagacagattttcactctcgttgcccaggctggagtgcagtggtgcgatctcggctcactgcaacctccgcctcccgggttcaagcagttctcctgcctcagcctcccgagtagctgggattacaggtgctgccaccacgcccggctaattttgtatttttagtagagaagggatttctccatgttgatcaggctggtctcgaactcctgacctcaggtgatccgcccacctcggcctcccaaagtgctgggattacaggcgtgagccaccgtgcctggcctcactcacctccttcttgtccctgccctcacctctgatgccttggtgtgcctctaggtcacaggtggacatggcacacgtgattgggcatcttgcctaaggctagcagggtctccaggaagtcttgggtggctgggaggcctcaggtaaaccagagccaaggaagctcagagtccttgtcactccgggcagcttggctgctggactccccggggcatcggtggagctggtgctgcctagagaagcctggtattgagcagggatctgtgggcttactcggggctgttggggaaggatgtggccatcattaccttcgtgggattgaagggctgcttctgtgagtgttctgggctaaccccttcctcctgggcagcggctcctggtcagcagcaaaggtttaatggatcgagattacggggaccaaagacgccgtgtaattaagccagttatttctctggctgggaacatctactcctcacagccgcaattgacttcgtcacttgtggttaccccgttcgcgttacctcgggcctaaacagcccatacgtcatctttttgagggagtctctcccttggaggcaaagttttaggagaaagatccctctgggagttgtagagtcggcgtggcagtgtgtgctattgaaggtgaagttttaggagagagacccctctgggagttgtggggtcagcgtggcagtgtgtgctatgcaagagtgccccctgcagttgttctgtgcaatggcgcccacgggagcctctttgggaactgtgtctgggttctgtagagggacatagatagaaacctcatccttgggtctcccaggatcctggggtcccgtgaaaagaaagtccatcagtcctgatggattcatagaaactagtttttaatttggtttagaaagaatggaagagacaggccaggcacggtggctcacgcctgtaatcccagcactttgggaggccgaggtgggtggatcacctgaggtcaggagttggagaccagcctgaccaacatgatgaaaccccgtttctactaaaatacaaaaattagccaggcatggtggcaggcacctagaatcccagctactcgggaggctgaggtaggagaattgcttgaatccgggaggcggaggttgtagtgacctgagatcacgctgttgcactccagcctgggcgacagaatgagactccatctcaaaataaataaataaatacataaacaaactaaattaattaattcaaggtcgcagactacaagccagggactgtgcgctcggttggccctgctgtaaactgtgttctttctcccgcactcttacccttcacagcggtgctggtgggggctccttgacgctggtatttcactgaggttgatggatctgggttcatttctctagctagaaagacagttgtgaagactgcgtcttgcccccaagcccccgtgatatgaggagacagccctctgccccaggcatcctggaagcactgggagcatccaccaactgggctgcctcttcctaggggcatgagcctaaggaggtctcctcatgggcacttggagcccacgtgcctgcattgctgtgttcctggaattattggcaagaagtgctgattgttaacatacacaaacacaccccccccccacacacacacacacaaacacaaacacaaacacacccccccatacaaacacaaacacagagaaagggagagtgagaatagactttggcggttgggatggagcagggccagtgcccagtttctagagcgaggccaggggcgaggacgcggggatttggcagagcccaagcgtgctggccctgctctccagccttttaaaatccacctccacatttcaaaaggaaaataaagagagccctcagccataaatcaggccactgagcatcgaggtcctttgccgaggcccagggcctgctgggctgcagagccagctgctgtgtttgaactctcccgcgcgcagcatgttaatgacggggcagaccctccagacccaggctcacacccacgacggccctcgagcccagagagtcccccacggagaggtcagcccctggggaaggcctgtgtctggggggcttacaccttagcggagccccctttggctgggacttcaaatcaagccagacccttctgtagctctggattctggccagatgaaaggtaacccctgacacagatcttttgagcccatttcccaataggaataaaagtaacaaagcaattgattggacacctcacgggtgcaagagtagagcgagcgttctcacattcgtgatctcatttcatcttcacagtaaacctatgaaaggttgttaccctgattttaaggataagaagggggattggccattgttcttggcctctgctggtgacttctgccatggggggcaccctgagggggacgcaccaggtcttctctgccctcctctgctcaccctcttcctgcgtggcggaagctcaggcatcatctggctttgtgagtgcctctgtctagacaaaacccacgtcctccctccctcctctttcccctgcagggccagctttggtgttaatggagcagaaagccttggtagttactttgcgagtgcgtcacggggagggtcatgagagaccagctggcgtccacccagccgcgtggaacagccaccttgacttggtcgaggccagcaagcgtcttgcagaccccgtggcagctcctgacccacgttcccccttgggaggcctggatgagctggggcaccaagtgccatctttgggtgtagaatcttcagaaaccaaaggcaggagctgattcggtctcctgctccctgggaagaaaggatggaacgcacattggctgtcaggagagctgctgcttctagccggaggaccttgctgcagctggtcagctgccagcacagccaggcccttgttgtgggtgcctgccgtgtctgtcctcaagcccctccctgagtgaaggacactgttccctttccaactgcctgtggctgtgctagaccattttctctcctttgcccagaaaccttcagtgggttcagtggggcattgcctttcccaccacattcagtccagactgggggaacctcttgttatccattccagtttcccagcacactgcccattctctagccagtaaggcctctcaccatcctgcaaagctctgtgctccaaggatctaaccagcttcaagcctcagctcagctaccaccatctccaggaagtcctccaggcctgattcgagcactggccttagtgagatccctggctcagagtccctaatgctgattgctccggctcacatcgcttagcactttcttatctttttttttgagacagagtctcgctcttgtcgcccaggctggagtgcaatggtgcaatctccacaacctctgcagtgctcactgcaacttccacctcccgggttccagtgattctcctgcctcagcctcccgagtagctgggattacaggtgtgcgccaccatgcccggctaattttgtatttttagtagagacgggatttctctatattggtcaggctggtctcgaactcccgacctcaggttatctgcccacctcggcctcccaaagtgctgggattacaggcgtgcgccaccacgcccggctaatttttgtatttttagtagagacggggtttcaccatgttggccaggctgctttgaactcctgacctcaagtgatctgtccgcctcggcctcccaaagtgctgggattacaggcgtgagcgacccgcccggccgatatcgtgttgttttatagtgtttacctgcacagtgtttcatgccagttgtcatttcttctctgccagactctcaactccttagaggcacgagggagaataacaaaggcttccgtgataggatgccagacattgtcctctctgctttgctaacagtatctcatttagcctccggcaacctgctgagttcttagccatttttatcctgtttcatgcttccccaagacttcccagaggtcacacaacacatctgtcttgacgcctcagcctgtgttctttgccagaagcgcccaatgccagggcctggggcatgagacctcaggttggggcccaggcctctgcatgtctgaaaagctcctcggcttactccctccgctcgggggaccagcctttcaccatggtggttctcccttccccgcaacacccagctaggcaccgagcaggtggaaccctgggaaatgctgctttgtgattggttggagtcaggggtggctatgaagatgctgctttgtgattggttggagttgggggtggctatgaagagacgaagtgctctagggctctgggtgtctggatccagcactggggatgccccggagagtcctggagcagggaggatccaagcaggaggtggagctgggtgttaggagggcagaagggccatcagaaggggatactggagacatccaactggtggcctctctctccgcccagccagagctcaaggctttgcctcaccccgagaagataaatcactggggtatcacggggtcccccagcccccgtgccatgatggacatgcacattttgatttggcaggtccggagctcagattctgcatttcctttgtttgcttgtttgttgtttttgagacagagtctggctctgtcacccaggctggagtgcagtggcgcgatctcagctctcactgcagcctctgcctcccagttcaagcgattctcctgcctcagcctcccaagtagctgggactacaggcgcgtgccaccatgcccagctaatgtttctgtatttttagtagagacagggttacaccatgttggccaggctggtctcaaactcctgacctcaggtgatccgcccgcctcggcctcccaaagtgctgggattacaggcgtgagcccctgcgcccggcctggattctgcatttctagcaagtcccaggtgaggcccgcgctgcccacactggatgggaaggaccaggcgcctgcagcatctgccctccaagccttcgtagctccctccttcctgcaggataaactctaaactccttagcacaacgtgggagccttctcagagactgggtccaacccatctccagccgcagcctcccctcctggccccactgccacacccccgggcctccggccacactgagcctctcccggtttcccaggatacaacactcgcccattcatagtgtggtgccttttgcacgtgctgttcctctgcttggggatgctgttggtctttctcagccaggtgaagaggacgctgaatgtcacctgcttgagtatcaggaccggggactgggcactggacctagactcttggccctggagagaagccctgcatggggccgcagcctgcccccgtccctgctcacagaaaagctcagccttgcagccgcgtggagtcagacgacttgcctgtcctgctttgaacgtgtggtgttcctaccacctttgagtaaaaatagagctgagaatgaccgaagtgaaactccaccttgggctctgggagagcagaggtgggaccacgctggggagggtgggtgcggacactccgggggcgggggctgaggccatctgcgtgggctctgggagagcggaggtggggaccgcgctggggagggtgggtgcggacactccggggggtgggagctgaggtcatctgcgtgggctctggggagggggccctgtgagccgggccaagctgccaggcactgggggtctacgccctggactcagagagaccatggcaccctcaaggctgctctcacttgaaaattttcgttttggggctggacatggtggcccacgcctgtaatcccagtactttgggaggctgaggcaggaggatcacctgaggtcatgagttcgagaccagcttgcctaacatggtgaaaccccgtctctactaaaatatacaaaaattagctgggcgtggtggtggatgcctgtaatcccagctactcgggaggctgaggcaggagaatcacttgaacccgggaggcggaggttgcagtgagctgagatcacaccattgcactccagcctgggcaacaagagcacaacttcgtctcagaaaaaagaaaaaaagaaagttttcactctgggctgtggaactatttcaggacttcctgaggggtttcctctggagcttcctgagtttcctcctggacattttgtctccaggtcccagcgccaggcaggggtggctcccggaagggctgtgggtgccaccctggctgactgcagccctctcttgcacctcctcccggccatccacccgcaggaggtcttcccccagcactggcttgtgaggagctccctctgcccgggagaaaatggctcctccgggtcacaggctcccctccagggactgaggggcatttttggattgtgggaaggcgctccagggcccggttctgtggccccaggcctgttgctcggctgggtggaggcacctctgcaggccgggagcttggtctttgaacacctgcttagcctatgacctccagcaagttatttatgctctagtgagctgtgtttttctcacctttagaatgggaacaatcttaccaaccacactgaaagcactgctgagtttttcagcaaataaaaataaggatgccccgttaaattagaattttagatgaacaatgaataatttttaaatataagtatatcccatatggctgggcatattgggaggccaggaggatcacttgaggccaggagctcgagaccagcctgggcaacatagagagaacttgtctgtaataaaaatacaaaaaattagctgggagtggtggcagacacctgtagtcccagctcctacggaggctgaggtgggaggatggcttgagctggggaagtcgaggcttcagtgagctgagatcatgcctctgcactccagcctgggcaacagagtgagaccctgtctcaaaaaaagaaaagtaagtatatcccatacaaaacttaggacatagtagactgaaagctagtctgttgctcacccgacgttcatgttcactgggcgtcttgcattttatctgtagaccgaaagcttgtctgttgctcacctgacgttcatgttcactgggagtcttgcagtttatctggggtccctgagtctggattcagtgctgtgtgtgacactttgccagggtcccacctagatgctccgacatccatgttcactgggcgtcttgcagtttatctggggtccctgcgtctggattcagtgctgtgtgtgacactttgccagggtcccacctagatgctccgacatccatgttcactgggcgtcttgcagtttatctggggtccctgcgtctggattcagtgctgtgtgtgacactttgccagggtccgtcctacctagatcctccgacatccatgttcactgggcgtcttgcagtttatctggggcccctgcgtctggattcagtgctgtgtgtgacactttgccagggtcccacctggatgctccgacatccatgttcactgggcgtcttgcagtttatctggggtccctgcgtctggattcagtgctgtgtgtgacactttgccagggtcccacctagatgctccgacatccatgttcactgggcgtcttgcagtttatctggggcccctgcgtctggattcagtgctgtgtgtgacacttcgccagggtcccacctagatgctccgacatccatgttcactgggcgtcttgcagtttatctggggtccctgcgtctggattcagtgctgtgtgtgacactttgccagggtcccacctagatgctccgacatccatgttcactgggcgtcttgcagtttatctggggcccctgcgtctggattcagtgctgtgtgtgacactttgccagggtcccacctagatgctccgacatccatgttcactgggcgtcttgcagtttatctggggtccctgcgtctggattcagtgctgtgtgtgacactttgccagggtcccacctggatgctccgacatccatgttcactgggcgtcttgcagtttatctggggtccctgcgtctggattcagtgctgtgtgtgacactttgccagggtcccacctggatgctccgacatccatgttcactgggcgtcttgcagtttatctggggcccctgcgtctggattcagtgctgtgtgtgacacttcgccagggtcccacctggatgcgtcttgctcatcttgtgacttgcttctctcttttgtgccaccccctggctcctagaggccaagctgaagaaaagtttctatggaattgtcacagaaacattgagattttgcttttacagggtcgatacagagtcgacacaaaaaatcacgatgcgattgatgcagagtggccagtgataatagctaacgttagcctagcgcttgctgtgtgtcctacactgttgcaggcactttgtctgtattaactcccttattcttcacaaagtctatgaagaagatacttatcatctccagtttacaggagagaacagagaggcacaaattaatggagcaaaagattaatgttcatgttcttttttttgagattgagtctcgctctgtcgcccaggctggagtgcaatggcaggatctcggctcactgcaacctccaccttctgggttcaagggattcttttgcctcagcctcctgagtagctgggactacaggcacccagcaccaagcccagctaatttttgtatttttattagagacggggtttcaccatgttggccaggctggcctcaaactcctgacctcgtgatccacctgcctcagcctcccaaagtgctgggatgacaggtgtgagccactgtgcttggcctagcctttcaaagtgctgggatgacaggtgtgagccggggtgcttggcctagcctttcaaagtgctgggatgacaggtgtgagccactgtgcttggcctagcctttcaaagtgctgggatgagaggtgtgagccacatccattagggcccgtcaggaagcagatgccacactcaggctgaggagtgcggggagagctatgacggaaatgtgggcagggtgagggcagggtctgtgtcctagacctggaggcagaggccatgtggtgagggcttctgggcaggagcgtgcacagcccgggtggcccacagtggggagctgggggtaccacatcccagcctcatgcccttgtcttcctctcatctcctgctggggtggaagagaggatggagaagcagggagaggggatccggaggggcccacgccaggaaaccaggctgtgtctaggtgcagctgttcttgccgagtctctcctgtctgcaaagtgagggtgataaacgcctgtcccacgtatgtcctggggctgttgtaaaaatcagctgagaagctggatgctggcgacgtgtgttcacggcgctgttctctgccagagtaagggataattgttgctgttgataaacactcactgggtcctcaccacgaactgagtcttttcacatcctcagttctgctgggagtctctaacctctggaggatgtgtcggcaaaggaaagagaaattgcaacattgcagagcctggattcgaacccagcgtccccatgtaaagtccgtgcagcactgggagagtcacttaatgagcctccgcagtgaaatgcatctcccgggctggtttggggctcccaggggaatgggtgctatgattaccattagctagtggtgtagcgggtgggagaggacctaacaggtgccttcggcccggctgtaaaaggagtgacttctggccgggcgctgtggctcacacctgtcatcccagcactgtgggaggtcgaggcgggtggatcacctgaggtcaggagtttgagaccagcctggccaacatggtgaaaccctgtctctactaaaaatacaaaaattagctgggtgtggtggtacacgcctgtaatcctagctactagagaagttgaggcaggagaattgtttgaaccctggaggcggagattgcaatgagccaagatcatgccagtgcactccagcctgggctacagagtgagacctcatctcaaaaaaaaaaaaaaaaatagtgactttgaccgggcacggtggctcacacctgttatcctagcactttgggaggcagagatgggaggattgctcgagactaagagttcaagaccagtccgggcaacatatcaagaccctgtctctacaaaaaaaattttaaaaaattagccaggtgtggtggaatgcccctagagtctaagctacttgggaggctgaggtgggaggatcatgtgagcccaggagtttgagcttacagtgagctgtgatcacattctgcactctggcctgggcaaaggaatgagaccttgtcttaaaaaaaaaaaagactggacttgtgggtgacggggatttccaacaaaaccttcccaggataggtgctgggaaggagatgagactcagaaaaaaaaaaaagactggacttgtgggtgacggggatttccgacaaaaccttcccaggataggtgctgggaaggagatgagactcagacaccccagccttgtatccctgagaagggatggtgtccttggaacgggaatccacatagatatttagcaggcagggcggtccagcgacacctgcccgcttccctcagaaggcaccgtctgcagcactcgtacaggtggcggggccagagagcaaggctcgatggagtgacgttgcctccaccgcacgggcgtcccaccttgggagatttccgtatcgctgaagttccctttgtggagcgtggcctctgtgaaaagtgttaataattcacggtagaataggttctcagatgcgccacgtctgtcctcccccacttcttcaacagagaatggcaacacctccattaacctgaatgtgagctcctcgggggtggccctggctgagtcatctgcgccgcctccctccccagagcctcgtacgcgctcggcgtctggctgtcgtgtgaactcagctccacagggcagacatttggtctgtttgctgctccgtcgtacccctggcacctggaacagtgcctgaaccatgagaagtgtttggtgagtgaatgaatgaatgaaaaatgaatgaacggacattcactgggattcagttctccttagagtcagagagacgtaggtgtcaatgctggttgcatgaagctgttacatctttgagcctgtttcctcatctgaatttggggtgtaattcctactgactgtacagttgcagagctgacatttcatgaactttgcttaaataatgtgtgagtgcctggcccataagaggctgtgttagtccttttgtgtgtgtgtgtgtgtgtgtgtgtggtttttttttgttattgttttttgtttttgagacagagtcttgctctgtcgcctaggctggagtgcagtggtgtaatctcagctcactgcagcctccacctcctgggttcaagcaattcttgaaccttgtaccagagaggagaggtacagcggccctagaccccagggctctgctcctattggtgtaagtgtttcctcctgcgccctacctccctgtctccaggcagggcctgctgtgggtccctctcctctcagccccaagggacctgttccctccagaaggcacctccccaagcggcggcagcgtcacgtgtgaggcctgcagttcagggccagcatccctcatccctcgccgagatcaggccctggaggggctcccacaggtctgactcaaaggcacaggtccctgggcctccctcctcagcatcgtggacccacgaccaaggacgtggaagggattctgaagattaatggtcgtaagtgtcactggcttttactgagtgcttcctgtgtgtgagtactgcgttcctacttctcctgtgtgtgagtaccgcatacttcccttgtgcgtgagtaccgcattcctgcttctcctgtgtgtgagtaccgcattcttacttctcctgtgtgtgagtaccgcatacttcccttgtgcgtgagtaccgcattcttacttctcatgtgtgtgagtaccgcattcttacttctcccgtgtgtgagtaccgcattcctacttctcccgtgtgtgagtaccgcattcctacttctcctgtgtgtgagtaccgcatacttcccttgtgcgtgagtactgcattcttacttcccttgtgtgtgagtaccgcattcttacctctcccgtgtgtgagtaccgcattcctacttctcccgtgtgtgagtaccgcattcttacttctcctgtgtgtgagtaccgcatacttcccttgtgcgtgagtactgcattcttacttcccttgtgtgtgagtaccgcattcttacctctcccgtgtgtgagtaccgcattcctacttctcccgtgtgtgagtaccgcattcttacttctcctgtatgtgagtaccgcattcttctcttgtgtatgagtactgcattcctacttctcttggactcctgagagttccatgactaagacagtagtttaatatagttggtttcctttgtcatcctgcatagtttagttttacgcatttcaaaacattcttcagagaaaggtcccttggcttcaccaggctgctgtgggtccaaggcacgaaagcatgaagagtctctgctcatcgccagaggactgtgagtcccaaacaggctccctgtagtctgaacaggcttcagccttctctgggtaatcctaggctgtggttacaacggtggctttggctgcactgggaggcaggagatctgggtttttattctacctccgccactcccatgccagccctctgtgtcctcagctgtgaaatgtaagggttggactagccctacgcacttttgattccttttttttttttaagacagagtcttgctctgtcacccaggctggagtgcagtggcacggtcttggctcattgcaacttccaactcccaggttcaagcaattctcctacctcagcctcccgagtagctgggactacaggtgcccaccatcacgcctggctaatttttgtatttttagtacagacaaggtttcatcatgttggccaagctggtcttgaactcctgacctcaggcgatctgcctgtctcggcctcccaaagtgctgggattacaggtgtgagccaccgcacccagccattttctgtgttatatgtgaaatgtagcaatatgcaaaacagcacatacaatgtctgggtttggtttactaaagactaacgagacggctgggcgcggtggttcacgcctgtaatcccagcagtctgggaggccgaggcggctggattgcctgagtccaggagtttgagaccagcctgggcaacatggcgaaactccatctctactttaaaaaaaataaataaatacaaatttaaaaaaagaataaaaagaagaagaattacattgtaagcatgttcctgtgagctgcccttttctggttaaatttatgtttttaggttcatcttcgctcctgcctgtagctctaaactgtgcaccgtcaaagctgcctggaattccattgcaggaataaatggcggcttactcaggggtggtcacgctccttccacctgttggaagagaatccatagtggaaaatcatttcatgctgcaacgcgacacacatacgtacatctgcacacacacatatacccatgcacgcttgaaatgagcctcataaagtaatacctgcccttattaggcgagataatccttttcaatccattctagaaggtgacctaccaaactgcacgatcccttcctaggctgacctgcagcatgaatgatacggggctgagtgcaccccatcgtgggtctgcctgggtgcgcctgaggttctgtgcctggcaggcaggctcaggtcatggtcctgctgatcccaccaggctgtccgcacgcattggcgtgagagcggtgtgcctgccggttcctttccttcatctgccgggattgttggcttccccctgttccgctgggcgtgttccagcagcggctcttcccttgtagttgctgcttctcatggcctgtggcctgagggaccagccccctaggcatgttagaactgtgtgcactgaggtcgggcgcggtggctcacgcctgtaatcccagcactttgggaggccgaggcaggcagatcacatgaggtcaggagttcgagaccagcctggccaacatggtgagaccctgtctctattaaaaatataaaaattagccgggcgtggtggcgcacacctgtaatcccagctatttgggaggctgaggcaggagaattacttgaacccgggaggtggaggttgcagtgagctaaggttgcacctttgcactccagcctgggcgacagagtgagacttcatctcaaaaaaaaaaaaaaaaaaagtaatgtgcgctgtagcacgactgacttagtagcaagagagggtagtgtctgagaccagactgcccgggttccaagctttgccactcagcagctgtgtgaccttgggccagtcatctgacctatctgagcttcggtttcctcatccgtaaaattgagataatattagtgcctgcctcctggcgcggtgtgaggctgcggtgagttaacttatcgtatgtgtgtgtggactgttgttattactgagcctgcctgtgcgtcagagcctgacattgatctaattctttgctggtatccctggacacagtggctgtgttgaaatgagctcaaaaccctcggctaaaaggaggttggaggtggacggaagagccacttctcaggctgcctgtattcagatcccagcctcaccattaagtaactacgtgactatgagcaagttagtccatctccctgtgcctcagtttactcctctatgaaatggggatagtagtggaactcactattcaccaagtaattgttaagaggattacataagataatgcacataaagctttttttttttctttttgagacagagtctctctctgtcacccaggctggagtgcagtggcacgatctccactcactgcaacctccgcctcccgggttcaggtgattctcctgcctcaacctcccaagtagctgggattgtaggtgtgcgccaccacgtctggctaatttttgtatttttagtagagacgagttttcaccacgttggccaggctggtcttgaactcctggcgtcaggtgatccttccacctcggcctcccgaagtgctggcattgcaggcgtgagccaccacagcatttagctctgccgtctacccggctacccagccaggaactcaggagaggccttttttttttcttcacatgaaaagaggtttattttctcactggacactgtcgcccatgtgaagggagcagccacctggccccaggttccctctcaacaaaggctcagtcctcagaatggctcctcatgagccccctgcagccggaggcctaggctcttccccacagcatgtgccccttagatacccgtctgccctctggtgtaggctggtgggcatgggtgtctgaatttgggtccccacagcacccccattgaggatcacagtgttggagttgaacctggggccacctgggtaccaggacactgtgctccacggtgagcacctctcctgtccctcgatggccagcaggatctggtcacccacctacctgccaccctatccttttttttttttttttttttgagacggaatttcgctcttttgcccaggctggagtgcaatggcgcaatctcggctcactgcaacctccgcctcctggattttcctgcctcagcctcccgagtagctgggattacaggcacctgccaccatgcctggctaatttttgtagttttagtagagacagggttttactatgttggttaggctggtctcaaactcctgaccttgtgatctgcccgcctcggcctcccaaagtgctgggattgcaggtgtgagccactgcggccggcctagatgtctttttatcgttgagttgtaagatttttaaaatatagtctagatatgttttcttcccctctgcacattgtcttttcactttcttgatggggtcctttgaagcaaagaagtgttcattgatgacgtgcggttcccccgtgctctctgttgcttgtgcttctggtgtcgtatgtaagaatcctttgccaagtccaagaccatgaagatctacccccaggttttcttctacatgttgtttagctttagctgttacatttaggtctttgatccatttagagttattttttgaatatggtagaaagtaaaagttcaacttttacatgtggcaatctggttgtcccagcaccatttggtgaaaagattcttctttccccatgaagggtcttggtgcccttgttgacaatccgtcgaccatagatatgtgggttcctttctggactcactcaacgtgactccgtggatctgtgtgtctggaaagatgcccccagcctgacagtttaccttctttgcccatctgctccagtcatcctggaggctcccatagtacacattgctgggacatcccagagctgaacaccatctctcaagtggcctcagagctaatcacttcccacaggcatcgaggcgaccacagagagggcccagtgtgactggctggcccccagggcgcccgggaagggatctgcagatccctcctcctggcacagcgtcctggcaggaggcacggtcccagagcaggccctgtttgtgctgaggccccgccaggattgggtggatgccttggtgagggccaggtaggagggaacaaatgcagggtgggaagtggctgctggaatggggaagggagcggggcctgcaggagggaagcattcttggcactagtggcatcgtcaccaggacaccggccttgggagggcgagcactacatccatgggtaggcgccggagccctgaggacacggcattgccaagctcttgtcctgtggcttccttccctgtgtccgcagtgtgtggggggtgggcgggcaggcaggacgaggtgacccccatcctttctgtgtgctcgttccatgaaattgggggatgtggatgcttgaacgggctctcagctagtgtgccttccgtgcagaggaggtaacactccccagggcagccagacacccttgtggagtgggatggaaagctgggaggaaggggctggccggcaccatggagatattttggtttgcaggaggattctgggctttatgagcactttaatgcaaccagggcaggcagcaccacgggacgggaactgtaagctgcacctgttgaattctgaaggtccgggctgcccgtgggccccgggaagtgggggtgcccagcttgtggggtgcaggcggggaggggaccgtgtggtggtggagacgccatggtacagcctgtctcccgatcccccaggtcccctgaggccttagagatgaatctcccagaagtggcagccgcggcagggacaccaggatcatgaaggacctgggaggtgaacccgctgctcagttcctggccctcgtcccttagacccagtcctcggagcagaactgggggaagctgagatttctgtgggctgcgtgcccacctcctccctcttcgttggtcctcccacgcgcccgcccccgagtgggagcagagccatgtgagctgagttggagctgctcgctgccgagaattgcatcagccccgcctggcaggctggagcgggagcctgttgctatggtgaccaccaggcttcaaaccagtgagaaggatgagatggttgccgggcgaggttttctcaccatgtgatgcgtgtgacaggctgacaggttcggtagacctggacccagccctcccgtaggtgtgcctggacccccagccctcccgcaggtgtgcctggacccccagccctcccgcaggtgtgcctggacccccagccctcccgtaggtgtgcctggacccccagccctcccgcaggtgtgcctggacccccagccctcccgcaggtgtgcctgggtccccagccctcccgtaggtgtgcctggacccccagccctcccgcaggtgtgcctgggtccccagccctcccgcaggtgtgcctggacccccagccctcccgcaggtgtgcctgggtccccagccctccccgcaggtgtgcctggacccccagccctcccgtaggtgtgcctggacccccagccctcccgcaggtgtgcctggacccccagccctcccgcaggtgtgcctggacccccagccctcccgcaggtgtgcctggatccccagccctcccgcaggtgtgccatctgctggggggcatgatgggcactgtcccaaaagccatctgggcattggccaggctggggggtatgactgagggacacagggggccacgccaggcccatgtagtgtcagggggccttccttggtccttctgcctagttgtgggggaaggggtatggtggggatttgaccaagtgcacctgatgatggggcaagaaaggggtccagactggtccccatctcccagaacagagggcggctctggatcacagctgattaaacctgcccaggctgtgtcaaaaattttttttttaacggagtttcactcttgttgctcaggctggagtgcaatggtgcaatctcggctcattggttcaggcgattctcctgcctcagcccaagtagctgggactacaggcgtgcaccaccatgcctggctaattttgtattgtcagtagagacaggtttcactgtgttggccaggctggtctcaaactcctgacctcatgtgatccacccaccttggcctcccaaagtgctgggattacaggcatgacccaccgcgcccggcctgtgtcagaattttttttgttaaccacgtgacaaagctcatcatcttgctaaagataacagagcgcttggccaagccagtgcaatgcctgggttcagatctcctctctcatcttttgcctacaacgggaaaggaggtaaaaagtctgtgttccaggtgtgctgagcacttgttgtgtgccgggagttgtagtagacactgtcctgtctttttttttttttgagacagagtttcactcttgttctccaggctggagtgcagtggcgcgatctcggctcactgtaacttccacctcctggactcaagtgattcttctgcttcagcctcccgagtagctgagattacaggcacgcaccaccacgcccggctaattttttgtatttttagtagagatggggtttccccatgttgaccaggctggtctcaaactcctgacctcaggtgatccacccacctcagcctcccaaagtgctgggattacaggcatcagccaccagcccagcctgtcctgtctttttttttttttttttgagacagagtctcgctctgtagcccaggctggagcgcagtggcgcgatctcggctcactgcaagctctaggttcacgccattctcctgcctcagcctcccgagtagatgggactacaggcacctgccaccacacctagctaacttttttgtatttttagtagagacggggtttccccgtgttaaccaggatggtctcgatttcctgacctcgtgatccacctgctttggcctcccaaagtgctgggactacaggtgctcaccaccacgcctggctaacttttttgtatttttagtagaggcggggtttccccgtgttagccaggatggtctcgatctcctgacctcgtgatccacctgcttcggcctctcaaagtgctgggactacaggcgctcatcaccacgcccggctaacttttttgtatttttagtagagacggagtttcctcgtgttagccgggatggatgtcctgtctttctattgtatcctctccctcacttggggaggaggcagtgatgttcctgttttgcagaagagccggatcgggcagccagagagttgaagtgacctgcccaaaaagggttcaacctaaatccttgggcttcctgtccagggctctgtaggatgtcagccatccccagaatcaggcattctcaggatgtcctgtgaagaaacacacttctccatcccctgctggaaaaaccatgacaatctctccgcagggaagaacgcggctttgaggtggggagtggctgaccgaggccctttgtggtttctaaatggcagaatgagagaggtgggggcgttgagggtgtcacgcccaggaagcagttggggagggcagggctggacactgaccaagcctagcctgggtgcaggaactgagcttgggatttttgcttggggccctctagggattaggatgaattgtcagatgagttctcagcagacagggctttagggaactggtccagggaaataagacgtagagccagaggggaaccagggcctctgtgagagcctggcagtcatgagatctgacttgctgagcttctgaggtgtggtaataggaactaatcctctcttcggtgtgctttagatgtttactcgtttcatcctcacagaaaccctgtgaacttgggtgctactgttactccatgttgaaggtaaaacagaggcacagagaggttatgtgacttgcccaaggtcacacagctggtaaggggtggagcctgtgattcagacccagtcagtctggctgcagagcatgagctctgaatcaaatgttctcctgcctccattcttaccttttagaaagatgacagcaagttgcatacgtgacctcctcacccccaggagtgtgtgtgtgcacatgtgtatatatatgcacacatacgcgcaccagtagctcagcaagggagggaggctcaggaatgggctcgtgggcctctgtgtgttgatggctgggtttgcagaacctagggagtccggcgtctgtgtgcgtgatgctcctcccttcgtccctccctgctcgcgtggttcccagtgggtggggtgccctgttgcctctggtttagagccgtgcaggatgttaccacagaccgtgtaccaggagtgttcacccaaacttgtgaagggccctggactcccaggaaggagctcagatctaggactgggagtggacggcggccgccggaggagtgagagggggcagtgcgcttgccatgcccggggcccgtcctcctgggcctctctcggcgcttgggcaacctgtgtattgcccacacgtgtgccgctgcttgcagctcctggccaccaccctcctctttgtgtctggacgaatctgactgctctgagcacctcttcagagtggaatcatacaggacagtgtctaccgcaactcccagcacacagcaagtgctcagcacacccggaacacagacttcttacctcctttcccattgtgggcaaaagatgagagaggagatctgagtgcagacatcgcgctggcttggccaagtgctctgttatctttagcaagatgaagagctttgtcaggtgggtaacaaaaaaaattctgacacaggccgggcgcggtggctcacgtctgtaatctcagcgctttgagaagtgtgtcagcccttgagaagacaccgggcaagctggccttcctctcggtgtctctcccaggccgggactatggggagaaatcataacaacagggacaacagcagtgacaacgtcagtgacgacaataacagccactaacgttataccacgtgccaggccctgttcttagaacttcgcctggactaactcattcaactgtcacaaaagctgcatgggatgatgttgttatgttattatcttcatttgacaaatgaggacactaaagcacagagagatgaagcaacttgccccaggacacacagctaaaactgggagtggaattcggagagcctggctcctggcatttggagctgacaggtgcccggcaacccctacctatggccgagctgagctcgtcttgtgccagggagttggcggcaaaacagaaatgagctctgggccgggcacagtgcctcacgcctgtaaccccagcactttgagaggctaaggtgggtagatcacctgaggtcaggagttcgagaccagctggccaacatggtgaaaccccatctctactaaaaatacaaaaattagctgggtgtggtggtgcatgcctgtaatcccacctactcgggaggctgagacaggagaatctcttgaacccgggaggtggaagttgctgagatcacaccaccgcactccagcctgggtgacagagtgagattctgtctcaaaaaaaaaaaaaaaaactaaaaccagaaatgaattctggaggtgggatcttcctttgtaattcagaaggtgactcccaacccctcttcagaagctgggtgggctccaggcctggttcagccccctggcctcctgtcgatacccatgggggggtctctgtccctggtattactcctttcctgtctactttttttttaaatttagattttattctatttttttaaattatggcaaaataggccgggcgctaggtagctcacgcctgtaatcccagcactttgggaggccgaggtgggtggaccacgaggtcaggagatcgagaccatcccggctaacacggtgaaaccccgtctctactaaaaatacaaaaaaatttagccaggcatggtggcaggcacctgtcgtcccagctacttgggaggctgaggcaggagaatggcgtgaacccaggaggcggagcttgcagtgagccgagatggcgccactgcactccagcctgggtgacagagtgagactctgtctcaaaaaaaacaaaaacaaaaacaaaaaacaaaagaaaatcatggcaaaatacacatgcctaaaattttccatccagtgtacgcatcagtggcccgaggcacgttcacactctggtgcggccatcagcaccgtcatctccggaactctcacctggctaaactgagactccgcatctgtgaaaccagcgcaccagggaccggcttcgtggaagacactttttccacggaccggggaagggtggggagcgctttcgggatggaactgcgatccctcgcacgcgcagatcacgacagggctcacgctcctacgagaacctaatgccgctgctgctcggatgggaagtggggttcagggggtgacgcttgctcacccaccactcacctccggctgtgcatcctggttcccaacaggccacggactggtgccggtccatgcccgggggggctggggacccctgtattgaacaacagctccccgtttctccagcccccagctcctggccaccaccctcctactttctgacttgatgaatctaactgctctaagcacctcatccgagtggaatcatgtggtatttgcctttctgtgaccagcttctttcacgtagcctaatgcccccaaggttcatcgatgtcagaattggcctgtgtcggaatataagccgaataatatccgttttatgtaaaggccgcgttttgtgtatccattcatccacccatagacacttgaggtgtttctgttttttggcaagtgtcaataatgctcttaggaatgcgggtatttccccgacaacctttgggcttacttcactcatcagcagcaagcaggccatccttgaagcttaccgtggggtgggcccattgaccagcctggggagagtgggtgggtcattgaccagcctggggccatcatgctggctgggaaggcgtggccctcaggtgccagcttctacccaacactaagccgttggtgctcctggcacttacttacttgctggaagacattccaccttgctttcccgtctttccccagaagagggtgctgggtttctgcttctctcctgaatgggaaaagggcggctgcagcttgccatgaggctggcgtgggtggggttaggagaaaggactgtcaggtgctgtgttgggaagtgtgtgtggagcttccgtgaggctggggttggccttctgagcatacatggaagggctgagtgggagcagggtgttagggtagccggtcatgccgtagaaccaaattaatgctgaaggccgggcgtggtagctcacactaatcccggcactttgggaggctgaggcgggtgggtcacctgaggtcaggagtttgagaccagcctggccaacattgggaaatcccatctctactaaaaatataaaaattagctgagtgtggtagtgggtgactgtaatcccagctactcaggaggctgaggcaggagactcacttgaactcaggaggcagaggttgcagtgagccaagattgtgccactgcactccaggctgggcgacagagtgagactctgtgtcaaaaaaaaaaaaaacaaccaaaaccccccacaaattactgctgaaatcctcatcacttaacacaagcaagctgctgcttgctcacagtggtcctggtagacggggggctctgctccccgtggtcatgccgggacccagcctgatggagactgcaccatttggaatatgtggcctccaagggtcacagagggaggagaaagggagaaagagctgtgtgtaatttttcactgttcagccgtgaaatgatacttgtcatgtccacttacagtttgttagccaggactgagcacctggccctgcccagggactgccaagtggccagacagtacggccttccatgtgcccagaaagacaggaggatggggatattgctgggcactggtcgtgttgaccacatagtggcaggtggcttatgtgaaggatgaaggcccttgagcctgctctgtggccagggcagtggtgtcatggtggcagtggtggcagtggcggcagtggtgtcatgtagcaatggtggcagtggtggcagtggtggcctggtggcagtggtgtcgtgtggcagtggtggcctggtggcagtggtggcatggtggcagtggtggcctggtggcagtggtgtcatgtggcagtggtggcagtggtgtcgtgtggcaatggtggcagtagtggcagtggtggcatggtggcagtggtgtcgtgtggcagtggtggcctggtggcagtggtggcatgtggcagtggtggcatgtggcagtggtggcagtggtgtcatgtggcagtggtggcatggtggcaggtgtctgggcactgaagggacttgggtgtaactgacttctaggggaagtggcagaatcatggtcatcttcatgtgccccgcactgtgctgagctgtttacagacgtcatctcatggaatccccacaacaatcctatcattccgtttcacctttggggaagccagagctcaggaccacagcctccaagtgatggctgtgcttgctggtaggagggtgcttatggcagcagagaggccgggggctgaatggagtgtgggggccagaggtggtggggccacaaggatgtgatgtgtgtgtgtgtgtgtgtgtgtgtgtgtgtgtgtgtctccatgtgcctgcgtggatagaaacaagcagagacaagctggctgggcttttgcccttccccagctccgcgcacacctagctttgcaccactctggaggaatggtgacgtcgaatgtccaaggaagaggctaacctgggcacgtcctcttacctgccctccttgaatgacacaagacattggaagtggaagtcacagtcaccggtgctctggagctgggagtggggagaaggaggtgacttttgaggcactctgtgacagcccagttcaacagtagaattatgtttaaggcccaggaaggctctgggtggagagccagcattttgagccgaaggccagtgaacgtggccacccagcagcactgggcagaggtgcggctgcttctgcaggtgtatgtgtgaaggggtgcaagtggacgccttgggcgacttctgcggacaggggcaggagcccggagctgcgtggctctgggattgaagggcaccctggggtggaaggcaggggtcgtgcatcctggtcctggctgctgccaccctgcagggctgctttgagagtcttgctggcctctctggacctggcattacttgtctgttctctgaattgcctcttcctacttctcagcactagattgtcatttaatttttcataaataccctaaggacttacaaagccatagatgggaggggggctccgaggaggccatcccaggcaggtggtgagcaccgttggattgaaaggtcctcccaggtcatcgcctcctggccacccgccttctgcagctctggggctgagtggcatttcccacagggaaagacaggaggaagagcagagccttaaatcaaatcagcccaggattattacttgttatcaattcttgaggaggttcggaggggaagcaggaagtaggctgaagctgttaactctaataagggttagaactcctatgggatttgtcagaaggacttcctggcccccagaccctaaataattgaattggttgttatgggaagagatgaggaggattattaggagatcgtatcactcagccagcagttactgagcattggctctgcgtgagtcctgtcctgggcgccacaaataacaggcagtgagcagaagagggccaccacctcgcggggaagacagaatataccgataacccaaacgaactcagacttgctttctttgtagaggatttattttctttctttttttcctttatttttatttatttattttttttgagacagagtctcactctgtcacccaggctggagtgccgtggcaccatctggcctactgcaacctccacctcctgggttcaagtgattctcctgccacagcctcccgagtagctggaattacaggggcccgccacacacccagctaatttttgtatttttagcagagatagggtttcaccatgttggtctcaaactcctgacctcaggtgatctgcccgccccggcctcccaaagtgctgggattacaggcagaagccactgcacccagccctaatttttgtatttttagtagagacggggcttcaccatgttgaccaggctggtctcgaactcctgacctcaggtgatccacccacctcagcctcccaaagtgctgggattgcaggcgtgagccactgagcctggcccctgcccctttttttttttttgcctgattgactgaacgcgttattgtttgtgaaatgctctttttatctggtatctcttgtcactccacaggggcagccctgtgaactgcgcagggcagctgtgtcttgcccattttacagataaggaagtggcggcacctagagattaggtctggacgcgggacccagatctgcctcctggccccatgcccacctcgttgaatcccgttgcctttccatgggcgactcgtaacggagctgggggtgctggagtctgtgcccgcccctgcatctggtgtgtgatagcttaggagatgtttgttgagtggctgttgcttgcgtacacatgccgtcagctttcgtcgtatcatggcaaggttatacggcccgtctgcaatatgattcctctatgttcggtgggcacataactgtctttcctacagagagatgaggaattttagttccctctgccaaggtggggggattttgtcaaatcgcaggaaacaatggccttggtgcaaagagtagctttaatctgtggctcagctgtttctcagccaggtggccttggatgagactcagaagcctcagttttcccccgtgtcaaagggggccattcatagctactttgacaacctccctgggctgtggggatgaaatgagatcctggccgtgggctcaccgtgtaaaacactgcgcagataatactcagcatgtcccatccatccccaagagctggagactggtgaagccacatgcgcttctctgcccagggctgctggccaccctgacaccctgggcctcagcctctgcccttgatgtccaagaactatgattcctttgtctcaggctgtggagccctgagcttctccaggcggccacttctccaggcggctacggtctctgcctccctcttccaaggatcttggaggtggatgattggatttcatctccatggcaaccagagaggccataacacccgcccatggtggggcctcgagtctgttcccagcagtggaggcagagccggagcaaacaactcctgcaacagcagctgtcccccaggaatgagctgtcccccaggagcgagctgtcccccaggagcgagctgccccccaggagcgagctgccccccaggaatgagctgccccccaggagcgagctgtcccccaggaatgagctgtcccccaggagcgagctgccccccaggagcgagctgtcccccaggaatgagctgtcccccaggagcgagctgccccccaggagtgagctgtcccccaggaatgagctgtcccccaggagcgagctgccccccaggagcgagctgtcccccaggagcgagctgtcccccaggaatgagctgtcccccaggagcgagctgccccccaggagcgagctgtcccccaggaatgagctgtcccccaggagcgagctgccccccaggagcgagctgtcccccaggaatgagctgtcccccaggagcgagctgccccccaggagcgagctgtcccccaggaatgagctgtcccccaggagcgagctgccccccaggagcgagctgccccccaggaatgagctgtcccccaggagcgagctgtccccaggaatgagctgtcccccaggagcgagctgtcccccaggagtgagcttcctcccaggagtgagctgccccacagcctctgcccggcctccagttgccgctttgctgggctaatgaggggctccaggcctcggggtgagggtggcgctgtctgtgctcccagtggctgctacaggccaggccgagggtcctgagtgaatgagacaggggccgacccccacccacccctgcctgtctgtggttcacaatcagagcaaagccctttccgtccgtcttgtcttctcttccccagcgaatcccacagtccccaagactgaggacaagccctgcctcttccgggcagccttccctgtgctggctgaattgatcacgcgcctggctgatggcttcataggctgcttcagagtattttttttttttttttgagatggagtttcgctcttatcgcccaggctggagtgcaatggtgtgatctcagctcactgcaacatccgcctcccgggttcaagcgattctcctgcctcagccccccgagtagctgggattacagacatctgtcaccatacccggctaatttttatatttttagtagagacggggtttctctatgttggccaggctggtctcgaactctcgacttcaggtgatccgcctgcctcggcctcccaaagtgctgggatgacaggcgtgagccactgtgcccagcaagagtcttagttccatttggttgtaaagacgctcacttcagtgtccctgtctgaacctggcggctcttggccttcctatacattagagtcacctggggagcttttaacaggcctgatgcccaggccattccataccaattcagtagcaatccctggggtaggagccagagagcttcccaactccccagggattccagtgtgcagtgaagattggaacagttatcttaggattcaagtcatgaactggccgggcgcagtggctcacacctgtaatcccagcactttgggaggccgaggcaggtggatcacctgaggtcaggagtttgagaccatcctggctaacatggtgaaaccctacctctactaaaaatacaaaattatccgggcgtggtggcgggcacctgtaatcccagctactcaggagactgaggcaggagaattgcttgaaccggggaggtggaggttgcagtgagccaagattgtgccattgtactctagcgtgggagacagagcaagactctgtctccaaaaaaaaaaagaatttaagtcgtaactagtccaccagcctgtgctgaatggaggctgactgatgaacagcagagttagctgacaaagcttgctgtagtcttaactcactgcaaattgccaaagccctggtttgttttttaagggctgggaggtccctaagggttcttggtactcaggaaggagagcaggggaataatgataatagctgccgttttgttagcgccagctttgggtgccttgcatagcatatatttcctcattgtaacctcgcaaaagcttcatgaggtatagatcttgtttttatcctcattttagagatgagaaaactgaggctctgaatggctaagtagcttgcccaaggtcacatggctaaggtcacattcccgaagtgctaatctcaggaatggaacccgagtgtgattccaaagcctctgcccttgaccactgagctgtcctggctccccaacctctgctccatcaatcaaagaatggggggccctgagaaggaggtggcttgtcccgtgggaaagatgctggtttccaggattcctccccttggagccaggccctgactgaggggctcccgatggtattaaatatctcctggatcagctggggtcacctggaccctgaaggtgtctactttcccgttgcctacgacacccactcggcttcagctgagctttcccaaggacccttctgccctgatactgtgcccagttctttaacctacatcatgttatttaatgtcattttcacaaccaccctgtgacatggtatcgttatcctcatcttgtttctttgagacagtctcactctgtcacccaggctggagtgctgtggtgcgatctcagctcactgcaacctctgcctcccagtgcaatagaagactggccgggcgcggtggctcacacttgtcatctcagcactttgggaagccgaggtgggcggatcacttgaggtcaggagttcgagaccagcctggccaacatggtgaaaccccatctctactaaaaatacaaaaattagccgggcatggtggcgggtgcctgtgatcccagctacttgggaggctgagacaggagaattgcttgaacctgggaggcggaggttgcagtgagctgagatcccaccactgcactccagcctgggtgacagattgagacttcgtctccaaaaataaataaatcaataaaataaagtgcagtagaagacagtgtccttattgttgtaggtgaggtggtagattttgtatctgagccaccatccctgctgaaattgccccggacaggctgatctggtacaggtggcacctgggaagtggcagcctcgcttccgctggccagttccctggttcagggttgccggcctcccagatccacacctgtggtccagactctgctgtctggctgcccgttggatcttctgacagggatggccatgagtcttctcagtccagacatgtctccacctggacttagggtctgttcccccggaaccagctcccccttcctgtccatcgctcagccctccaagcccagaggaccctgctgtggccgcattttcagtcaactctcccatcgccagactttgcccttggttcccaccatggtcacctttgacaaagcacggaggggcggtttgccccgttccacatcatctcatgcaccacagtcagcttcgttttcctgaagtcacctctgaaatcaccttgccattttggcatccgtggctcccagcgtgcgtgaaatctgactattcaggatagtgttccaggccctctgcagtctgacccctccagagctcggcttcagtggtaccagtctgttcatcagggccaacctcctgcgtcctgcccccattctgcacgctgataccctgccgcaaatggaccttttccttcctcacgctctgtgactggttgtttcttccatatgaacccctcagggcagcccacacacttcgtgtttggtatttgtatgagtcctacatatgataacattttaagagcaaaggttgtggagttggatgacctgtgtccatctggtttcccacctgactgccgtgaaatcttgggcgagtaacttaactccctgcgctttcatttcctccattgtaaatgagtcataatggtacggaggcagaaatttaaaaacaaatatgtatgtatttactccaagaaaagtaacaggcaaggcaagggttaaaaagaaaaaaaaaacaggccgggcacggtggctcacgcctgtaatcccagcattttgggaggccgaggcgggtggatcacgaggtcaggagatggagaccatcttggctaacacggtgaaaccctgtctctactaaaaatacaaaaaaattagccgggcatgatggcaggcacctgtagtcccagctactcgggaggctgaggcaggagaatggcttgaacccgggaggcggagcttgcagtgagccgagatggcgccactgcactccagcctgggcgacagagcgagactccatctcaaaaaacaaaaaacaaaggaacaaaaaaaacctctttttttttctgcctagcaagctcactttaaggagttataagataacgctgtttaagaagccaaggctaaagaaatgggctccacacacccgccttttagagcaaggttgaaggaaaaaagaaagagaaattcctttactgttactcctttccctggcttcctaagcataactgtgtttacaaatgtctggatttagccagtccttgtttttcttttgacacagctacaagccacaagttatgcactatatgattaactgcttttgttttacttttgtgaagtctgcttataaaaaccccattctgtctttattcaatgctaagctttttaaatgcaaatccactgagctagtgcatacctaaaataaacagtccttcccttctccatatcggtctctccggtcctcagtttcctgcaacagtacaacttagattttaaatttttaagaagtttttcaggcagagtgtggtggctcatgcctataatcccagcactttgggaggccaaagtggaggactctttgaggccaggagttcaagaccagcccggcccacatagcaagaccctgtgtctacaaaaactttttcgaatcagccaggcatggttgtgcatgcctgtggtctcagctacttgggaggctgaggcagggggatcatctgagcccaggagtttgaggctgcaatgagctatgtttgtgccactgcactccagcctgggcaacagagcgagactctgtctctaaaaaaaacaaaaaacaaaaatcaaaaaacaaaaaaaagcttttcaagtgcaccagtcttaagcatagagcttggtgaatatttccatatgtctgcttgtgtaactaacacccagatcaagatatggaacatcttcagtgtcctggaaagttgcttcctgccccttcccagccaacactccctgtccccgtcgtccacccccagaaagccactgccatggacttctatcaccatccatttgtttcgcctgttcttgagctttgtatttaggctggtgcaaaagtagttgagagctggacgtggtgggtcacacctgtaatcccagcactttgggaggctgaggcgggtggatcacctgaggtcaggagcttgagaccaacctggccaacatgctgaaaccccatctctactaaaaaaaaaaaaaaattagccgggtgttggtggtgggcacctgtaatcccagctactcaggaggctgaggcaggagaattgcttgaacccaggaggcggaggttgcagtgagccgaaattgtgccactgctctccagcctgggtgacagagtgagaccccgtctcaaaaaaaaaaaaaaagtaattgtggtttttaccattatatattacctttgctccaacctaaagtaaatagcctcctgcggtgcaggcatacctcgctttacggcactcctgtgatgcgggcgtaccttgctttacggcactcatgtgcaggcgtacctcgctttacggcacctccatgcttagttgagcttcaaagatgctgcgttttttttcaccagttggaagtgtgtggccacctcgcattctctctgtgttacgtgttggtggttctcacgatctttcagacttttttattgttatgacacctgttacagtgatctgtgatcagcgatcctccatgttagcattgtcattgttttgggcaccacagaccggacccggcaaccttcatctatgaacgttgtgtgttctggctgttccgcccaccagcctttcccagcctctctcctctccccgctccagcctccctattccctgagacacaaaaatatccaagttagtccagtgagtaaccctacagtggcctcgaggtgtgcgtctgtcactttaaatcaaaagctagaaatggttcagtttagcccgggctcggtggctcacgcctgtaatcccagcactttgggaggccgaggcgggcagatcacgaggtcaggagttcaagaccagcctggccaacatggtgaaaccccatcgctactaaaaatagagaaattagccgggcgtggtggcgggcgcctgtaattccagctactcaggagtctgaggtgggagactcacttgaacctgggaggcagaggttgcagtgagctgagattgtgccgctgcactccagcctgggtgatagagactgtctagaaaagaaagaaagagggagagagagaaggaagagagaaagagagagagagagagaaaaaagaaatgatttagtgtagtgaggaaggcttgttgaaagccaagataggctggaagcggagcctctcctaccagttagccaaattgtgaacacacaggaaaagtgttttaaggaaattcaaagtgcttctccagtgaacacaagaatgataagggaaacagccccactgctgatatggagaaagtttgagtggtcggataaagatcaaaccagccacaacgttcccctgagccggagcccaatccagagcaaggccctcgcactctgcaagtctgtgaaggctgagagaggtgaggaagctgcagaggaaagtttgaagctggcagagatttgttcatgaggggtcaggaaagaagccgctttcataacagaaaaaggcaaagtgaagcagcaagtacggatggagaagctgcggccagttgtgcagaagatgtagcaaagactgtaaaggaaggtcaccgcactaaacatcagatttttggccaggcgcggtggctcacgcctgtaatcccagcactgtgggaggccgaggtgggtggatcacttgaggtcaggagttcaagatcagcctggcctacatggtgaaaccctgtctttactaaaaatacaaaaatcagccaggcctggtggtgcacatctgtaatcccagctactcaggaggctgaggcaagagaatcacttgaacctgggaggtggagcttgcagtgagctgagatcgcgccattgcactccagcctgggcaacagagccagactctatttcaaacaacaacaacaaaaccaaacaaaacaaaaacaaaacagatcagattttcaatgtagacaaaacagccttctattggaagaagacatatgtaggactttcatcctagaaaagggatccgtgcctggcttcgaagtttcaaaggacagaaggacaggctgactctagtgttaggggccagtgcaggggtgactttaaaccagtgctcactgaccattctgaatatcccagggactttaggagtaatgctcaaacaatggtattcttcacagaaatagaaaaaaaaaaatgctaaaatttatatggaaccaaaacaaaaataacaaaactggaagaatcacattacctgactttatttgtttattttttttgagacagagccttgctctgtcacccaggctggagtgcagtggcccaatcttgcctcactgcaacctccgcctcccgggttcaagtgaatctcctgcctcagccccccgaatagctgggattacaggcacctgccaccaagcccagctgatttttgtatttttagtagagacaggctttcaccatgttgaccaggctggtctcaaactcctgacctccggtgatctgcctgctccagcctcccacagtgctgggattacaggtgtgagacaccgcacctggcctctctgaagacttttgatgcagctttggtggaataatggtcagggctgggctccctcagctgctcttccctctctcattcccatcctcaattcttgggcagaaaataagtttatcacttaacagtcagcctctgtatcacccttgcgacaggctggagggtgtcgctccagcctgggcaacaagagtgaaactctgtctcaaaaaaaaaaaaaaaagacaaaaagaaaaagaataaaaaataaagttagcaatattcagcaatgatgtggccggcaagagcctgcagaggatcatgggccaggtcacccatcctcactgagtcctgcacggctctcggctcagctcacgaggctctcaggagcaagtccctgcctcctctccagcacggccctctccccctctgctcactctgtgttctagccctcctggctatttatagtcccctccaggggccctgctgtttcccactgggtgccactgccaagcctcctctcaccgcctgaaactctgctcctgtcccccacccgcctggcaggcacccacacagctttcaagatccaattaataacagtaataatagcagctgagatggattgggtgcttcctatgtgctaagtgccgtatgcgtgtcatccagtttaacccccgcagcggcccgtgcacttgatcctgtgtcgtcccccgtttcacacggatttgctaaacccgtatccatttagtagcagccaccctgtgccaggcactcctcggaggcacagagaggttaggaagtgccagagcgtgggctggaacctccgctgccggaccgcagggtccctgctctcagccacagcgatgaactgtcttccttagcgtggcaccaaagcctccccagccacctcccctccccgagtgttgcccacaccctccggtccgccttgccgggcctttgaggcctctgtcgtagcatctcggagatttgattgctgattggactcgcttcctctctgggctgtgaggatatcatttggaaatgtgttcattgtaagcagcagaaaacccaatatatagggacttgtatttcccatgagcaggaaatgagacaggctcttcctagtgtggctcagctgaacagcatgagggaaatggctctgttcttttatttatttaatttaatttaattaattaatttttatttttttgagagggagtcttgctctgttgccccggctggagtgcagtgctacaatctcagctcactgcaacctctgcctcctgggttcaagtgatctcctgcctcagcctcctgcgtagctgggattacaggtgtgtgcaaccatacctggctaatttttgtatttttagtacagacggggtttcatcatgttgagcaggctggtctcaaacttctgacctcaggtgatccacctgcctcagcctcccaaagtgctgggattacaggcgtgagtcaccacccggctaatttttgtagtttctgtagagatggggtttcaccatcttgcccaggctggtctcgaactcctgacctcaggtgatctgcccgccttggcctcccaaattgctgggatgacaggcatgagccacgcgcccggcctctgttctttcttgacctgttcctggtggcagcagtaaagccaccgtaactccaatcatcacccatgagttcaaggcaaaatgtctctttgtaatcatcaaagtcagggccttgccagaggtcccagcatgcttcacttgggtctcagtggccagaatggtgtagggcagccgttcctggtaatgagagaggcagagaaagcgggtatcttgcctgggactggtctgttgccacttcctagaaaacgagggtagagtaagcaaggaagaagggaagacgggtgtcgggtgtctgccagtgccctagagcgcagagaccgtacattaattttttcaaaatttccagaatcggaaggctctaatgattttgtgttgtagccttccagtcttttttctatgcacgtatgtttttacttttttcagacattgtaacatactttaattattgttattaatctctttttgcacttgataagatgctattcatcatccatatagtttttaatgctatatagcagcccatcttgtagaaaaaccataattgactcaaccagtctcataattcaggttgtttttaatatttcacacttacagacagccctgtgacttacaactttatttttatgttcatttataactagtatcatagatcataatcttattacgctgggtataaactgtaccaaccactaaaccttttgataccagttaccagattgactctagaaaagttgggccaactttttttttttttttcgagacggagttttgctcttgctgccaaggctggagagcaatgttgtgatcttggctcaccgcaacctccacctcccaggttcaagcgattatcctgcctcagccttcccaagtagctgggattataggcatgtgctaccacgcctggctaattttgtattttagtagagatggggtttctccgtgtgggtcagcctggtctcgaactcctgacctcaggtgatccgtccacttcggcctcccaaagacctggggttacaggcgtgagccactgtgcccagccaaagttgtgccagttataggcagcctccaagagtttctgtgagtacctatgccctgacagctctggatattgttattattatcttaaaatccttgccaatttgacacgaacagtgaaaactatatagaactttacattttctttcattacaaatgaggttaacattctttttaatgcattttgaatatttgtagttctcttttaaattttctgttcatttcccttacacatttagaaagttgaggttttcatcttttctcattggcttgtaaaagtgctttattggccaggtgtggtggctcacgcctgtaatcccagcactttgggaggccgaggtgggtggatcacaaggtcaggagttggagaccatcccggctaacacggtgaaaccccgtctttactaaaaatacaacaattagccaggcatggtggtgcatgcctataatcccagctactcgggaggctgagacgggagaatcgcttgaacctggcaggtggaggttgcagtgagctgagatcgtgccaatgcattccagcctgggtgacagagcgagactccatctcaaaaaaaaaaaaaaaaaaagtgctttcggtattcaagtattatcataatatgtagaatacaggaaagttcctgggagagggcacagatgaggcagatttgagggcaaaacaggatttcaccaggtggacaaggggtaaggagaggtatatatatatgtgtatgtgtgtgtgtgcgtgtctttgtgtgtgtgtgtgttcatagagacagagtctccttatgttggccaggctggtctcaaactcctgggctcaagtgatcctcctgccttggaggatgccccacatcatagtgatgggatgacaggcgtgagccaccgcgcccagcaaggagggttttctaggcacgggagcagtgtgtgcaaagaggggggagctgtgtgcgtggcaggcactgcatttggtgtgcaaagaggggggagctgtgcgcgtggcaggcactgcatttggtgtgcaaagaggggggagctgtgcgcgtggcaggcactgcatttggtgtgcaaagaggggggagctgtgcgcgtggcaggcactgcatttggtgtgcaaagggggggagctgtgcgcgtggcaggcactgcatttggtgtgcaaagggggggagctgtgcgcgtggcaggcactgcatttggtgtgcaaagaggggggagctctgcgcgtggcaggcactgcatttggtgtgcaaaggggggagctgtgcgcgtggcaggcactgcatttggtgtgcaaagggggagctgtgtgcgtgtcaggcactgcatttggtgtgcaaaggggggagctgtgtgcgtgtcaggcactgcatttggtgtgcaaaggggggagctgtgtgcgtggcaggcactgcatttggtgtgcaaagagggggagctgtgcgcgtggcaggcactgcatttggtgtgcaaaggggggagctgtgcgcgtggcaggcactgcatttggtgtgcaaagaggggggagctgtgcgcgtggcaggcactgcatttggtgtgcaaaggggggagctgtgtgcgtgtcaggcactgcatttggtgtgcaaaggggggagctgtgtgcgtgtcaggcactgcatttggtgtgcaaaggggggagctgtgtgcgtggcaggcactgcatttggtgtgcaaaggggggagctgtgtgcgtggcaggcactgcatttggtgtgcaaagaggggggagctgtgtgcgtggcaggcactgcatttggtgtgcaaaggggggagctgtgcgcgtggcaggcactgcatttggtgtgcaaagaggggggagctgtgcgcgtggcaggcactgcatttggtgtgcaaaggggcgagctgtgtgcgtggcaggcactgcatttggtgtgcaaaggggagagctgtgtgcgtgtcaggcgctgcatttgtggcttaatgctgccattagagattgccatgaacttgatggcttagaacagcagaaatcgatgctctcgcagtctgaagaccagaagtctgaaatcaaagtcccagcccctccccaggctgccggggcagagttcccacttactcccctctttcagtgtctggtggctccaggcattccttggttggtggcagccccagtccaaaccttgcctctgtcttctcttctgtctgtgttttccccctttctctttccatagggacacagcattggatttaggacccaccggttaatcgacaatgatctcatcttgagacccttcatttattcacatctacaaagaatgttttccaaataaggtcacattcccaggtcccaggaattagaatctggacataccttgtgggggggccactactgaacccaccgcagggagctagaaggagtccgatgtcacagggcaggagaataggaccctggagaggtggagcaggtgcagaccacaaagggccttgagctgaggagcggggctgtgtccctaagtgaatggggggcaacacggtctgatttgtgacccggctgctgtggggagggtgctggaattgtccttgtaagagttggtgagggtggggaggagcggggatgcctcacagtgcaggagatgaggggcgggaatgtggaggcatctagaatggctcccaggttccctacgtgtgtggtctttgggaaaaggctgcgtttgaggctcctaaaggtggagatgcccaggagtctgcagacctgacttcttccgggagcaggaacacaattcgggagaggaaggtgatgcgaggttgatggaagctggcgagtaccagtccctgccaccaccaccattttatcatgaacaattgtaagcacacagaaaagttgaaagaattcacagtgaacacccattcacctgctgtctaacgttcccagtgatgatttttatgcgcttgctttatcacacagctgtccatctttccatccctctgaacatcatcattccatcttggtttttttgttgttggttggttggttgtttcgagacagagtctcactctgtcacccaggctggcgtgcaatggtgcaatctcagctcatcacaacccccacctcccgggttcaagcagttctcctgcctcagcctcccaagttgctgggattacaggcacccgccatcgcacccagctaatttttgtatttttagtagagagggggtttcaccatgttggccaggctgttcttgaactcctaacctcgtgatccacctgcctcggcctcccaaagtgctgggattacaggtgtgagccaccgcgttcagcccatcttattttttatgtatttcggagtaagttgcagagagttgtacacttcactccagcatgtcactcactggagcccaacatttgctgaagtgcatgaatctttttttgttcttgtttttgtttttgtttttttgagacggagtcttgatctgtcgcccagtctggagtgcagtgtcgcgatctcagctcactgcaagccccgcctcctgggtccacaccattcttctgcctcagcctcctaagtagctgggacaacaggcgccaaccaccacgcctggctaatttttttgtagccagtatggcttcaccatattggccagtatggtcttgatctcctgacctcagatgatccgcccgcctcggcctcccacagtgctgggattacaggcgtgagcccctgtgcctggccctgtcatctaggttttaagcccctcgtgcattaggtatttgtcctaatgctctccctccccttgccctccaccctccaacaggccccagtgtgtgacgttcccctccatgggaacagcaatttttaagggatgggtagagaaagaagatttcaccaaggagcctgagaaggacggtgacagtcagaggaaaagcaccgaagcggggacgtcagggaagatcacctgggtcagttaccttaggtttgactgcagataatagaaaaaccaagtaacagaggctcaaattgcatttggcactttttctttcttttatgtaaaaacgccccgaggtagaccttcctggggtgggctccactgtgccctcagtgacctggactcccagcttgtgaaaacgtcccgaggtagaccttcctggggtgggctccactgtgccctcagtgacctggactcccagcttgtgaaaacgtcccgaggtagaccttcctggggtgggctccactgtgccctcagtgacctggactcccagctttctgctcagctgtcttcagtggtggcttctatcctcagctcacctcatggttcaggatggctgctggggctccagccatcccatcaactctccaaaccagcaacagaaggaggaacaagggcagtgtggatagtgtacctttcggctaaatcagtctcttccagcagcttcctgcaagttccacacatatccctgtaacatcttgttgtctagaacgtaatcatatggctcacaccatcaggaaaggtgtctttgaactagctgctgggtgcactgccgctccgaatacagtaggatttctgttagtcggcggggaaatggatattggctgccagcagcctttgccttgtctgccttttcttcttttttgagatctggtgcccaagccgctgtctgctcagcatacccacctgtggccgtcggagactgaagcctgtgctcagtaggtccccatcttcctcccccagggttcctgccttctccgaggattggtttccccatcttttctgtaccccttttcctggttggagtctcctgggctctcatggttttgtgggggcagaaatgaaaggggaaggccctggaaatgttcgcaggccgagccctttcgccgcccctgggcctccgcccaccagcaccctgtcctcaggccccctgcgttcagctccatggtcagccccccttaaccaggagggatatggaaggggacttctttggagtgagattcagagggaaagggagggcatttgagacctgggttctgatcctgtgatcttcggcaattgtatgtaaattgggaaaaataagaactgcctccccgcggaacatccaggctggaaggagcaggggatggcagggcccgtggtcctctgctctgatcaggatgaactgtgcatgtggggagactggcagagaccttccctaccgtcccttcccccccgttgatcttggacgatctcccaagtgtgtggggtccattcctgcgacccctgggaattggtcagtgtacaggagagtctgcttggccggctggaatctaaactgtgggcaaagccgcggtccactattgcttattttccctggactccaggcaccaacagggcagcctggagcctcctggagaggaggagggaggagggaggggccggcgggaggctgccttccatcccctcctgtgcttctccagagtgagggggtgtcaccaaacggccaggcccttcacggacccagactcaggccagctgggtgccgctgtgcctcttcctcctccccctggaaggaccagagtcatttcacatcccttcagccacagacacaagtgtcatggtctccagggcactgggccttatgtcctaggtgcgtggcctacacacatctcagtgggagggcatcctgggtcctgcccaggtacgtggcgtacacgcgtctcagtgatggggcatccctgggtcctgcccgggtgtgtggtgtacactcatctcagtgatggggcatccctgggtcctgtggttcttcatacacaaccctgtctagggaaaaaactagtccatgtcccctggcagctgaatggggcattggctcagggacgaggagaggcagccgacagaagcaggtgcagcgagcctaggggaagcgctcggctgccaaaaggccagattgggcagagtgtggccacggccaggcgtcccggtgacctgttgacaccattctccagctgctggttgcctgtgggctggtgtgttgtgacagaggagggaagagctggggcccccgtggagaacttggctggctgggacttggctgaagcctcagacctgagacagacggtgcgatcctctgctcattcattcgctccacgcactttccccgagagcctgccacaggtggggttgtgggtgctggcgtacagtgatgactcagatgctcacctcctgccccaggggctcaaggacaaaggggcaggattcactaaggtgccagggggccaggtgccatggggagggtgacctggaggaaaggatgtctgggcagatggcagggcaggctcagccagcctcccccatcacactgtgcgagatccgaagatgcctggccagggagtcccgcccggaagatacccggggaggtttaacaagcggacgccgccactgggcagtccagtgcgtaggaggctcctgctggccccaaggctgccggcacggtgatcttcgtgtctccaggacgccctgcggtgccagctcccgctggcccgcacgagtgctgaagcttacccctgctctgcgatgagtgtgagaggggtgtccaccccccgctggcggccccagcccaaggaggtccaccacagccctcgggagcaacactgccacgttctccgttgccagtcgtggtgggtcagagctggggagcaaacaggccaaggggcaggggccggtttgtgggagggtccctcctatagccatgctggtggggctggacgcaggggcctttccgaggccgccctcgtaacccttttggaaaatgtgaagccctgagctgctgacctgcacaccccgctcgctgcactggctcagcctcccctcccaaggtgggtgggctccgtgcctgggctctggagcccaagtggtgctggcagccctggggggttaatgcggctcaacttcccggtcgcctttccttccctcctcctttgaaggaagcccacactggggtgatagaaataagcaccggctccgaggagtctgctgtgagcccctgtccctgccaggcctgggcacagcctcctcgcccacgccctgctgccttgggctccgtcctccgtgcggggccttgttctgagggctgagggctcccctcccacactccagaacctgccctggacccctggagggagtgggctcagtacaaatggtacccaaggaggagggccacaggaagtgacatcgaccggccccccccacctccttattccctataaaaagcaaaatggtgactcagagaggagagttggaagcgtcctgcctcttgctcccactgttaatttttacacttggaattaggcagaaggcaaagaaaacagcagcttgaaatacgcggctgacatgctcttcatcgggtagcaacagcagagccgctcctccccgcctcccagcagccccggagcgggcagggcccggtgcctgctggctctcccccgcccctcaccaggcccaggcccccgcacagcccccgcccgggccaggcgtggatggtgcggccggggccatggctgccgggggccgccgccggcgcccactacgctaccagtccctggcagctctggtggaggattctcagtggcctttcttgttccttgtctcagacttcagctacgggacggacgagtacgacggagaggggaatgaggagcagaaggggcccccggagggctcagagaccatgccgtacatcgatgagtcgcccaccatgtccccgcagctcagcgcccgcagccagggcgggggggatggcgtctccccgactccacctgagggactggctcctggggtaggtacaccggcttttctttctgggtttggggaggggtgacgggaaggcctgggcatcgtgggccaggccctgcttgggttggtctcgagagattgggactggagacgtttggacctggccgttcttggtgcctcgtcatctcgtcctggccctggacccctctcaggctcgggcttccctccccacctgctttgccaacgctgccgcccctgtctctccccgtctactagccgtctgctccccaggcctcccagacccctccgtgcctctttcagctttcccctgttagcctgtctcctccagaggacccaggagaggaccaggctctcctcccctctgcacccaggccaggcagtggctgcatgcgtggcccgtgggctccaggtgttcagatgctgctcccgcaaagccagcctgggcctggtgctccctgtgggtgcaatgagctgcccgctccagccctcctctgttcactctggaagggaacaaactctgatggcatccacctctccttgttgacagagacaagagttctgctccagagagaagcattgtagaaggaatattaagtatgtgctctgagacaggccagggatagaaactgtggagggtttgcggtccttgtcattaacgtgttcctggcgacagggactgacgctgtctgagcgcagctcgtgtgtgcctgtcggagacacatgaacgagcaaaacagaggttctgggggttgtttgcctggagctggtgggggagaagaatccaagccggtcctctgtggggggtgtgtgttgcaggaggcggtgggagtgccccatccttgcttggtcctgctcgtccgggtgtgttttgtagggggtctccgtcctgccttctgacgtccccagaggagcagtcgctgagatgccacgggctgcctcttcttcctccaggggctagtgcccccccaccccagctgaggccgcctgaaccctcccattcttgagaaccccctgctccttccagcccccccggccaccctccaccccccacagagctctcacccctcttcacacaccggggtggctgttatagcctttggcaacaagggccttggcaacgggcttcccacttgggggaagccacattgctgccatggcaacagaggccgaggccgagtttagcggcagtccaggcgtgcacctgtgggaagggctggcggggggcaggtgggaggcaagggggccggcgagggggttggtcagtgtgttgttgacctgccctaagacgggaggcgggttagagacaagcgtctcggacctgcgggggcagggtttttgccctggttctcctggaggcattgggctcagggtacaaatagtaacccaaggaggcagagcaggtgttcagggacctgaacgggggccaaccaggggagagcaaggaggagaagactctcgctcccatctctgccttcagctctcaaaccacagcagggctcagagccccgcccggggggactcagctctcaccccactgtgagcagctgcaggaagatgctgcggaatcccggtgtggggccagggtctttgccgctgcctgtccccgcgccacctccctctttgctccctgtccctgtgccctgtccttgtcgcgtgaccaccatgactggtttccgtgtccgtcgattttccgattcctttggtgctggcaggtgccttctctcgggagacagatcacgggcgtcacgcacagatgcccccgcctggcgctccggggcttcggggcagaacttgacttggtggctgtgcgtcttgcttggtggctcacgagggactcacttggcttgaggaccttgaaatccagagatgctagagtgactgccccctaaagtgcttgtggcccccagggttgatgtttacaccatcgactagaagccacgcaaggcaggagtagggagcacttgtccagcctggggatcgtccgggcaaaggtcccatccgcggcacctgccttccctcctcagggagcgtttctgccctttctgctgggtcaccggccccacctagtggactctgcagggattgctgtttacacggggtgcctggagggagctgacgcctcttcctgagtacttggggatgttttggttaaaaacactattaataaaagaccgaggtttctgcggcttggctgtgcttatttggccaaacaggtcccctcccctaccaggcttcctgctggggccttgggaacaggggggacttctggaccaaatcagacaattgttgtagatattcagatatctggcttctggcaccgccttatcgctgggccttccacgcccaaatatgcagccaacgggaagcccaaggttgagtctttgtgttagtcagtgttctctagagaaacaaaaccaacagggtgtgtgcgttatctgtatctatatctacatacgaagaaaagtattagaaggaattgattcaggtgattatggaggcttagaggtcctaatctctgcagtcaatagctggagacccaggacagccaatattggttccagtccaagtccaaaggcctgagagctaggagagccagggatgtaaattccagctcataagccagtggactcgaggctcaggaagagccagtgtttcagtccgagtctggaggctggaggaggccaacatcccagctcacgctcaggtagtcaggcgagaggagcttcctcttattctgcctttttgttaattcaggtgttcagtggattggatgaggcccacctacactggggaggagtctttttactcagtccaccaatacacatatcaacctcatcccaaatgcctcacaaatatgtccggattaatgtttggacaagtatctggacaccttgtggcctagtcaggttggcctagaaaatgaagtgtcatactattattccttcagccacccaggatggaaagcagataagctttgcgcagatgaaaatctattactctcaggctgggcgcggtggctcacgcctggaatcccagcactctgggagactgaggcagccagattacctgaggtcaggagtttgagactagcctggccaacatggtgaaaccctgtctctactaaaaatacaaaaattagccgggcgtggtggcacatgcctgtaatcccagctactcaggaggctgaggcgggagaatcacttgaacctgggaggtggaagttgcagcgagccgagatcttgccactgcgctccagcctgggtgacaaagcgagactccatctcaagaaaataaaagaaaatctactctttagctgtgagacattgggcaagtgtcctcataccgctgagcctcagtctccttgtctctagatagctctaactcccctgaaaggtagtggggaggaggccccactgtgagcagctctcagaccacagcagggctcagagccctgccttggggactcagctcccatcccactgtgagcagctctcagaccacagcaaggctcagagccctgcctgggggactcagctcccatcccactgtgagcagctctcagaccacagcagggctcagagccctgccttggggactcagctcccatcccactgtgagcagctctcagaccacagcagggctcagagccctgcctggggggactcagctcccatcccactgtgagcagctgcaggaagatgctgcggaatttcagcatgaggggaggcctgcagcattaggcctggctcaccaaagtgcacagcccttggccaccagggcccacaagacttttctcgccaggtttagagggctggggagccaacagcattaccactgcaaagaccaagtctgatcaatatctgctgcaccatgaccgaacctgcttttgcaatcaacctcctttctgccacatggggtggccccgggtgaagccgggtctctgcggtgttggcaggacatgctcctctctccccagcacgcccttccacagccttgcactctgcctttgtcttcttttgtgtccccaagacatggatcccacagaggtattagggtgaaacctgaagccctgccccataaaccctgcccaagtccaggctgagcagggcagcacggcagggccaggcccacagaccacgggtggctccattcagcggagactgcccagtttcactctgagaagaaagggccaggactcatctcagctgacaagtgggggtgtaggttcctaaggcaggaccatggtcttacagaaaacccgcctccccacaggccacagactcctctgtctgcttgcctcttgggaagcttagtaaaaaggggctacaaggcagagagaagaactgggttttgtccccactctaccactgtctcactgtgtggcctgaggggtgtcactcatgactccccaccagagctgcagtttgctcatctgtagtgtgaagacactgagaatttcctccctcctgacctcacagggctcaaacctcacagctgttgtgaggtttctgtgagatggtgtttggcagaatgctttgtcaatgtaaaatcgaaacaggggattagactccagcctgcaggagaacccaaagataagggtggaggcgaattgaaatcctcaccattggccgggtgcggtggctcacgcctgtcatcccagcactttgggaggccgaggtgggtggatcacctgagatcagtagttcaagaccatcctggccagcatggtgaaaccccgtctctactaaaaacatacacaaaaaattagctgggtgtggtggcaggtgcctataatcccagctacttgggagactgaggcaggagaattgctagaacccagtgggggcagaggttgcagtgagctgagatcacgccattgcactccagcagccagggggacagagtgagatgccatctcaaaagaaaaagaaaaaaaggaaaaaaaaaatcatcatcattgtccctatcatcctcttcctcctcctccccctcatcacagctgcttagagaggcttgtgctgaacctttcacgtgttggtttcatttaagagccccaacaactctatgaggtaggtgctataaccatctccacattacaggtgcgaaaactggggctcggagaggtgacgtaatttgcctaagattagctgggcatggtagttcactcccataatcccatctacaaggggaactgaggcaggaggatcgcttgagcccaggagttggaggctgagaggtgctaggatcacgcctgcgaataggcattgtaccccgcctgggtgacagagcaagactccatctcttaataatagctattaatattattgtttgtccaagaccatgcagccagtggggcagcgtgttattgaaacttgggtttctatgatgccagagcctgcacagcgctgtcaggtcccgctcacacgccctcccttgtgaagctttcacacccaccccgccgctgatcctactgcagtttgggaggtgtgcacggtcacttgtggggtgcatccgccctgtgagatcaggaccttaatccctgatcatctctgtggaccccagtggaagcttcttggcacctaggggttctcaactggtatttgtggaatggaaccaagtagttctgggatgttcagtcaggaggaagggaggagcaaggaaggctcaggcaataacgctgggaagaactcaggctcagggataacgctgggaggaactcaggctcagggataacgctgggaagaactcaggctcagggataacgctgggaggaactcaggctcagggataacgctgggaggaactcaggctcagggataacgctgggaggaactcaggctcagggataacgctgggaggaactcaggctcagggataacgctggggaggaactcaggctcagggataaagctggggaggaactcaggctcagggataacgctgggaggaactcaggctcagggataacgctgggaggaactcaggctcagggataacgctgggaggaactcaggctcagggataacgctgggagaactcaggctcagggataacgctgggagaactcaggctcagggataacgctgggaggaactcaggctcagggataacgctgggaggactcaggctcagggataacgctgggaggaactcaggctcagggataacgctgggaggaactcaggctcagggataacgctggggggaactcaggctcagggataacgctggggaggactcaggctcagggataacgctggggaggactcaggctcagggataacgctgggaagaactcaggctcagggataacgctgggaggaactcaggctcagggataacgctgggagaactcaggctcagggataacgctgggagaactcaggctcagggataacgctgggaggaactcaggctcagggataacgctgggaggactcaggctcagggataacgctgggaggaactcaggctcagggataacgctgggaggaactcaggctcagggataacgctggggggaactcaggctcagggataacgctggggaggactcaggctcagggataacgctggggaggactcaggctcagggataacgctgggaagaactcaggctcagggataacgctgggaggaactcaggctcagcgataacgctggggagaactcaggctcagggataacgctgggaggaactcaggctcagggataacgctgggaggaactcaggctcagggataacgctgggaggaactcaggctcagggttaacgctgggaggactcaggctcagggataacgctgggaggaactcaggctcagggataacgctgggaggaactcaggctcagggataatgctgggaggactcaggctcagggataacgctggggagaactcaggctcagggataacgctggggaggactcaggctcagggataacgctgggaggaactcaggctcagggttaacgctggggagaactcaggctcagggataacgctggggaggaactcaggctcagggataacgctgggaggaactcaggctcagggataacgctggggggaactcaggctcagggataacgctggggaggactcaggctcagggataacgctgggaaggactcaggctcagggataacgctgggaggaactcaggctcagcgataacgctggggagaactcaggctcagggataacgctgggaggaactcaggctcagggataacgctggggagaactcaggctcagggataacgctgggaggaactcaggctcagggataacgctgggaggaactcaggctcagggttaacgctgggagggactcaggctcaggcaataacgctgggagggactcaggctcagggataacgctgggaggactcaggctcagggataacgctggggagaactcaggctcagggataacgctgggaggaactcaggctcagggttaacgctggggagaactcaggctcagggataacgctggggaggaactcgggctcagggataacgctgggaggaactcgggctcagggataacgctgggaggaactcgggctcagggataacgctgggaggaactcgggctcagggataatgctgggaggaactcgggctcagggataacgctgggaggaactcgggttcagggataatgctgggaggaactccggctcagggataacgctggggaggactcaggctcagggataacgctgggaggaactcaggctcagggataacgctgggaggaactcaggctcagggataacgctgggaggaactcaggctcagggataacgctgggaggaactcaggctcagggataacgctgggaggaactcaggctcagggataacgctggggaggactcaggctcagggataacgctgggaggaactcaggctcagggataacgctggggaggaactcaggctcagggataacgctgggaggaactcaggctcagggataacgctgggaggaactcaggctcagggataacgctgggaggaactcaggctcagggataacgctgggaggaactcaggctcagggataacgctgggaggaactcaggctcagggataacgctgggaggaactgcagcctcttcttccctttcttggtctcttcagaaggcttagggcttgggattcgaggttgctggtaggtgcgtgaagaggcggcatggcagccaggaactcctgagatggtgcctgctccactccctcctgactgctccggacctgggttgtgtggttcagggactcctcgagtttcagcctccgccccccagcagccggcccctgcatttctccccttcctggatcttgggtccctgctgcaaagagaaggacacgagctggaccctcccgtgtgccaggtgctgtgctaggagcccaggggctgccctgccacccaagtcctccagccatggggctgcccccgtttagtagatgaagacactgaggctcagggtggctcctgggcttgtcccagttgggaaggaggtaagtcggaagtaggtagactagtgccttggttgtgaccctgggtcccgtcatcgctggctcccgtcctctctggccctcctacattcacacctggctgggatcttgctcacctctgcatactgttaatcttccctgatgaaccacacctggctggcctggctcatcccacagctctcacgccctgtctgggatctccgtcttctggctagctagcagccctagagttgatgccgtaattacccccattctatagatgaggaaacggaggcacagggagactagatgacatgcccaggtcacacagttggcaagaggcagagctggggctcacatccagagtgcaggggagttttctttctgttttagtttatttgtttcactgtataaacagtgttgtgtaccggcttctcctcaacattagctttattttattttatgtaatttatttatttgagatggcgtctccctctgtcacccaggctggagtccagtggcgcaatctcggctcattgcagcctccgcctcctgggttcaagtgattctcctgcctcagcctcccaagtagctgggattacaggccaccacatccggctaattttgtatttttagtagagatggggtttcatcatgttggccaggctggtcttgaactcccaacctcaggtgatccgcccgcctcggcctcccaaagtgctgggattacaggcgtgagccacctcgcccagcctatgtattttatttttttgagacagagtctccttctgtcacccaggctggagtgcagtggtgtgatctcggctcactgcagcttccgcctcccggggttcaagtgattcttctgcctcagcctccctagtagcggggattacaggcacccgccagtacgcctggctaattttttgtatttttagtagagacggggtttcaccacgttggccaggctggtcttgatctcctgacctcaggtgatctgcccgcctcggcctcccaaagtgctgggattacaggcgtgagccactgcatctggccaacattagctttatgtagttgaactatgtatatgattttggagtgacctgtactagaacagagaggaggcagagggaggagcaaggtgatctggaaggtgacgaatccagtcccatctgtggctgcagttagtggctgcaactgccctggcacttgccctttggtgtcagttcccattggctgaagagctactgagcttcatacagtctggaggtggggcttgagtttctgccaggaaagctgggagagccagggagaagccaagaggcgggagaaagtgcttcaagccgaggacctgccgttgttaaaggcctggaagtgagaacgtgccaggccctttgagaggttactgtcaacagtgagatgggtgagtcatcagctggggccccacggctcttgtttgggctggcttggtggcttcctgctgggcatagagtgagcagtgttttagaaagagtcatctgatgtcagcaggagggatgcaggatgaatgtcctgtcacacctgtcctgaaatcctccagcaccttcccttcgcctatggggccccccttccctttgcacagctgtcaaggccttgtgtgacctgacccctggaccccctgcctacctctgtggcctcaggaccaactccgtgctagaattgtgaactctcacgagagagagattttgtcggttttgtaacaaaacttgctcattgcagtctctggtgccgagaactgtgcctggcacacagtaggtgctcagtaaatattagctgaatgaatgcatgaaccagccagactaaactcatgtcattgtgcctcacatagtctctctcctgtctgttccccagccccaccagcatctctaaccactgctttttttttttgagacggagtctctctctgtcacccaggctggagtgcagtggcgcgatctcggctcactgcaacctccgcctcctgggttcaagcgattctcctgcctcagcctcctgagtagctgggactacaggcgtccaccaccacgcctagctaatttttgtatttttagtagagacggggtttcaccgtgttagccaggatggtctcaaactcctgacctcaggtgatctgcctgcctcagcctcccaaagtgctgggattacaggtgtgagccactgcgcccggccataatttttttttttttttttgagacagagtcttgctctgtcgcccagactagagtgcagtggtgtgatctcagctcactgcaaccactgcctcccggattcaaggaattcttgtgcctcatcctccagagtagctgggattacaggcctgtgccacccctcctggttaatttttgtatttttagtagagacagggttttaccacgtagaccaggctggtcacgaactcctgaactcaagtgatctacctgcctcggcctcccaaagtgcgggattaaaggcgtgagccactgcgcccagcctaattttttttttttttttgagacagggtctttctctgtggcccagtctggaacacagtagcacaaacacagttcattgcagcctcaatatcctgacccaagcaatcctcctgcctcagcctcccaagaagccgggaccacaagagcatgccaccacactcagctaattattttttaaaatttttatagagatgaggtcttgccatgttgcccagctggtctcaaactcctgggcttgagtgatcctcctgcctcggcctcccgaactgttgggatttcaggcgtaagccactgcacccggcctatatgtatagtttattcgtggacacaaataaggaaaaatgtataactaactcttagaggctccctctgtcagagggaaccagaggagactttctctttctttattatgtgtgtctacagagttagaattgttagtgatgtaacaggaaaataaagaagttaaaatagaagtgccacgattgggaacgtagagtgggctctgagggcaccagcgggcacatctgacgcagccaacggggagtcacgggaggctccctggaggaggtgacgtttaaagtcgaatctaaaaataagcagtgggccaggtgccgtgtctcacacctgtaatcccagccctttgggaggccgaggcgggtggatcacctgaggtcaggggttcgagaccagcctggccaacatgatgaaaccccatctctactaaaaatacaaaaattagccgggcctggtggcgggttcctgtaatcccagctacttgggaggctgaggcgaaagaatgggttgaaccgaggaggcggaggttgcagtgagctgagatcatgccactgcactccagcctgggtgacagagcgagactccgtctcaaaaaaaaaaaaaaaaaaaaaaaaaatcgcaataggtgtttccatgttatcccttccagaaaagtggcacctcagctgcagagttctgacactgctcccctccccagtacggccttgcccctcccttgacactgccttgggagtcagtcaccaggtcaatctgtccctgagactgtcagctccgcgagggtaggcacggggttccctgtccatggctgcattccgatgctagcacactgcctggtgcacagcaggcggctaacaaatgcttgctgattgggtcaggcggttaacaactgcttgctgattgggtcaggcgttaacaaatgcttgctgattgggtcaggtggttaacaaatgcttgctgattgggtcaggcgttaacaaatgcttgctgattgggtcaggcgttaacaaatgcttgctgattgggtcagggaaggagggaatggagggtgggtgtgggggaagactgtggggagtcaaccattggagactgagatttagacttgatggtgtcagaaatctcagtggctgcgaaagatttcaaacagtagctaggtgtggtgtgtgcttatgcccctcaccctccatgatgctgttcagcccacttctccaagttcatcttctgtcctctagcaagcagcgcttcttaacctgccttccttcctctcttccttccttccttcctccctccctccctccctcaagacagagtctggctctgttgcccaggctggagtgcagtggtgcgatcatagctcattgcagcctccaactcttgagctcaaacgatcctcccacctcagcctcctgagtacctgagatttcaggtgcgccactgcaaccgggttgctgaagctgcttaaccctttcctttcgggccttctcttctttgcctggaaacccttccctatttccagatgctactcagaagccactgtcctgtgaagctttcactctcaggcagcgttagtgccactgtcctccatccccagggtggctggtaaacgagaacactgcctcgtgtgttcacacgtcctcaccccagacggatcgagagcctgagaacggcaagggccccgtctcccagcctcgtatgtgtgccatgccaggccttttctgggtatgaatgaatgaatgaacagacagatggacagacaagatcaggagccaaagtggggaagtacgtgtggtcgtgtgggtgtaagaggctctaaagcttggtggggtggtggctttggcaaaggaaaagaagaaccgaaggacttggtaaaagggatgtgggggttgagggaaggaagactcgtaagatggcggccgcactaacagaagtggaaacccggaaggggaagctgtttcagaaggaggaagggtcctttggtccagatgtgtggagtggaagggccgtggctgggcttccaagtgaggagacccagtggccggggcaggtgctagacctagagcccagcaagacaccagggctgcagctggcagcgggccaccactggcctggaagggagaagggctgcttctctgggggaagggagcagagggctgaggctgggcccaagcaagtgactccacatttacaggaggcgggagaatgaagggccagcctacaccagagagtggtcggggcagtgcctgcatcaacagggcagctgagggcttggagaaactctagactgcagaggccaaagagtcggagagggaggcctctggctttggaataaaccgtttgggggggcctttgaagcaggctgcttctatggagaacattaggagccaggccgaggcagatggagtgtggagctcaggtccagggctggctcagggcatttgtcagggaaggggagggaagctgtggggactggtgagtcacttcccctccaggggggcaccgagggcctgtgagtggagtctgtgtctgatggaggggcactctcattactcactggaatttccagccaccggggacagggtggagtagagaggccctggatactcagggagtcacttgtgtggggttcagggattttgggaagaagtgggcgtcagtctcaccatgccgtgtagaggtgtggggaacggggacgaggatatcctggcagacttccaagggcacctcatgtcctcttgagtggaggaaggaacacagcaggggcctgtggggttttaggcccttcttcgtgtcacctgcaggtctgactcatgtgggcagcccatgccatgcacttggagcccgccgggcgggagacagaagaacccgtggtaccaggccctgagctggcatacttgtgccctggggaatgccaggcctggtcgttcccaagccctcgccacagcctcacccgcccgcaccaaatgaggaattgtggctgaaagggcccttcagatgcgccctggctatttataacccacccaggcagggacaggggaaaaccaggggctggaaggagatgggtggggtgggggtgtgcctctgttgaaccctggtggcacagttccctgatcaaaggctgttagccctggggcccctcaagggctcaccccgcaatcccctgctctgtatttcagctctgcaacaggatggagcctctctccagggagggcagcttctctgctgccaatggaattgcatgagccccacctagagcccagagcttctgaagaattctggggggagtggggggctgtggcctgaactcgggccacaggtgtggttcatttagacggcaccatgttgttttaaaatgttaattatttgccatcgttttaaaatcaggagcattcctgttaataagccagattttagcttattttgaacagagatcaggcagccatgagcttgcgtttcctccagcagccatcggctggagtgagtggtggtttcaccctgccctacctggctcgcttcaccggctggcctcacccgcaggcctcacccgcaccctcatgggtgccgtttgcaacctttgctccatcgttgggttgtaaaagagcttttcccagggcctcctctggactcctcctcccatggaaggaggtgtatgtgcatctgggaactagggccagggggaccagaatgtggcctcactccctgcacagttgggggttctgcaaccattggagaagccaggggaagctggctgggagtgggcagggccggagatggtgcctgtcctgggttctgtgtgcactccccttgcaggatggctccctgcggtggggtggctgggggggctgcttggaggaggtgggggtgctggtctcagcagtgcctgtgagtaggtgggaggctgctcagaggaggtgggggtcctggtctctgcagcgcctgtgagtaggggggctggtctgtgagtgggggggctgctcagaggaggtgggggtgctggtgtcagtagcgtccgtgagtggggggactgctcggaggaggggggctgcttggaggagggggatcctggtccctgtgagtgggacgcccaccgctcctgtgcaggacagtggtggcgccgcgctcctgcctgggggcaggtcaggcctgtctgttgcaaagcctgactcctccagcggcggcgggacgcggctgtggcttctgggcgggccggggcctcccctccggaagggggctccggcgcatggggactccggggtggctctgggggtcgcccctgctcgccgggctcctggctcggccgcgcgcggggaatgaagatgcgtctgggaagcggcctccccgctccaccccaccccggcccggccgcggcctcctcgctcctcctccgccgcagaagcctccgccagccgcggccccgcaaccccagaggacgggcggctccacctcgcgacgcgcgtttcctgtgtgttcggagcgagcgcgagcccgagccccggagcccgggaagggcgggccctgcggggccgggcgggacacggaggagggcgctgggctgctgtgcggcgggttcgcctccgccacgggccgggcacggcgtcaggggctgcccgggccttgctccccctttcgccgggcgaggacgcgcgaggcggcggcggcggcggcggagcgggctggactaggtccgggatgcagtcccgggtcgggagccccaggccgggcgcgcgggtgtagacctgccccccctcccgcccgcctcctccctcctccctcctcccgccgccgctgcgtggaccccgcttcctgtctgccctccgcgggctccggctgccatggaggaggaagaggaggcgataggcttgctggacaaggttctggaggacgaagatgtgtttctcctggaggagtgcgagctgggaaccccgaccagccccggctcagggtcccccttcctggtggctgtgaaggtgggagcgtgacacgccctgggcgctggggggggccgggccggcgctgccgaaggtgcgcgggagaaatggctgatgcgggcgcagagcgcgcggccgggtggaagccctcggcggagggtcccggccccggcagctgttcccgggggagaggggcgggcctgcctccccgaccggtgtcctcggggcagtggtggccgccccctccaggccagcccagctcagggctccggcggctgtgccaggagtcacctggcgcgcctgtcagcccgagcctcgccgcctccctggagcgggtgggcaggaatcccccgtttccacggcaaccgcaagagaggggccaccctcttcccagccaggagacagggacttggtgtctccgagctgaggcaagagggtgtttgcaaagggcaagagccagaggtcactgagcttccttgaaggaaaagcactgggtcagctgaaggggggagggaacagctggcttggaggctgcagccaggtgggcaggtgcccttcccgaggcgggacaggcagggagcatctgctgggccctggcccacccgctctggggctgacggcgttctctgcagcagtgacccgtcctgtaggagaggttggctcccggtggaactggagggcagtggtggccagaatcccttgaggagcggggcggccccggaaccacgccggctctgtgagtctggcccggcacaccacagcggtcttcctttttctctcctggacacacctctcagagcttccacctcagccttttgctcagctgctctctggttctgtgtcgagaagggaggcccagtgaggatgcgtttcggggagtttgcagactgctaggcgaggctgcctaaccgagtgcccatcggcggggcctagaaggcatgtgcagccagcattgctggggacgggaggctgtccctgaacctctctgggcctccctgcccctcacagaagatggggatcacagtcctgccccacccactctacagtgtggctctgaggaggagccaatggaggtaaaaatagatgcagaaccacgggagatggctgatgtgtgagtatgggtggagcggtggctgcaggcctgggtggggagtggagctgtagggaggctggcagtggctggcaccccaccctgtcttctctgatctggtgctggcgtagggccgtgggggtaagtcacgtctccccgtgggctcagggaggcctctgcacttagggtctgaccagcctccccactaggaacagggtgggaaagtctgctcctgagccaggagtcaggctgggagtagcaatgctgggatgggaggtgtgtggccctcatgggcctcctctgggaagcccccagcacagatgtgggcccactcagaggctgcctcctggacctccccttctgctggaccccggcgtatgcctcagctaagcccgtatttcattctgctcagatgctcagaactctagacatttgcctccgcaattatatcccattctcctggaggaccaggaccatgtcatattcattgctgaacactgcacagtgcttggtgtggggctggtgcctgtgagagtctgcacaatgtgtgaggcccgctggggcccacgaagggtgcaccaggttcccagcctcgctccatctcagaggtgtcctgctgtgtacggcggtggcccacggatgccaagagagcctgagcacgtgtcacacctgaaaacgctgctcctcctgggtccccgtgagcaccgggatggtgtcttcccctctactttgctgccagcatgggggaaggagacctttctcgaatgccggggagttccaggctccctgctccatcctgaacacctctagaattcctccctcctctaccggcattggcctcagagggagaagacaagcaggtggccacagagcggtgggaagaaagctcctggattcattcaacaaacactctcaggttaggtgctcttcagagcaccctgcctggcactgtagagatgacaagaggaacaaggcgtgatcttccctcacaaggcgttcagagcaaggggcaggtacagggagtaggaatagagtacggaagtaggcagggtgggccagatgcggtggcacacgcctgtattcccagcactttgggaggctgaggtgggcggatcacctgaggtcaggagttcgagatcagcctgaccaatatagtgaaaccacatctctactaaaaatacaaaaattagccgggcgtagtggtgggcgtctgtaatcccagctactcaggaggctgaggcaggagaatcgcttgaacctgggaggcagaggttgcagcgagccaagatcatgccactgcattccagcctgggcgacagggtgagactcagtctcaaaaaaaaaaaaaaaaaaaagactgtgagaagagtactgataaaagggcaccaaattcaggggagaagggaccacttctagtggagttggggatggcctggatgcgtgcatgtgtgtgtgtgtgcaggccaagggtcatttctggatgatacactcctgtcctgggctgcagaggttcttggcacacccttccctggcagctagtaggaatccaaggcaattctctttgctattactttactttaggggtacttaccttaagcagcagttgcgttgtgagcatgtgcccaagtgccaggcccataaatcaatcctgtttccagtgtcatttccaagacgcttcatcttcctggggggcagaggtaaagttggctgcagttttctccaaagctatagctggagtttgctgcatatctcagcccagacttacctttgaagagttattgatctgtaaaactggtaatgcaaataaaatactgatagcagcgtcatgttgcatttgtaaaatggcttacacttgccaaaaatgtttcatgccattctatttaaagataggtagggttgtgacgggggcgttgtagaaggtgctattttaaggaacttatttgtcaggaataaaaacccttttgtaatgcagattaaccctttaggtatcattctgtgccatttttttttttcttttgagacagagtctcactctgtcacccaggctggagtgcgatggcacaatcatggctctctgtggcctccacctcccagactcaatcagtcctcccacctcagcctccccctcactacaggcacatgccaccacgttgggctaatttttatatttttgtagagacagggtttcaccatgttgcccatgctagtctgtaactcctgggctcaagcaatctgcccctcttggcctcccaaagtgctgggattacaggagtgagccactgagcccagcccaattctgtgccagtttttaatggatcatctgaaacatctctatttctgtttcacctgcccaggtctcttgtgcctgcacatcatgcctgtatcccccatttggatgtttttctaagtgcgggccccacgtggtgatttgagaaatgatcggtggcacctcgatctatattttgcattttaatggttaagtatatattttaatatatattagaaaaaatatgacctgtacatttttcttacgatttcaaatacgtgtagggtaagactgctttttacaagtcagttcttgggcgcagtggctcatgcctgtaatcccagcactttgggagactgggcgcggtggatcatgaggtcaggagttcaagaccagcctggccaacatggtgaaaccctgtctctactaaaaacacaaaaagtatctgggcgtggtggcgtgcacctgtaatcccaactactcaggaggctgaagcaggagaatcacttgaacccgggagatggaggttgcagtgagccaagatcctgccactgcactccagcctgggtgacacagtgagactctgtctcaaaaaaaaaaaaaaaaaaaaaaagttactgtaaagaacaatattgagtaaagaatagtgcaggtggtggtatgtgagtatggcaaaattttaagggtgggatatgaacaaccaaagtttcaaaacattgcctgtgccctatggtgcctgcctaagacctcagacagcaatagggagcccagaatacggggatccacccttcaggagagaggggccactggaatttggtctttgtcccccagcagttgacccgtcttctctgttctaaattctgccaaggaagcagctgaaagagacttcctcagcgcctagcgctgggagaggagagggtctctcgatgcctctacactgcctcagctgtcctgagactgagatgggccagttgtcctgaggttgatgcttggtgtgggtataagccccaggcacggccacccccacccccaggcccagtggcatctactctgagcagatcctgctgggtactcctggcagccagctgtggcccgtgaactgacttctaccgtctgtgaagcctcagaccctcgctgcatgccctatagccttgagtcgcagccagagagccagccctgcttgttgtcttggaggccagtgctactggagagattgtgtctttgcttggcctggaaccagatgtttggaggctttatttagcctctcaactctgtggaggaccaggcctgagctggccacgccttatctctagacattgttcctaccagagtgacctgacgtctttggtttggcggcttcaagctgccacactgtcagcctagcagattgtgcaggatgctgaggataaacgaacccaccaggactgcatttcacaagttctggctgggaggaagtgaggacaggcagcttcccggtgctggagacaggtaggcagcgtggcagaggctgtgggacctggaactctttagagaactcgctccggagcattctaggcacgtgggcacctctccttcaccttcgtattcccagtgcctggctcccggtgggaatgggtgagtgagtggtgagcctggtttttgatgagacaagagacgccctgcaaagactgaagaaacaatgtgaatttcctcatggctctaaactgggaattgtggagtctgaggaaagctggaaaagatgggagatggaacaggccttcctttggtggtgactgagcaacgggtctcctgttagccaagtgcaccgaggctaatttcccatccgtacgctctccaacgcctttgctccaatctcagccaaaactgcagcgtgaacggggcccagagcaggactcttggggctgactgttgcctcttgagggagggtcttcctgagttgtcttcccatcagaaccagcctttcaagagtggactatgaatggaagtcttgaggggaggatcttgcagaaatgggcgattacagggcttccagggtctatgctcgtgccaggggggatgaagcttgtttgtggctggggctgcaaatccctttcttccccccatcctagtccaaccagctctacagttacagctcacggtgtggcatttgctaaaccctcaggcaaaaccttggttggcagggaacaggagggagtgctagcccccagcacaggggatgagttcccatttgtcaaggctgggaagcagcaggaagacccctgagggtctgacctggaggggctggagctgggggctgttccaggctctgatcttgtcccccggggctacgtgtgctggaggctgtgcaggcctctggcagtcccgactctcggtgcctcaggaagatgataacacctgccaggttttgagactccggtgaattgaaccacaaagatagctaagctcagttcctggaatttgtgaagccgccaataagtaactattgcccttgcctgaagcgtggggtctgtcttgcttttctaatgctgctgaaacaaatcgccacaaacttaagggcttaaaaccacacaaatttattctcttatacagaaatctaaaaaggatctcggcccggctccatggctcacacctgtaatcccagcactttgggaggccgaggcgggcgcatcacctgaggtcaggagtttgagacgagcctggccaacatggtgaaaccccatctctactaaaaatacaaaaattagtgggtgtgatggtggacgcctgtaatcccaggtactcgggaggctgaggcaggagaatcgcttgaacctgggaggcagaggttgcagtgagctgagatcatgccattgcactccagccctgggcgacagagggagactttgtctcaataagtaaatacataaataaatagattaattaaaataaaaaggatctccagggctgcattgcttctggaagctctagggcaagcttttccagcctgcggccatacggcccaggactgctttgaatgtggcccgacacaaatttgtaaactcttaaaacattatatatttttcttttagttcatctgctgtcgttagtgttattgtattttatgtgtggcccaagacagtcgtcttcttccagtgtggctcaggggagccaaaagatcggaagcccctgctctaggggagtgagttcattttattgccatttccagcttccaaaggctctctgcattccttagctcgtggccccatcctctgtcttcaaacctaccagtgtagcatcttccaagcagtccctcaccactaccctgtctccccggccctctcactccccttctgtggccacgatgcctcagggaaagatggcattttaggcagcaggtaaagaacgaaccgaaagctagagacctttgaagatgaggaggctggttctcctgcgtgtgggggagactgagcgatgtcctggctgtgggaaagactggaagggtagggacgggcatccgggccactgcaggtggctcataaaggatatggtgggccccatgtcccagtctagggccgaatctttacttgttttttaaatgtctttccggcagggtgcggtggctcacacctgtaatcccagcactttgggaggccaaggcgggcggatcacgaggtcaggagatcgagaccatcctggctaacacggtgaaatcccggctctactaaaaatacaaaaagttagctgggcgtggtggcgggagcctgtagtcccagctactcgggaggctgaggcaggagaatggcgtgaacccgggaggcggagcttgcagtgagccgagatcgcgccactgcactctagcctgggcgacagagcgagactccgtctctaaaaaaaaaaaaaaaagaaaaaataaatgtctttcccactagagtctaagccacttgagaacaggggccactgtctgtttcccatggtatctatagggcctggtggacattcagtaaatatttattgaatgaataaataaatggacacatagcccagtggaatccccaagtactcgcgttttgcggtattcatactcggtccttggcaagcatcgggcaaggtggcactcttaggagttgaatccagctctggtgtgtgggacaggcaggaggagaggaagagagggaggaaaagtcggttcgagaacccaggtggaaaatagattgagggaagcaaaacgagatgttacaggaggaatatgggtgattgtcttttccttttatatttctgcatgttttgtatattttttataataatatctgacttttatcccctatgaaagtgtcgcttaaaataaaaggaaaggggaaaggggggccgggcgcggtggctcacgcctgtaatcccagcactttgggaggctgaggcggacggatcacctgaggtcaggagttctataccagcctggccaacatggtgaaaccccatctctactaaaaatacaaaaaaaattagtctggcataatggctgggcatggtggctcacacctgtaatcccagcactttgggaggctgaggtgggtggatcacctgaggtcaggagttctatatcagcctggccaacatggtgaaaccccatctctactaaaaatacaaaaattatctgggcatggtggcaggtgcctgtaatcccagctactcgggaggctgaggcaggggaatcactggaacccgggaggcggaggttgcagtgagccgagattgtgccactttacttcagcctaggtgacagagcgagacttcgtctcaaaaaaaaaataaaggtcgggggggaagggcagggaagcagaccgtccacgcagggttttggcctccttgctcatgagctgttggctgtgctttgcgtttgtgcaggtggaagcagggaaaggcctggagatgaggaagctggttctctcggggttcttggccagcgaagagatctacattaaccagctggaagccctgttgctggtgagtacagtccctgctctggggccttccggtccccccgcccgtgttgggtgatgtcatgctctgaagctgcttttggagttggagaggaaaggggaccgtacccgtccctccctgtggacagagtctgcagctggtctgcttctggctgggcatcgggcagcccgggtcattgccagaaagggcctgtgcctctcagctccagctctcaaaaggcaggagaagcacacccggcttagagatggcaaacacacctgtcacccacgaccctggcatagggcatcgtgaacccatcatggtgctctgcctgcctgggcgggggccgagcgccttctccacgctgtgctctgggcagtcattcccaatcaatccagttaagaagtctctgccgtcttgtgtccaagtccttctacctccctgggtgagggaaccgttagtgccatcctgaggccccgtgtcaggaaatatgaggtgggaggctgtgttctttttttttttttttttttttttaagacggagctttgctcttgtcacccaggctggagtgcagtggtgcgatctcggctcactgcaacctctgcctcccgggttcaagtgattctcctgcctcagcctcccgagtggctggaattgcacgtgcacgccaccagtcctggctaatttttgtatttagtagagacaggattttatcatgttggccaggctggtttccaactcctgacctcaggtgatctgcccgccttggcctcccaaagtgctgggattacaggcatgagccactgcgcccggcctgtctgtgttcttttgagaagcggcacagctctgaggcatcaggccaagctcagccctcggtaacatgcctcagttcccctcccagatggaggcatcgttgtgagagtctgattgggaggggaatatgaaaatgttttcggaagataaaagtactacacagatgtgaggtggttttgccttggaagaaagtgctccttagatgtgtctggatgttatgcagagtgatcgtggcgtgtcaatctttcttttgggtattttgcagcctgagacataaggtaattgtcagaaaagggagacgcagaagtgtggatctgtggaagctcattcttaacaagaattctaagatgcacatttaagtacttgccatgacgtgaggtgttgtcacacgtcaaccctgagatgctgtcagtgtcccaggggacttgacatttatgttacccaggaatgactgtgtaaatgtgcaggtgcaggccgggcgccgtggctcagtgcctgtaatcccagcactttgggagccccaggtgggcagatcacttgaggacaggagttcgagaccagcctggccaatgtggtgaaaccttgtctctgctagaaatgcaaaaaaaagccaggcgtggtggtgcatacctgtaatcccagttactcaggaggctgaggcatgagaattgcttgaatctgggggcgaaggtcgtagtgagctgagagtgcgccactgtactccagactggacgacggaagtgaaattcctcaaaaaaaaaggctgggtgcagtggctgacacctgtaatcccagcactttgggaggccgaggtgggtggatcacctgaggtcaggagttcgagaccagcctggccaacatggtgaagccccatctctactaaaaatacaaaaaattagctgggcgtggtggcgggcccctgtaatcccagctactcaggaggctgaggcaggagaatcgcttgaacccgggaggtggaggttgcagtgagccgagtttgcaccattgcactccagccggggcaacaagagtgaaactctgaatgtgcagctgttttgccacacgccaggctgagtacgtcccatctctccaggagtttatctgtgtgtacggagctgttttccaagtgaggggcagtgtggcaggtagctgagggtcctggtctggggccagagctagggcaagacttggccctgccattaagagcaggcgtattgcactgtttctcaaactgtgcctctcagcccatcagtgctttgggttgtgaaatcagtacagtgggttgtgaaaccagtacagtgggttgaaccagcatttttaaaccaatgaaaaaatgtcagcatgcatcatacacgggaaagataagtgagggaactttcggtttgttgtctgtctgtgtgcctgtatatatatgtaattgccgggcccatggtgtcttacacctgttgtgggtttgaaaactgctggctttggccgggcgccgtgtctcaagcctgtaatcccagcactttgggaggctgaggtgggcggatcacaaggtcaggagatccagaccatccttggccaacacggtgaaaccccgtctctactaaaaaagtacaaaaaaaattagccgggcgtggtggcgagcacctgtagtcccagccactcgggaggctgaggcaggagaatggcgtcaacctgggaggcggagcttgcagtgagcagagattgcgccactgcactccagcctgggcgacacagtgagactccatcacaaaaaaaaaaaaaaagaaaagaaaactgctggctttgggcaagccctacataaattccttgagcctccatttctggatctgaagatgagagggatgccattctttctctctctttccatggggttgagaagatcgggagatgctttcgggacctcatacagcgttgagttacttaagacactcaactgttagtggaagaaaggaggacaggcaaagagacaacccgtcagacattcgtgaaacacgtcttccaaaccgtgaattgctgtccaaaaaggaacatagttgtcattactaacagggtgtgtatttgaaaggagttcagacagaggatctagactgcctggccgtactggctccaggctttcagcaggtgaatgagctatcgtgcctcagtttttccatctgcaaactgggtatacaaatagtatgcttttcatggggtcgttgtgaggattaaaggaatttatacacagagttctttttttttttttttttttgagacggagtcttgctctgttgcccaggctggagtgcagtggcacaatctcggctcattataacctccgcctcctgggttcaagccattctcctgtgtcagcttcccaagtagctgagattacaggcacccaccaccacgcccagctaatttttgtatttttagtagagatgagatttcaccatgttggccaggctggtcttgaactcctgacctcaagtgatccgcccgcctcggcctcccaaagtgctgggattacagatgtgagccactgtgtccggcacataaagctcttagaacacagcctgagtgttcgttgacactgttaatttctctattgctgggagaggagacaggttagggcttcgtggtttctgccacaacacacccgttccctgaaggagggagtggcgcctgtccccatcagacacggagcccttagatcccacctgccacccacgagcctcttcctctgggccaagaccaagagcccctccctgctctgcctttctaacagctcatgccccaaaggcagaatctgtggggcaggggcccccttcctgatatgcctggcgcaggttccccccttccccagctgtctcctcccggggcaggttccccccttccccggctctctcctccccgggcaggttccccccttccccagctctctcccggggcaggtttccccccttccccagctgtctcctcctggggcaggttcccccattccccagctctctcctggggcaggtttccccccttccccagctctctcctcccggggcaggttcccccacttcccccagctctctccacccggggcaggttccccccttccccagctctctcctcccggggcaggttcccccccttccccagctctctcctcccggggcgggttccccaccttcccccagctctctcctcctgggcccctgcttggctctttcttgagcagagaccagagggagcaaaggaagaactcgctgggaggccaggtctgtggtaggagggctcaggaagaggagtaggaccctccacagccacagcctcagaagaaaacctcagagtgaaagaatcacacccttcctcctctcctccctgagctgggaacccctgcaccctccccacccctcagctaggaggaagctaaaccttctgctcttcggggtggcctcgcaaaggtgccagcttgaaggagaagaaattcgttccctccatgctcgctttcccactcctgaccccattcccaccgctctgccccagcctgtttgctttcatctgaacacttcctgatatgcaaagggctgggtgtgtgtacctaaaaccatgtgcacacacggggcagacgagcctccacacagaagcctccgtcctggcctctggggtgcttgtgggggtcatcttctggggccctcctgcttcctggtgggctctgattacaggaaaagcctgggagcctgggccgaagtagggggtgaaggaaaaaagatgaagccaactgcattgaaattctggatctccttgacactgggaactgagcttgggaactgtgtcttgctacgctggggccacagggtgaggccactccccagagcccctcccaccgctggccacgactggccctcctggggtggactcctggccacgctgcatcgcaggctctttatctataaaacaggtgaatgaggccttcctccctgggctccagtgacgagtgactcgggtggcatggcagcaagcatgccaggccttctggggcaggaggtggaggaagtgggtacatttctttcccttatttcgaaaggccggtcgctgggggacagagctgacaaacggctatgtgaagtcccactggcaagtgagaaccggcccaggcccgtcttcctgagaagcagctggtatgggagccagggttgaagtcactcacgggtcctctccgagaactcgagtggtgaaatggagagccggggcctgcccttgtccctgcagcaggactggggaggagggggtgcctgagtggtgtgctagcgctttggcagaatggctgtgccgtgccgaagctcagtgtgggtcaccttgcctttcagtccaccctcctgcccctgagcccatacgcaggacttcaccagagacaaataacggcctcgagggtcctggccagccaagggcacacacccagccctgtcccctccccgcgagtgaaatcaggagtaacagccaaggtccccatcgtgtcatgagaaccatctgatgccccaagcgcaggccccgtccttgtgactggctgtgggtgagcgtccatttcttccccttttgcagacggggtgggaagttgaggaggaagcataaccattgtgttttgtcttcgtgtgggtggcagatgagcgcgtcgcggcttctgagaaatcccgtctccttggccttcctgggactgctgaccttcctgcttcccttatttccccctcagtggggactgcgccaaggcggggacaagaattcttgggtatggggattctgtggcgactctgcgggctcctccgtggggtcctgcgttgaggtgaaaaggataaactcttacgacgatgtcaatcctgaagctagttccatgtccctcatggagggtggggagtccccaaagctttcagctcacccacctgggcttggggggacactcttcccttgctcctgcctcccggtgccttctgtttccctgtctggcatgcctctctacgcccccactcctccacctgctcagctctccaaggacctggtatgtgtgcctcctccatgcagccctccaggctactccagcacaaccttggaaccatgtggttggtgcttacagtcagtcgcatcgtccatagtcatttcatctgtgttggcccattttgcccaactggattataaaggtctcagccaggcatggtggctcaacacctgtcatcccagcacttcaagaggccgaggcacgtggatcacttgaagtcaggagtttgagaccagcctgaccaatatggtgaaaccccatatctacaaaaactacaaaaactagctgggcggggtggtggacacctgtaattccagctactcaggaggctgaggcaggagaatcgcttgaacctgggaggcggaggttgcagtgagccgagattgcactattgcactccagcctgggtgacagagtgagactctgtctcaaaaaaaaaaaaaaaaaattgcagtctgggaccatgatcgtgtacgcactgacgggaatgccagtaggtagcgcatggctgtattatcccagtttcacacatgaggctgctggtgacacgaagcccagggatgctgagtgatgtgcgcacagcagagctgcgactcaagcccaccctgcctggcctgcaccaggtggaaccccatgcgcttgcctagcaaggaccagacaccgaggggccgttggttctaggacggcgagggtcagaaggagaggcctgaccggacgcagaggggccgttggttctaggacggtgagggtcagaaggaggggcctgaccggacaccgaggggccattgattctagcacagcgagggtcagaaggagagtcctgactggacactgaggggccgttgtttctagcgcggcgagggtcagaaggagggtcctgctttgtcctgcatggattgttggatctgggctttttagagctcggaggatgaaggagccagaaggcagagcaccatctgggtgtctgagtagatgagacgacttcttccagtgaacatgggttctgtctccatcagagtgaggcgatatatctgagtagatgagacttcatcagaatgaggtgatgtgaggctggagtgaggctgggctgggagtttgccgtggttggctggagctggtggtcgtcgttcagagggagctggcgctggctttggtgttcccttcagtgcagcattttcagcagtggagtcacccattctctgctagaatgcttctcttgtcggaaagctcactacttaatcctatgggggacagctctagtgagcccgaatctgaccccataacttttccccactgttcctgggtctgcagagcaacgtagattaagtctaagcctcgtttttgtttttggagacagagtctggctctgtcacccaggctggagtgcagtggcgcaatcttggctcactgcaacctctgcctcctgagttcaagagattctcctgcctcagcctcctgagtagctgggattacaggtgtgcaccaccacgcccagctaatttttgtagttttagtagagacggggtttcaccatgttggtcagacttgtctcgaactcctggcctcaggtgatctacctgcctcggcctcccaaagtgctaggatgacaggtgtgagccaccgtgaccagccaagtctaagcctctttccacgtggccttcaggtaggtgaagaacatcaacagaatccgacatggctggccgggcgcggtggctcacgcccgtaatcccagcactttgggaggccgaggtgggtggatcacgaggtcaggagatcaagaccatcctggctaacacagtgaaaccccgtctctactaaaaatacaaaaaaaattagccaggcgtggtggcgggcgcctgtagtccctgttacttgggaggctgaggcaggagaatggcgtgaacccgggaggcggagccgagatcgcaccactgcactccagcctgggcgacagagcgagactccgtctccaaaaaaaaaagaattcgacgtggctgctctccctctggccaccctgcccttccctgccacaccttccctgtatggcaggttatcaggccctgtgtcctgcagggcctttgcagtacagcctggtcatctttggtttttttttttctgattattcatattcattcattgtaggtgatttataaaatgcagagaaccacactgaggaaatgcctgcacgtcccgttatcccacggtcccactgctaggctggaaggtgatggcatcagctcccggccagtgctgggggttggtctgtgttatctgccacctcaccgtctacactggcaggccctggagcatcttggtatagacaggcaggcattgagaaagagtctgagactggagacccctgccatgcgcagtgggaaggaccatcacggtcgcttagcaatgtctgccacgggggtgggctgcagtgggggacacgtgaacgcccatgcctctccctgtgccaagtgacgggaacttggaacatcagtgaggccaagactggtcttgagtaacttcgggtccctaccttctgagtcctagaaccacattctgtttcttggaaggaaacagctataggcttgagttccctgtcaaccctcccttccactgaagtgtgacaaggagcttatgactcggggcacaggctatcgtggaagaaagacgcggatcctgttaacccagtacaggctgctgctgagctcagctgcgtggtaggggagtgagcccaggcaccacccctcgggcctggcacagctgccaggccaggttcctgctgtcgagtgtgcggcttgttggggcctgtggcagtggctccttgatacaaagctcgtttcagtgccctgcctttggcagccttgtctgggcaggacttgggcagcgggaagggctaacgatcggccccggggcctgccgacactctggtttgtttacccccgacctctgctctttcttcctctgtttctcccagcccatgaaacccctgaaggccaccgccaccacctcccagcccgtgctcacca

SEQ ID NO: 15349 - DNA, 119965 bp, Homo sapiens
ataaaaagcaaaatggtgactcagagaggagagttggaagcgtcctgcctcttgctcccactgttaatttttacacttggaattaggcagaaggcaaagaaaacagcagcttgaaatacgcggctgacatgctcttcatcgggtagcaacagcagagccgctcctccccgcctcccagcagccccggagcgggcagggcccggtgcctgctggctctcccccgcccctcaccaggcccaggcccccgcacagcccccgcccgggccaggcgtggatggtgcggccggggccatggctgccgggggccgccgccggcgcccactacgctaccagtccctggcagctctggtggaggattctcagtggcctttcttgttccttgtctcagacttcagctacgggacggacgagtacgacggagaggggaatgaggagcagaaggggcccccggagggctcagagaccatgccgtacatcgatgagtcgcccaccatgtccccgcagctcagcgcccgcagccagggcgggggggatggcgtctccccgactccacctgagggactggctcctggggtaggtacaccggcttttctttctgggtttggggaggggtgacgggaaggcctgggcatcgtgggccaggccctgcttgggttggtctcgagagattgggactggagacgtttggacctggccgttcttggtgcctcgtcatctcgtcctggccctggacccctctcaggctcgggcttccctccccacctgctttgccaacgctgccgcccctgtctctccccgtctactagccgtctgctccccaggcctcccagacccctccgtgcctctttcagctttcccctgttagcctgtctcctccagaggacccaggagaggaccaggctctcctcccctctgcacccaggccaggcagtggctgcatgcgtggcccgtgggctccaggtgttcagatgctgctcccgcaaagccagcctgggcctggtgctccctgtgggtgcaatgagctgcccgctccagccctcctctgttcactctggaagggaacaaactctgatggcatccacctctccttgttgacagagacaagagttctgctccagagagaagcattgtagaaggaatattaagtatgtgctctgagacaggccagggatagaaactgtggagggtttgcggtccttgtcattaacgtgttcctggcgacagggactgacgctgtctgagcgcagctcgtgtgtgcctgtcggagacacatgaacgagcaaaacagaggttctgggggttgtttgcctggagctggtgggggagaagaatccaagccggtcctctgtggggggtgtgtgttgcaggaggcggtgggagtgccccatccttgcttggtcctgctcgtccgggtgtgttttgtagggggtctccgtcctgccttctgacgtccccagaggagcagtcgctgagatgccacgggctgcctcttcttcctccaggggctagtgcccccccaccccagctgaggccgcctgaaccctcccattcttgagaaccccctgctccttccagcccccccggccaccctccaccccccacagagctctcacccctcttcacacaccggggtggctgttatagcctttggcaacaagggccttggcaacgggcttcccacttgggggaagccacattgctgccatggcaacagaggccgaggccgagtttagcggcagtccaggcgtgcacctgtgggaagggctggcggggggcaggtgggaggcaagggggccggcgagggggttggtcagtgtgttgttgacctgccctaagacgggaggcgggttagagacaagcgtctcggacctgcgggggcagggtttttgccctggttctcctggaggcattgggctcagggtacaaatagtaacccaaggaggcagagcaggtgttcagggacctgaacgggggccaaccaggggagagcaaggaggagaagactctcgctcccatctctgccttcagctctcaaaccacagcagggctcagagccccgcccggggggactcagctctcaccccactgtgagcagctgcaggaagatgctgcggaatcccggtgtggggccagggtctttgccgctgcctgtccccgcgccacctccctctttgctccctgtccctgtgccctgtccttgtcgcgtgaccaccatgactggtttccgtgtccgtcgattttccgattcctttggtgctggcaggtgccttctctcgggagacagatcacgggcgtcacgcacagatgcccccgcctggcgctccggggcttcggggcagaacttgacttggtggctgtgcgtcttgcttggtggctcacgagggactcacttggcttgaggaccttgaaatccagagatgctagagtgactgccccctaaagtgcttgtggcccccagggttgatgtttacaccatcgactagaagccacgcaaggcaggagtagggagcacttgtccagcctggggatcgtccgggcaaaggtcccatccgcggcacctgccttccctcctcagggagcgtttctgccctttctgctgggtcaccggccccacctagtggactctgcagggattgctgtttacacggggtgcctggagggagctgacgcctcttcctgagtacttggggatgttttggttaaaaacactattaataaaagaccgaggtttctgcggcttggctgtgcttatttggccaaacaggtcccctcccctaccaggcttcctgctggggccttgggaacaggggggacttctggaccaaatcagacaattgttgtagatattcagatatctggcttctggcaccgccttatcgctgggccttccacgcccaaatatgcagccaacgggaagcccaaggttgagtctttgtgttagtcagtgttctctagagaaacaaaaccaacagggtgtgtgcgttatctgtatctatatctacatacgaagaaaagtattagaaggaattgattcaggtgattatggaggcttagaggtcctaatctctgcagtcaatagctggagacccaggacagccaatattggttccagtccaagtccaaaggcctgagagctaggagagccagggatgtaaattccagctcataagccagtggactcgaggctcaggaagagccagtgtttcagtccgagtctggaggctggaggaggccaacatcccagctcacgctcaggtagtcaggcgagaggagcttcctcttattctgcctttttgttaattcaggtgttcagtggattggatgaggcccacctacactggggaggagtctttttactcagtccaccaatacacatatcaacctcatcccaaatgcctcacaaatatgtccggattaatgtttggacaagtatctggacaccttgtggcctagtcaggttggcctagaaaatgaagtgtcatactattattccttcagccacccaggatggaaagcagataagctttgcgcagatgaaaatctattactctcaggctgggcgcggtggctcacgcctggaatcccagcactctgggagactgaggcagccagattacctgaggtcaggagtttgagactagcctggccaacatggtgaaaccctgtctctactaaaaatacaaaaattagccgggcgtggtggcacatgcctgtaatcccagctactcaggaggctgaggcgggagaatcacttgaacctgggaggtggaagttgcagcgagccgagatcttgccactgcgctccagcctgggtgacaaagcgagactccatctcaagaaaataaaagaaaatctactctttagctgtgagacattgggcaagtgtcctcataccgctgagcctcagtctccttgtctctagatagctctaactcccctgaaaggtagtggggaggaggccccactgtgagcagctctcagaccacagcagggctcagagccctgccttggggactcagctcccatcccactgtgagcagctctcagaccacagcaaggctcagagccctgcctgggggactcagctcccatcccactgtgagcagctctcagaccacagcagggctcagagccctgccttggggactcagctcccatcccactgtgagcagctctcagaccacagcagggctcagagccctgcctggggggactcagctcccatcccactgtgagcagctgcaggaagatgctgcggaatttcagcatgaggggaggcctgcagcattaggcctggctcaccaaagtgcacagcccttggccaccagggcccacaagacttttctcgccaggtttagagggctggggagccaacagcattaccactgcaaagaccaagtctgatcaatatctgctgcaccatgaccgaacctgcttttgcaatcaacctcctttctgccacatggggtggccccgggtgaagccgggtctctgcggtgttggcaggacatgctcctctctccccagcacgcccttccacagccttgcactctgcctttgtcttcttttgtgtccccaagacatggatcccacagaggtattagggtgaaacctgaagccctgccccataaaccctgcccaagtccaggctgagcagggcagcacggcagggccaggcccacagaccacgggtggctccattcagcggagactgcccagtttcactctgagaagaaagggccaggactcatctcagctgacaagtgggggtgtaggttcctaaggcaggaccatggtcttacagaaaacccgcctccccacaggccacagactcctctgtctgcttgcctcttgggaagcttagtaaaaaggggctacaaggcagagagaagaactgggttttgtccccactctaccactgtctcactgtgtggcctgaggggtgtcactcatgactccccaccagagctgcagtttgctcatctgtagtgtgaagacactgagaatttcctccctcctgacctcacagggctcaaacctcacagctgttgtgaggtttctgtgagatggtgtttggcagaatgctttgtcaatgtaaaatcgaaacaggggattagactccagcctgcaggagaacccaaagataagggtggaggcgaattgaaatcctcaccattggccgggtgcggtggctcacgcctgtcatcccagcactttgggaggccgaggtgggtggatcacctgagatcagtagttcaagaccatcctggccagcatggtgaaaccccgtctctactaaaaacatacacaaaaaattagctgggtgtggtggcaggtgcctataatcccagctacttgggagactgaggcaggagaattgctagaacccagtgggggcagaggttgcagtgagctgagatcacgccattgcactccagcagccagggggacagagtgagatgccatctcaaaagaaaaagaaaaaaaggaaaaaaaaaatcatcatcattgtccctatcatcctcttcctcctcctccccctcatcacagctgcttagagaggcttgtgctgaacctttcacgtgttggtttcatttaagagccccaacaactctatgaggtaggtgctataaccatctccacattacaggtgcgaaaactggggctcggagaggtgacgtaatttgcctaagattagctgggcatggtagttcactcccataatcccatctacaaggggaactgaggcaggaggatcgcttgagcccaggagttggaggctgagaggtgctaggatcacgcctgcgaataggcattgtaccccgcctgggtgacagagcaagactccatctcttaataatagctattaatattattgtttgtccaagaccatgcagccagtggggcagcgtgttattgaaacttgggtttctatgatgccagagcctgcacagcgctgtcaggtcccgctcacacgccctcccttgtgaagctttcacacccaccccgccgctgatcctactgcagtttgggaggtgtgcacggtcacttgtggggtgcatccgccctgtgagatcaggaccttaatccctgatcatctctgtggaccccagtggaagcttcttggcacctaggggttctcaactggtatttgtggaatggaaccaagtagttctgggatgttcagtcaggaggaagggaggagcaaggaaggctcaggcaataacgctgggaagaactcaggctcagggataacgctgggaggaactcaggctcagggataacgctgggaagaactcaggctcagggataacgctgggaggaactcaggctcagggataacgctgggaggaactcaggctcagggataacgctgggaggaactcaggctcagggataacgctgggaggaactcaggctcagggataacgctggggaggaactcaggctcagggataaagctggggaggaactcaggctcagggataacgctgggaggaactcaggctcagggataacgctgggaggaactcaggctcagggataacgctgggaggaactcaggctcagggataacgctgggagaactcaggctcagggataacgctgggagaactcaggctcagggataacgctgggaggaactcaggctcagggataacgctgggaggactcaggctcagggataacgctgggaggaactcaggctcagggataacgctgggaggaactcaggctcagggataacgctggggggaactcaggctcagggataacgctggggaggactcaggctcagggataacgctggggaggactcaggctcagggataacgctgggaagaactcaggctcagggataacgctgggaggaactcaggctcagggataacgctgggagaactcaggctcagggataacgctgggagaactcaggctcagggataacgctgggaggaactcaggctcagggataacgctgggaggactcaggctcagggataacgctgggaggaactcaggctcagggataacgctgggaggaactcaggctcagggataacgctggggggaactcaggctcagggataacgctggggaggactcaggctcagggataacgctggggaggactcaggctcagggataacgctgggaagaactcaggctcagggataacgctgggaggaactcaggctcagcgataacgctggggagaactcaggctcagggataacgctgggaggaactcaggctcagggataacgctgggaggaactcaggctcagggataacgctgggaggaactcaggctcagggttaacgctgggaggactcaggctcagggataacgctgggaggaactcaggctcagggataacgctgggaggaactcaggctcagggataatgctgggaggactcaggctcagggataacgctggggagaactcaggctcagggataacgctggggaggactcaggctcagggataacgctgggaggaactcaggctcagggttaacgctggggagaactcaggctcagggataacgctggggaggaactcaggctcagggataacgctgggaggaactcaggctcagggataacgctggggggaactcaggctcagggataacgctggggaggactcaggctcagggataacgctgggaaggactcaggctcagggataacgctgggaggaactcaggctcagcgataacgctggggagaactcaggctcagggataacgctgggaggaactcaggctcagggataacgctggggagaactcaggctcagggataacgctgggaggaactcaggctcagggataacgctgggaggaactcaggctcagggttaacgctgggagggactcaggctcaggcaataacgctgggagggactcaggctcagggataacgctgggaggactcaggctcagggataacgctggggagaactcaggctcagggataacgctgggaggaactcaggctcagggttaacgctggggagaactcaggctcagggataacgctggggaggaactcgggctcagggataacgctgggaggaactcgggctcagggataacgctgggaggaactcgggctcagggataacgctgggaggaactcgggctcagggataatgctgggaggaactcgggctcagggataacgctgggaggaactcgggttcagggataatgctgggaggaactccggctcagggataacgctggggaggactcaggctcagggataacgctgggaggaactcaggctcagggataacgctgggaggaactcaggctcagggataacgctgggaggaactcaggctcagggataacgctgggaggaactcaggctcagggataacgctgggaggaactcaggctcagggataacgctggggaggactcaggctcagggataacgctgggaggaactcaggctcagggataacgctggggaggaactcaggctcagggataacgctgggaggaactcaggctcagggataacgctgggaggaactcaggctcagggataacgctgggaggaactcaggctcagggataacgctgggaggaactcaggctcagggataacgctgggaggaactcaggctcagggataacgctgggaggaactgcagcctcttcttccctttcttggtctcttcagaaggcttagggcttgggattcgaggttgctggtaggtgcgtgaagaggcggcatggcagccaggaactcctgagatggtgcctgctccactccctcctgactgctccggacctgggttgtgtggttcagggactcctcgagtttcagcctccgccccccagcagccggcccctgcatttctccccttcctggatcttgggtccctgctgcaaagagaaggacacgagctggaccctcccgtgtgccaggtgctgtgctaggagcccaggggctgccctgccacccaagtcctccagccatggggctgcccccgtttagtagatgaagacactgaggctcagggtggctcctgggcttgtcccagttgggaaggaggtaagtcggaagtaggtagactagtgccttggttgtgaccctgggtcccgtcatcgctggctcccgtcctctctggccctcctacattcacacctggctgggatcttgctcacctctgcatactgttaatcttccctgatgaaccacacctggctggcctggctcatcccacagctctcacgccctgtctgggatctccgtcttctggctagctagcagccctagagttgatgccgtaattacccccattctatagatgaggaaacggaggcacagggagactagatgacatgcccaggtcacacagttggcaagaggcagagctggggctcacatccagagtgcaggggagttttctttctgttttagtttatttgtttcactgtataaacagtgttgtgtaccggcttctcctcaacattagctttattttattttatgtaatttatttatttgagatggcgtctccctctgtcacccaggctggagtccagtggcgcaatctcggctcattgcagcctccgcctcctgggttcaagtgattctcctgcctcagcctcccaagtagctgggattacaggccaccacatccggctaattttgtatttttagtagagatggggtttcatcatgttggccaggctggtcttgaactcccaacctcaggtgatccgcccgcctcggcctcccaaagtgctgggattacaggcgtgagccacctcgcccagcctatgtattttatttttttgagacagagtctccttctgtcacccaggctggagtgcagtggtgtgatctcggctcactgcagcttccgcctcccggggttcaagtgattcttctgcctcagcctccctagtagcggggattacaggcacccgccagtacgcctggctaattttttgtatttttagtagagacggggtttcaccacgttggccaggctggtcttgatctcctgacctcaggtgatctgcccgcctcggcctcccaaagtgctgggattacaggcgtgagccactgcatctggccaacattagctttatgtagttgaactatgtatatgattttggagtgacctgtactagaacagagaggaggcagagggaggagcaaggtgatctggaaggtgacgaatccagtcccatctgtggctgcagttagtggctgcaactgccctggcacttgccctttggtgtcagttcccattggctgaagagctactgagcttcatacagtctggaggtggggcttgagtttctgccaggaaagctgggagagccagggagaagccaagaggcgggagaaagtgcttcaagccgaggacctgccgttgttaaaggcctggaagtgagaacgtgccaggccctttgagaggttactgtcaacagtgagatgggtgagtcatcagctggggccccacggctcttgtttgggctggcttggtggcttcctgctgggcatagagtgagcagtgttttagaaagagtcatctgatgtcagcaggagggatgcaggatgaatgtcctgtcacacctgtcctgaaatcctccagcaccttcccttcgcctatggggccccccttccctttgcacagctgtcaaggccttgtgtgacctgacccctggaccccctgcctacctctgtggcctcaggaccaactccgtgctagaattgtgaactctcacgagagagagattttgtcggttttgtaacaaaacttgctcattgcagtctctggtgccgagaactgtgcctggcacacagtaggtgctcagtaaatattagctgaatgaatgcatgaaccagccagactaaactcatgtcattgtgcctcacatagtctctctcctgtctgttccccagccccaccagcatctctaaccactgctttttttttttgagacggagtctctctctgtcacccaggctggagtgcagtggcgcgatctcggctcactgcaacctccgcctcctgggttcaagcgattctcctgcctcagcctcctgagtagctgggactacaggcgtccaccaccacgcctagctaatttttgtatttttagtagagacggggtttcaccgtgttagccaggatggtctcaaactcctgacctcaggtgatctgcctgcctcagcctcccaaagtgctgggattacaggtgtgagccactgcgcccggccataatttttttttttttttttgagacagagtcttgctctgtcgcccagactagagtgcagtggtgtgatctcagctcactgcaaccactgcctcccggattcaaggaattcttgtgcctcatcctccagagtagctgggattacaggcctgtgccacccctcctggttaatttttgtatttttagtagagacagggttttaccacgtagaccaggctggtcacgaactcctgaactcaagtgatctacctgcctcggcctcccaaagtgcgggattaaaggcgtgagccactgcgcccagcctaattttttttttttttttgagacagggtctttctctgtggcccagtctggaacacagtagcacaaacacagttcattgcagcctcaatatcctgacccaagcaatcctcctgcctcagcctcccaagaagccgggaccacaagagcatgccaccacactcagctaattattttttaaaatttttatagagatgaggtcttgccatgttgcccagctggtctcaaactcctgggcttgagtgatcctcctgcctcggcctcccgaactgttgggatttcaggcgtaagccactgcacccggcctatatgtatagtttattcgtggacacaaataaggaaaaatgtataactaactcttagaggctccctctgtcagagggaaccagaggagactttctctttctttattatgtgtgtctacagagttagaattgttagtgatgtaacaggaaaataaagaagttaaaatagaagtgccacgattgggaacgtagagtgggctctgagggcaccagcgggcacatctgacgcagccaacggggagtcacgggaggctccctggaggaggtgacgtttaaagtcgaatctaaaaataagcagtgggccaggtgccgtgtctcacacctgtaatcccagccctttgggaggccgaggcgggtggatcacctgaggtcaggggttcgagaccagcctggccaacatgatgaaaccccatctctactaaaaatacaaaaattagccgggcctggtggcgggttcctgtaatcccagctacttgggaggctgaggcgaaagaatgggttgaaccgaggaggcggaggttgcagtgagctgagatcatgccactgcactccagcctgggtgacagagcgagactccgtctcaaaaaaaaaaaaaaaaaaaaaaaaaatcgcaataggtgtttccatgttatcccttccagaaaagtggcacctcagctgcagagttctgacactgctcccctccccagtacggccttgcccctcccttgacactgccttgggagtcagtcaccaggtcaatctgtccctgagactgtcagctccgcgagggtaggcacggggttccctgtccatggctgcattccgatgctagcacactgcctggtgcacagcaggcggctaacaaatgcttgctgattgggtcaggcggttaacaactgcttgctgattgggtcaggcgttaacaaatgcttgctgattgggtcaggtggttaacaaatgcttgctgattgggtcaggcgttaacaaatgcttgctgattgggtcaggcgttaacaaatgcttgctgattgggtcagggaaggagggaatggagggtgggtgtgggggaagactgtggggagtcaaccattggagactgagatttagacttgatggtgtcagaaatctcagtggctgcgaaagatttcaaacagtagctaggtgtggtgtgtgcttatgcccctcaccctccatgatgctgttcagcccacttctccaagttcatcttctgtcctctagcaagcagcgcttcttaacctgccttccttcctctcttccttccttccttcctccctccctccctccctcaagacagagtctggctctgttgcccaggctggagtgcagtggtgcgatcatagctcattgcagcctccaactcttgagctcaaacgatcctcccacctcagcctcctgagtacctgagatttcaggtgcgccactgcaaccgggttgctgaagctgcttaaccctttcctttcgggccttctcttctttgcctggaaacccttccctatttccagatgctactcagaagccactgtcctgtgaagctttcactctcaggcagcgttagtgccactgtcctccatccccagggtggctggtaaacgagaacactgcctcgtgtgttcacacgtcctcaccccagacggatcgagagcctgagaacggcaagggccccgtctcccagcctcgtatgtgtgccatgccaggccttttctgggtatgaatgaatgaatgaacagacagatggacagacaagatcaggagccaaagtggggaagtacgtgtggtcgtgtgggtgtaagaggctctaaagcttggtggggtggtggctttggcaaaggaaaagaagaaccgaaggacttggtaaaagggatgtgggggttgagggaaggaagactcgtaagatggcggccgcactaacagaagtggaaacccggaaggggaagctgtttcagaaggaggaagggtcctttggtccagatgtgtggagtggaagggccgtggctgggcttccaagtgaggagacccagtggccggggcaggtgctagacctagagcccagcaagacaccagggctgcagctggcagcgggccaccactggcctggaagggagaagggctgcttctctgggggaagggagcagagggctgaggctgggcccaagcaagtgactccacatttacaggaggcgggagaatgaagggccagcctacaccagagagtggtcggggcagtgcctgcatcaacagggcagctgagggcttggagaaactctagactgcagaggccaaagagtcggagagggaggcctctggctttggaataaaccgtttgggggggcctttgaagcaggctgcttctatggagaacattaggagccaggccgaggcagatggagtgtggagctcaggtccagggctggctcagggcatttgtcagggaaggggagggaagctgtggggactggtgagtcacttcccctccaggggggcaccgagggcctgtgagtggagtctgtgtctgatggaggggcactctcattactcactggaatttccagccaccggggacagggtggagtagagaggccctggatactcagggagtcacttgtgtggggttcagggattttgggaagaagtgggcgtcagtctcaccatgccgtgtagaggtgtggggaacggggacgaggatatcctggcagacttccaagggcacctcatgtcctcttgagtggaggaaggaacacagcaggggcctgtggggttttaggcccttcttcgtgtcacctgcaggtctgactcatgtgggcagcccatgccatgcacttggagcccgccgggcgggagacagaagaacccgtggtaccaggccctgagctggcatacttgtgccctggggaatgccaggcctggtcgttcccaagccctcgccacagcctcacccgcccgcaccaaatgaggaattgtggctgaaagggcccttcagatgcgccctggctatttataacccacccaggcagggacaggggaaaaccaggggctggaaggagatgggtggggtgggggtgtgcctctgttgaaccctggtggcacagttccctgatcaaaggctgttagccctggggcccctcaagggctcaccccgcaatcccctgctctgtatttcagctctgcaacaggatggagcctctctccagggagggcagcttctctgctgccaatggaattgcatgagccccacctagagcccagagcttctgaagaattctggggggagtggggggctgtggcctgaactcgggccacaggtgtggttcatttagacggcaccatgttgttttaaaatgttaattatttgccatcgttttaaaatcaggagcattcctgttaataagccagattttagcttattttgaacagagatcaggcagccatgagcttgcgtttcctccagcagccatcggctggagtgagtggtggtttcaccctgccctacctggctcgcttcaccggctggcctcacccgcaggcctcacccgcaccctcatgggtgccgtttgcaacctttgctccatcgttgggttgtaaaagagcttttcccagggcctcctctggactcctcctcccatggaaggaggtgtatgtgcatctgggaactagggccagggggaccagaatgtggcctcactccctgcacagttgggggttctgcaaccattggagaagccaggggaagctggctgggagtgggcagggccggagatggtgcctgtcctgggttctgtgtgcactccccttgcaggatggctccctgcggtggggtggctgggggggctgcttggaggaggtgggggtgctggtctcagcagtgcctgtgagtaggtgggaggctgctcagaggaggtgggggtcctggtctctgcagcgcctgtgagtaggggggctggtctgtgagtgggggggctgctcagaggaggtgggggtgctggtgtcagtagcgtccgtgagtggggggactgctcggaggaggggggctgcttggaggagggggatcctggtccctgtgagtgggacgcccaccgctcctgtgcaggacagtggtggcgccgcgctcctgcctgggggcaggtcaggcctgtctgttgcaaagcctgactcctccagcggcggcgggacgcggctgtggcttctgggcgggccggggcctcccctccggaagggggctccggcgcatggggactccggggtggctctgggggtcgcccctgctcgccgggctcctggctcggccgcgcgcggggaatgaagatgcgtctgggaagcggcctccccgctccaccccaccccggcccggccgcggcctcctcgctcctcctccgccgcagaagcctccgccagccgcggccccgcaaccccagaggacgggcggctccacctcgcgacgcgcgtttcctgtgtgttcggagcgagcgcgagcccgagccccggagcccgggaagggcgggccctgcggggccgggcgggacacggaggagggcgctgggctgctgtgcggcgggttcgcctccgccacgggccgggcacggcgtcaggggctgcccgggccttgctccccctttcgccgggcgaggacgcgcgaggcggcggcggcggcggcggagcgggctggactaggtccgggatgcagtcccgggtcgggagccccaggccgggcgcgcgggtgtagacctgccccccctcccgcccgcctcctccctcctccctcctcccgccgccgctgcgtggaccccgcttcctgtctgccctccgcgggctccggctgccatggaggaggaagaggaggcgataggcttgctggacaaggttctggaggacgaagatgtgtttctcctggaggagtgcgagctgggaaccccgaccagccccggctcagggtcccccttcctggtggctgtgaaggtgggagcgtgacacgccctgggcgctggggggggccgggccggcgctgccgaaggtgcgcgggagaaatggctgatgcgggcgcagagcgcgcggccgggtggaagccctcggcggagggtcccggccccggcagctgttcccgggggagaggggcgggcctgcctccccgaccggtgtcctcggggcagtggtggccgccccctccaggccagcccagctcagggctccggcggctgtgccaggagtcacctggcgcgcctgtcagcccgagcctcgccgcctccctggagcgggtgggcaggaatcccccgtttccacggcaaccgcaagagaggggccaccctcttcccagccaggagacagggacttggtgtctccgagctgaggcaagagggtgtttgcaaagggcaagagccagaggtcactgagcttccttgaaggaaaagcactgggtcagctgaaggggggagggaacagctggcttggaggctgcagccaggtgggcaggtgcccttcccgaggcgggacaggcagggagcatctgctgggccctggcccacccgctctggggctgacggcgttctctgcagcagtgacccgtcctgtaggagaggttggctcccggtggaactggagggcagtggtggccagaatcccttgaggagcggggcggccccggaaccacgccggctctgtgagtctggcccggcacaccacagcggtcttcctttttctctcctggacacacctctcagagcttccacctcagccttttgctcagctgctctctggttctgtgtcgagaagggaggcccagtgaggatgcgtttcggggagtttgcagactgctaggcgaggctgcctaaccgagtgcccatcggcggggcctagaaggcatgtgcagccagcattgctggggacgggaggctgtccctgaacctctctgggcctccctgcccctcacagaagatggggatcacagtcctgccccacccactctacagtgtggctctgaggaggagccaatggaggtaaaaatagatgcagaaccacgggagatggctgatgtgtgagtatgggtggagcggtggctgcaggcctgggtggggagtggagctgtagggaggctggcagtggctggcaccccaccctgtcttctctgatctggtgctggcgtagggccgtgggggtaagtcacgtctccccgtgggctcagggaggcctctgcacttagggtctgaccagcctccccactaggaacagggtgggaaagtctgctcctgagccaggagtcaggctgggagtagcaatgctgggatgggaggtgtgtggccctcatgggcctcctctgggaagcccccagcacagatgtgggcccactcagaggctgcctcctggacctccccttctgctggaccccggcgtatgcctcagctaagcccgtatttcattctgctcagatgctcagaactctagacatttgcctccgcaattatatcccattctcctggaggaccaggaccatgtcatattcattgctgaacactgcacagtgcttggtgtggggctggtgcctgtgagagtctgcacaatgtgtgaggcccgctggggcccacgaagggtgcaccaggttcccagcctcgctccatctcagaggtgtcctgctgtgtacggcggtggcccacggatgccaagagagcctgagcacgtgtcacacctgaaaacgctgctcctcctgggtccccgtgagcaccgggatggtgtcttcccctctactttgctgccagcatgggggaaggagacctttctcgaatgccggggagttccaggctccctgctccatcctgaacacctctagaattcctccctcctctaccggcattggcctcagagggagaagacaagcaggtggccacagagcggtgggaagaaagctcctggattcattcaacaaacactctcaggttaggtgctcttcagagcaccctgcctggcactgtagagatgacaagaggaacaaggcgtgatcttccctcacaaggcgttcagagcaaggggcaggtacagggagtaggaatagagtacggaagtaggcagggtgggccagatgcggtggcacacgcctgtattcccagcactttgggaggctgaggtgggcggatcacctgaggtcaggagttcgagatcagcctgaccaatatagtgaaaccacatctctactaaaaatacaaaaattagccgggcgtagtggtgggcgtctgtaatcccagctactcaggaggctgaggcaggagaatcgcttgaacctgggaggcagaggttgcagcgagccaagatcatgccactgcattccagcctgggcgacagggtgagactcagtctcaaaaaaaaaaaaaaaaaaaagactgtgagaagagtactgataaaagggcaccaaattcaggggagaagggaccacttctagtggagttggggatggcctggatgcgtgcatgtgtgtgtgtgtgcaggccaagggtcatttctggatgatacactcctgtcctgggctgcagaggttcttggcacacccttccctggcagctagtaggaatccaaggcaattctctttgctattactttactttaggggtacttaccttaagcagcagttgcgttgtgagcatgtgcccaagtgccaggcccataaatcaatcctgtttccagtgtcatttccaagacgcttcatcttcctggggggcagaggtaaagttggctgcagttttctccaaagctatagctggagtttgctgcatatctcagcccagacttacctttgaagagttattgatctgtaaaactggtaatgcaaataaaatactgatagcagcgtcatgttgcatttgtaaaatggcttacacttgccaaaaatgtttcatgccattctatttaaagataggtagggttgtgacgggggcgttgtagaaggtgctattttaaggaacttatttgtcaggaataaaaacccttttgtaatgcagattaaccctttaggtatcattctgtgccatttttttttttcttttgagacagagtctcactctgtcacccaggctggagtgcgatggcacaatcatggctctctgtggcctccacctcccagactcaatcagtcctcccacctcagcctccccctcactacaggcacatgccaccacgttgggctaatttttatatttttgtagagacagggtttcaccatgttgcccatgctagtctgtaactcctgggctcaagcaatctgcccctcttggcctcccaaagtgctgggattacaggagtgagccactgagcccagcccaattctgtgccagtttttaatggatcatctgaaacatctctatttctgtttcacctgcccaggtctcttgtgcctgcacatcatgcctgtatcccccatttggatgtttttctaagtgcgggccccacgtggtgatttgagaaatgatcggtggcacctcgatctatattttgcattttaatggttaagtatatattttaatatatattagaaaaaatatgacctgtacatttttcttacgatttcaaatacgtgtagggtaagactgctttttacaagtcagttcttgggcgcagtggctcatgcctgtaatcccagcactttgggagactgggcgcggtggatcatgaggtcaggagttcaagaccagcctggccaacatggtgaaaccctgtctctactaaaaacacaaaaagtatctgggcgtggtggcgtgcacctgtaatcccaactactcaggaggctgaagcaggagaatcacttgaacccgggagatggaggttgcagtgagccaagatcctgccactgcactccagcctgggtgacacagtgagactctgtctcaaaaaaaaaaaaaaaaaaaaaaagttactgtaaagaacaatattgagtaaagaatagtgcaggtggtggtatgtgagtatggcaaaattttaagggtgggatatgaacaaccaaagtttcaaaacattgcctgtgccctatggtgcctgcctaagacctcagacagcaatagggagcccagaatacggggatccacccttcaggagagaggggccactggaatttggtctttgtcccccagcagttgacccgtcttctctgttctaaattctgccaaggaagcagctgaaagagacttcctcagcgcctagcgctgggagaggagagggtctctcgatgcctctacactgcctcagctgtcctgagactgagatgggccagttgtcctgaggttgatgcttggtgtgggtataagccccaggcacggccacccccacccccaggcccagtggcatctactctgagcagatcctgctgggtactcctggcagccagctgtggcccgtgaactgacttctaccgtctgtgaagcctcagaccctcgctgcatgccctatagccttgagtcgcagccagagagccagccctgcttgttgtcttggaggccagtgctactggagagattgtgtctttgcttggcctggaaccagatgtttggaggctttatttagcctctcaactctgtggaggaccaggcctgagctggccacgccttatctctagacattgttcctaccagagtgacctgacgtctttggtttggcggcttcaagctgccacactgtcagcctagcagattgtgcaggatgctgaggataaacgaacccaccaggactgcatttcacaagttctggctgggaggaagtgaggacaggcagcttcccggtgctggagacaggtaggcagcgtggcagaggctgtgggacctggaactctttagagaactcgctccggagcattctaggcacgtgggcacctctccttcaccttcgtattcccagtgcctggctcccggtgggaatgggtgagtgagtggtgagcctggtttttgatgagacaagagacgccctgcaaagactgaagaaacaatgtgaatttcctcatggctctaaactgggaattgtggagtctgaggaaagctggaaaagatgggagatggaacaggccttcctttggtggtgactgagcaacgggtctcctgttagccaagtgcaccgaggctaatttcccatccgtacgctctccaacgcctttgctccaatctcagccaaaactgcagcgtgaacggggcccagagcaggactcttggggctgactgttgcctcttgagggagggtcttcctgagttgtcttcccatcagaaccagcctttcaagagtggactatgaatggaagtcttgaggggaggatcttgcagaaatgggcgattacagggcttccagggtctatgctcgtgccaggggggatgaagcttgtttgtggctggggctgcaaatccctttcttccccccatcctagtccaaccagctctacagttacagctcacggtgtggcatttgctaaaccctcaggcaaaaccttggttggcagggaacaggagggagtgctagcccccagcacaggggatgagttcccatttgtcaaggctgggaagcagcaggaagacccctgagggtctgacctggaggggctggagctgggggctgttccaggctctgatcttgtcccccggggctacgtgtgctggaggctgtgcaggcctctggcagtcccgactctcggtgcctcaggaagatgataacacctgccaggttttgagactccggtgaattgaaccacaaagatagctaagctcagttcctggaatttgtgaagccgccaataagtaactattgcccttgcctgaagcgtggggtctgtcttgcttttctaatgctgctgaaacaaatcgccacaaacttaagggcttaaaaccacacaaatttattctcttatacagaaatctaaaaaggatctcggcccggctccatggctcacacctgtaatcccagcactttgggaggccgaggcgggcgcatcacctgaggtcaggagtttgagacgagcctggccaacatggtgaaaccccatctctactaaaaatacaaaaattagtgggtgtgatggtggacgcctgtaatcccaggtactcgggaggctgaggcaggagaatcgcttgaacctgggaggcagaggttgcagtgagctgagatcatgccattgcactccagccctgggcgacagagggagactttgtctcaataagtaaatacataaataaatagattaattaaaataaaaaggatctccagggctgcattgcttctggaagctctagggcaagcttttccagcctgcggccatacggcccaggactgctttgaatgtggcccgacacaaatttgtaaactcttaaaacattatatatttttcttttagttcatctgctgtcgttagtgttattgtattttatgtgtggcccaagacagtcgtcttcttccagtgtggctcaggggagccaaaagatcggaagcccctgctctaggggagtgagttcattttattgccatttccagcttccaaaggctctctgcattccttagctcgtggccccatcctctgtcttcaaacctaccagtgtagcatcttccaagcagtccctcaccactaccctgtctccccggccctctcactccccttctgtggccacgatgcctcagggaaagatggcattttaggcagcaggtaaagaacgaaccgaaagctagagacctttgaagatgaggaggctggttctcctgcgtgtgggggagactgagcgatgtcctggctgtgggaaagactggaagggtagggacgggcatccgggccactgcaggtggctcataaaggatatggtgggccccatgtcccagtctagggccgaatctttacttgttttttaaatgtctttccggcagggtgcggtggctcacacctgtaatcccagcactttgggaggccaaggcgggcggatcacgaggtcaggagatcgagaccatcctggctaacacggtgaaatcccggctctactaaaaatacaaaaagttagctgggcgtggtggcgggagcctgtagtcccagctactcgggaggctgaggcaggagaatggcgtgaacccgggaggcggagcttgcagtgagccgagatcgcgccactgcactctagcctgggcgacagagcgagactccgtctctaaaaaaaaaaaaaaaagaaaaaataaatgtctttcccactagagtctaagccacttgagaacaggggccactgtctgtttcccatggtatctatagggcctggtggacattcagtaaatatttattgaatgaataaataaatggacacatagcccagtggaatccccaagtactcgcgttttgcggtattcatactcggtccttggcaagcatcgggcaaggtggcactcttaggagttgaatccagctctggtgtgtgggacaggcaggaggagaggaagagagggaggaaaagtcggttcgagaacccaggtggaaaatagattgagggaagcaaaacgagatgttacaggaggaatatgggtgattgtcttttccttttatatttctgcatgttttgtatattttttataataatatctgacttttatcccctatgaaagtgtcgcttaaaataaaaggaaaggggaaaggggggccgggcgcggtggctcacgcctgtaatcccagcactttgggaggctgaggcggacggatcacctgaggtcaggagttctataccagcctggccaacatggtgaaaccccatctctactaaaaatacaaaaaaaattagtctggcataatggctgggcatggtggctcacacctgtaatcccagcactttgggaggctgaggtgggtggatcacctgaggtcaggagttctatatcagcctggccaacatggtgaaaccccatctctactaaaaatacaaaaattatctgggcatggtggcaggtgcctgtaatcccagctactcgggaggctgaggcaggggaatcactggaacccgggaggcggaggttgcagtgagccgagattgtgccactttacttcagcctaggtgacagagcgagacttcgtctcaaaaaaaaaataaaggtcgggggggaagggcagggaagcagaccgtccacgcagggttttggcctccttgctcatgagctgttggctgtgctttgcgtttgtgcaggtggaagcagggaaaggcctggagatgaggaagctggttctctcggggttcttggccagcgaagagatctacattaaccagctggaagccctgttgctggtgagtacagtccctgctctggggccttccggtccccccgcccgtgttgggtgatgtcatgctctgaagctgcttttggagttggagaggaaaggggaccgtacccgtccctccctgtggacagagtctgcagctggtctgcttctggctgggcatcgggcagcccgggtcattgccagaaagggcctgtgcctctcagctccagctctcaaaaggcaggagaagcacacccggcttagagatggcaaacacacctgtcacccacgaccctggcatagggcatcgtgaacccatcatggtgctctgcctgcctgggcgggggccgagcgccttctccacgctgtgctctgggcagtcattcccaatcaatccagttaagaagtctctgccgtcttgtgtccaagtccttctacctccctgggtgagggaaccgttagtgccatcctgaggccccgtgtcaggaaatatgaggtgggaggctgtgttctttttttttttttttttttttttaagacggagctttgctcttgtcacccaggctggagtgcagtggtgcgatctcggctcactgcaacctctgcctcccgggttcaagtgattctcctgcctcagcctcccgagtggctggaattgcacgtgcacgccaccagtcctggctaatttttgtatttagtagagacaggattttatcatgttggccaggctggtttccaactcctgacctcaggtgatctgcccgccttggcctcccaaagtgctgggattacaggcatgagccactgcgcccggcctgtctgtgttcttttgagaagcggcacagctctgaggcatcaggccaagctcagccctcggtaacatgcctcagttcccctcccagatggaggcatcgttgtgagagtctgattgggaggggaatatgaaaatgttttcggaagataaaagtactacacagatgtgaggtggttttgccttggaagaaagtgctccttagatgtgtctggatgttatgcagagtgatcgtggcgtgtcaatctttcttttgggtattttgcagcctgagacataaggtaattgtcagaaaagggagacgcagaagtgtggatctgtggaagctcattcttaacaagaattctaagatgcacatttaagtacttgccatgacgtgaggtgttgtcacacgtcaaccctgagatgctgtcagtgtcccaggggacttgacatttatgttacccaggaatgactgtgtaaatgtgcaggtgcaggccgggcgccgtggctcagtgcctgtaatcccagcactttgggagccccaggtgggcagatcacttgaggacaggagttcgagaccagcctggccaatgtggtgaaaccttgtctctgctagaaatgcaaaaaaaagccaggcgtggtggtgcatacctgtaatcccagttactcaggaggctgaggcatgagaattgcttgaatctgggggcgaaggtcgtagtgagctgagagtgcgccactgtactccagactggacgacggaagtgaaattcctcaaaaaaaaaggctgggtgcagtggctgacacctgtaatcccagcactttgggaggccgaggtgggtggatcacctgaggtcaggagttcgagaccagcctggccaacatggtgaagccccatctctactaaaaatacaaaaaattagctgggcgtggtggcgggcccctgtaatcccagctactcaggaggctgaggcaggagaatcgcttgaacccgggaggtggaggttgcagtgagccgagtttgcaccattgcactccagccggggcaacaagagtgaaactctgaatgtgcagctgttttgccacacgccaggctgagtacgtcccatctctccaggagtttatctgtgtgtacggagctgttttccaagtgaggggcagtgtggcaggtagctgagggtcctggtctggggccagagctagggcaagacttggccctgccattaagagcaggcgtattgcactgtttctcaaactgtgcctctcagcccatcagtgctttgggttgtgaaatcagtacagtgggttgtgaaaccagtacagtgggttgaaccagcatttttaaaccaatgaaaaaatgtcagcatgcatcatacacgggaaagataagtgagggaactttcggtttgttgtctgtctgtgtgcctgtatatatatgtaattgccgggcccatggtgtcttacacctgttgtgggtttgaaaactgctggctttggccgggcgccgtgtctcaagcctgtaatcccagcactttgggaggctgaggtgggcggatcacaaggtcaggagatccagaccatccttggccaacacggtgaaaccccgtctctactaaaaaagtacaaaaaaaattagccgggcgtggtggcgagcacctgtagtcccagccactcgggaggctgaggcaggagaatggcgtcaacctgggaggcggagcttgcagtgagcagagattgcgccactgcactccagcctgggcgacacagtgagactccatcacaaaaaaaaaaaaaaagaaaagaaaactgctggctttgggcaagccctacataaattccttgagcctccatttctggatctgaagatgagagggatgccattctttctctctctttccatggggttgagaagatcgggagatgctttcgggacctcatacagcgttgagttacttaagacactcaactgttagtggaagaaaggaggacaggcaaagagacaacccgtcagacattcgtgaaacacgtcttccaaaccgtgaattgctgtccaaaaaggaacatagttgtcattactaacagggtgtgtatttgaaaggagttcagacagaggatctagactgcctggccgtactggctccaggctttcagcaggtgaatgagctatcgtgcctcagtttttccatctgcaaactgggtatacaaatagtatgcttttcatggggtcgttgtgaggattaaaggaatttatacacagagttctttttttttttttttttttgagacggagtcttgctctgttgcccaggctggagtgcagtggcacaatctcggctcattataacctccgcctcctgggttcaagccattctcctgtgtcagcttcccaagtagctgagattacaggcacccaccaccacgcccagctaatttttgtatttttagtagagatgagatttcaccatgttggccaggctggtcttgaactcctgacctcaagtgatccgcccgcctcggcctcccaaagtgctgggattacagatgtgagccactgtgtccggcacataaagctcttagaacacagcctgagtgttcgttgacactgttaatttctctattgctgggagaggagacaggttagggcttcgtggtttctgccacaacacacccgttccctgaaggagggagtggcgcctgtccccatcagacacggagcccttagatcccacctgccacccacgagcctcttcctctgggccaagaccaagagcccctccctgctctgcctttctaacagctcatgccccaaaggcagaatctgtggggcaggggcccccttcctgatatgcctggcgcaggttccccccttccccagctgtctcctcccggggcaggttccccccttccccggctctctcctccccgggcaggttccccccttccccagctctctcccggggcaggtttccccccttccccagctgtctcctcctggggcaggttcccccattccccagctctctcctggggcaggtttccccccttccccagctctctcctcccggggcaggttcccccacttcccccagctctctccacccggggcaggttccccccttccccagctctctcctcccggggcaggttcccccccttccccagctctctcctcccggggcgggttccccaccttcccccagctctctcctcctgggcccctgcttggctctttcttgagcagagaccagagggagcaaaggaagaactcgctgggaggccaggtctgtggtaggagggctcaggaagaggagtaggaccctccacagccacagcctcagaagaaaacctcagagtgaaagaatcacacccttcctcctctcctccctgagctgggaacccctgcaccctccccacccctcagctaggaggaagctaaaccttctgctcttcggggtggcctcgcaaaggtgccagcttgaaggagaagaaattcgttccctccatgctcgctttcccactcctgaccccattcccaccgctctgccccagcctgtttgctttcatctgaacacttcctgatatgcaaagggctgggtgtgtgtacctaaaaccatgtgcacacacggggcagacgagcctccacacagaagcctccgtcctggcctctggggtgcttgtgggggtcatcttctggggccctcctgcttcctggtgggctctgattacaggaaaagcctgggagcctgggccgaagtagggggtgaaggaaaaaagatgaagccaactgcattgaaattctggatctccttgacactgggaactgagcttgggaactgtgtcttgctacgctggggccacagggtgaggccactccccagagcccctcccaccgctggccacgactggccctcctggggtggactcctggccacgctgcatcgcaggctctttatctataaaacaggtgaatgaggccttcctccctgggctccagtgacgagtgactcgggtggcatggcagcaagcatgccaggccttctggggcaggaggtggaggaagtgggtacatttctttcccttatttcgaaaggccggtcgctgggggacagagctgacaaacggctatgtgaagtcccactggcaagtgagaaccggcccaggcccgtcttcctgagaagcagctggtatgggagccagggttgaagtcactcacgggtcctctccgagaactcgagtggtgaaatggagagccggggcctgcccttgtccctgcagcaggactggggaggagggggtgcctgagtggtgtgctagcgctttggcagaatggctgtgccgtgccgaagctcagtgtgggtcaccttgcctttcagtccaccctcctgcccctgagcccatacgcaggacttcaccagagacaaataacggcctcgagggtcctggccagccaagggcacacacccagccctgtcccctccccgcgagtgaaatcaggagtaacagccaaggtccccatcgtgtcatgagaaccatctgatgccccaagcgcaggccccgtccttgtgactggctgtgggtgagcgtccatttcttccccttttgcagacggggtgggaagttgaggaggaagcataaccattgtgttttgtcttcgtgtgggtggcagatgagcgcgtcgcggcttctgagaaatcccgtctccttggccttcctgggactgctgaccttcctgcttcccttatttccccctcagtggggactgcgccaaggcggggacaagaattcttgggtatggggattctgtggcgactctgcgggctcctccgtggggtcctgcgttgaggtgaaaaggataaactcttacgacgatgtcaatcctgaagctagttccatgtccctcatggagggtggggagtccccaaagctttcagctcacccacctgggcttggggggacactcttcccttgctcctgcctcccggtgccttctgtttccctgtctggcatgcctctctacgcccccactcctccacctgctcagctctccaaggacctggtatgtgtgcctcctccatgcagccctccaggctactccagcacaaccttggaaccatgtggttggtgcttacagtcagtcgcatcgtccatagtcatttcatctgtgttggcccattttgcccaactggattataaaggtctcagccaggcatggtggctcaacacctgtcatcccagcacttcaagaggccgaggcacgtggatcacttgaagtcaggagtttgagaccagcctgaccaatatggtgaaaccccatatctacaaaaactacaaaaactagctgggcggggtggtggacacctgtaattccagctactcaggaggctgaggcaggagaatcgcttgaacctgggaggcggaggttgcagtgagccgagattgcactattgcactccagcctgggtgacagagtgagactctgtctcaaaaaaaaaaaaaaaaaattgcagtctgggaccatgatcgtgtacgcactgacgggaatgccagtaggtagcgcatggctgtattatcccagtttcacacatgaggctgctggtgacacgaagcccagggatgctgagtgatgtgcgcacagcagagctgcgactcaagcccaccctgcctggcctgcaccaggtggaaccccatgcgcttgcctagcaaggaccagacaccgaggggccgttggttctaggacggcgagggtcagaaggagaggcctgaccggacgcagaggggccgttggttctaggacggtgagggtcagaaggaggggcctgaccggacaccgaggggccattgattctagcacagcgagggtcagaaggagagtcctgactggacactgaggggccgttgtttctagcgcggcgagggtcagaaggagggtcctgctttgtcctgcatggattgttggatctgggctttttagagctcggaggatgaaggagccagaaggcagagcaccatctgggtgtctgagtagatgagacgacttcttccagtgaacatgggttctgtctccatcagagtgaggcgatatatctgagtagatgagacttcatcagaatgaggtgatgtgaggctggagtgaggctgggctgggagtttgccgtggttggctggagctggtggtcgtcgttcagagggagctggcgctggctttggtgttcccttcagtgcagcattttcagcagtggagtcacccattctctgctagaatgcttctcttgtcggaaagctcactacttaatcctatgggggacagctctagtgagcccgaatctgaccccataacttttccccactgttcctgggtctgcagagcaacgtagattaagtctaagcctcgtttttgtttttggagacagagtctggctctgtcacccaggctggagtgcagtggcgcaatcttggctcactgcaacctctgcctcctgagttcaagagattctcctgcctcagcctcctgagtagctgggattacaggtgtgcaccaccacgcccagctaatttttgtagttttagtagagacggggtttcaccatgttggtcagacttgtctcgaactcctggcctcaggtgatctacctgcctcggcctcccaaagtgctaggatgacaggtgtgagccaccgtgaccagccaagtctaagcctctttccacgtggccttcaggtaggtgaagaacatcaacagaatccgacatggctggccgggcgcggtggctcacgcccgtaatcccagcactttgggaggccgaggtgggtggatcacgaggtcaggagatcaagaccatcctggctaacacagtgaaaccccgtctctactaaaaatacaaaaaaaattagccaggcgtggtggcgggcgcctgtagtccctgttacttgggaggctgaggcaggagaatggcgtgaacccgggaggcggagccgagatcgcaccactgcactccagcctgggcgacagagcgagactccgtctccaaaaaaaaaagaattcgacgtggctgctctccctctggccaccctgcccttccctgccacaccttccctgtatggcaggttatcaggccctgtgtcctgcagggcctttgcagtacagcctggtcatctttggtttttttttttctgattattcatattcattcattgtaggtgatttataaaatgcagagaaccacactgaggaaatgcctgcacgtcccgttatcccacggtcccactgctaggctggaaggtgatggcatcagctcccggccagtgctgggggttggtctgtgttatctgccacctcaccgtctacactggcaggccctggagcatcttggtatagacaggcaggcattgagaaagagtctgagactggagacccctgccatgcgcagtgggaaggaccatcacggtcgcttagcaatgtctgccacgggggtgggctgcagtgggggacacgtgaacgcccatgcctctccctgtgccaagtgacgggaacttggaacatcagtgaggccaagactggtcttgagtaacttcgggtccctaccttctgagtcctagaaccacattctgtttcttggaaggaaacagctataggcttgagttccctgtcaaccctcccttccactgaagtgtgacaaggagcttatgactcggggcacaggctatcgtggaagaaagacgcggatcctgttaacccagtacaggctgctgctgagctcagctgcgtggtaggggagtgagcccaggcaccacccctcgggcctggcacagctgccaggccaggttcctgctgtcgagtgtgcggcttgttggggcctgtggcagtggctccttgatacaaagctcgtttcagtgccctgcctttggcagccttgtctgggcaggacttgggcagcgggaagggctaacgatcggccccggggcctgccgacactctggtttgtttacccccgacctctgctctttcttcctctgtttctcccagcccatgaaacccctgaaggccaccgccaccacctcccagcccgtgctcaccatccagcagatcgagaccatcttctacaagatccaggacatctatgagatccacaaggagttctatgacaacctgtgccccaaggtgcaacagtgggacagccaggtcaccatgggccacctcttccagaagctggtgagtctgccagggatggagggtcctcacgcagggcctcagtggagcccatagtgttgcaggagcctcaggagaggaccgggcagccctctcggactccttgaaggcctgagacctctccgagtccgggaggaaggcctgggcctgtgtgttatggggtgcctggggccggggccttgactctaggcctcccctggtgcagccctgggagcttctggggtggtggagacaggctgtgtggataggtccttccaggggtggtggagatgggctgtgtggatgggcacttctgtgggagcaccatctctctcccggagggtgctccttctccctcccggagggtgctccgtctttcccggacggtgctccctctctctcccggagggtgctctgaggaaccagccctggaatgaaggcttcttgctgggcttcagtctcctgtccctcagtgaacagaggggcacatgccgggttaggggcatgaggactgctcccctgagacctcgggtctgtaaaaggaagcagttgggcacactggccgatgatcctctcctgaggtcccaagagcaggaagcactgaagcccagccctgctcaccactgcagggtcgggagcggcaggagtgggtgggttaacatgcagacctcgtgttgggaaacgttcacagaagtcttctggttccctgtgcttctgtgacaccctctcccccagctctgccccatctctggctgtgtcccctggaggacccccaggtcagactcatggagctccctccccacctctgctacgtaacgtctgaccgcccagcaggcaagagggagactgggagtccaggccgcggttcttctctgggtgtgagtggccagaggaccttctcctccttcctgccctgttctctgggtgtgagaggctggaggcctcctcccctcccctgccgtgttctggctgaatggacagggctctgcctttctcacgctggagaagactctccctctcctgcctggacactcctaggacctctagctgagtgtgttcagagctgagctccctgcctccggcgtcacctgctccgcttcctgtctttacctcaccgagtgcttcagactctttctggctgcaccccctcccccacctgtcctgtggactccactttttggccgttgctcacagccgccttttcctcttcttggccacccatggccctcacctggacagctgcgtatcctcctgtgtggctcctgcctccaggcccactcacctcccacccccacctctccttagaggggagagagtcactgaaacctcgacggccccttcagcggatccccacggccctcggatgaaggtcaggctccgaggaatggctcgagagaccctttgcacactgacccgtgtccagccccagccttggcagcttcctccccgcacctctgtgctcctgacactggactttctgttctcagttcccagggcaggcactttcttaactcttggtacttgaggccccgtgtgcctgaaacgtccttccccctctcgtctggcctcccctggtcagttcccagcttagaagggacctcctccaagaaggctttccaagtcgccaaatgcaggccttgtgccagtcctcgtagtgagcactagtaactgcctgactcccccaaaccacaagttccaggaggacggactgcatttcctttttttgttgagacggagtctcactcctgtcgcccaggctggagtgcagtggcgtgatctcggctcactgcaacctcctcctcgcgggttcaagtgattctcctgcctcagcatcccgagtagctgggattacaggcgcccaccatcacacccggctaatttttgtatttttagtagagacggggtttcgccatgtcggccaggctggtctcgaactcctgacctcaggtgatccgcccgcctcggcctcccgaagtgctgggattacaggcgtgagccaccgcgcccggcctgcatttccttcttcttagactcccagaaccagcccagtggtcactgcttgaatgagtgaatgcaccgtgaccttgaccactgggcctcgggagaactcggaagggcatggagggagacgttgcagggcctgagatttctgtcctgagagtcctgtttctccagcacagcttctagagccgtgtcacaaagtgggcttgaatcccagcgctgccagattaaacctgcaactgggcaacttacccaaccgctctgaatcagcttcctcatctgtaaaaaacaggatagtaacagtatttacctcattgggtgattttgaggagttaatatctgaaaactgcatggggctgagtgtggtggctgacgcctgtaatcccagcactttgggaggctgaggctggaagatcacttgaggcttagagttcaagaccagcctgggcaacatagcaagaccctatctctacaaagaaatagaataggcctgactgagcgtggtggctcacgcctgtaatcccagcactttgggaggccggggtgggtggatcgtgaggtcaggagttcgagaccagcctggcctacatggtggaaccccatctctactaaaaatacaaaaaaattagcagggtgtggtggaatgcacctgtagtcccagctactcagggggctgaggcgggagaatcgcttgaacctgggaggcagaggttgcagtgagccaaaaccacaccattgcactccagcctggatgacagactgagactctgtctcaaaaaaaaaaaaaaaaaaaaatggctgggcacagtggctcacgcttataatcccagcaacactttgggaggccaaggtgggcggatcacctgaggtcaggagttcaagaccagcttggccaacatggtgaaaccccgtttctactaaaaatacaaaaattagccgggcatgataacacgcacctgtgatcccagctactactcgggaggctgaggtgggagaatcgcttgaactcgggaggcagaggttgtagtgagccgagatcgtgccactccactccagcctgggcgacaagagcaagactctgtctcaaaaaaagaaatagaatacaataaagtaaaagaaaaagtgcttggaacagggcctggaacatcataaattaataagtactcaataactggtcattatcatcagtgccattattattattattattattattattattattattattattaaattgggaagaggcaccctggaaggtatccttccaagggaatgccacactctggttctagcatacccccccctgctccctccggttcagggatggtgaacacctgtcatcactgcctgctcacctgagctgagtggcctggggggcatcctctcctcatccctcaggagggtagaggagagcaaacctagggttgctggaaacgctgtcacagtttatctttgtcacttggacctggctgtccccggttctggtcttggctccacaggcctggccgtgaatctgctacccaccactttccctccccagcatcgtgaaccgatgcctgaggcccctggggctgcagatttgggagggcccggggggagccgggtcaggtctggcatccggaggtggtttattttcagccgaagactctgggtatttgattattcgttactgagagaagggaattagcgtctctgctgtttgttttatgagatcactccagtgccaggctgctgtttccaggcaacctgcacttcccagttaatgaacctgccaagccaggcctcgggccctaccgcctggggtgactgtggcagcggcagtccctgagattaccgtgaccctggacgcaggcctccgcacggctggctcctgcccctggctcctgggagggtggtgtgccaacccgggcctccaggctttctccttcttgtgggaaagggggcaagaggagccttttcctggaagaatatcggtgatctgactttggcttaggcagcgactgtctagtatgcctcgtgtagcgtgggcattgatgggccgggcctcagtactccctggaaaaggaaataaactccctcccgtccggccccgcccccttttaaggtcaggccccaccccctttaaaactcaggccccgccctcttttaaaagtccggccctgcccccttttaaagtcctgcccttctgcagctgagacctgaatgcctctggccttggcgtcacgccgggcgtccccactcgcgctcccctctggcttttccagatgccccccgctcccctgccccaccagcttcctcaaagggctctgcctctgtactgggaggctccaggctcagccgatgctgcggccagcctgcccccacccctacccccaccccagcctctctgggtccttggggagcatgaggatcctgcagaaagcagagtggtccggggtgggggtccacagcagcccacttcccccagcaccttggtgggaagcagaggcccctgaggaagccaggcagcagctgtatcccccttgctgctgtattgaaaaacatttaaaccagaaactccaaagaataacagcagaaccttctaatgaagaaaatacagcgtcacacatgaaggtggagtctcccctccctcctccctcttgaagcagctactggcatgaatttggtggatagccttccagactgcagtttgtgtgtttactacatatctgtatctattttgggttggcctgtactttaaaaaaaaaaaaaggtcttgctatgttgtccaggctggacttgaactcgggctcaagtgatcctcccacctcagtctcccaagtagcgagggctataggtgtgtgtaccacagctcccagctgcatgtactttaaaaatgtgtctaagccaggcgtggtggctcacgcccgtaatcccagcactttgggaggcggaggcgggtggatcacctgaggtcaggagttcaagaccagcctgaccaatatgacgaaaccctgtctctactaaaaatacaaaaactagccgggtgtggtggtgcgtgcctgtagtcccagttagtcaggaggctgaggcaggagaatcacttgaacccaggaggcggagtttgcagtgagccaagatcgtgccagtgcactccggcctggttgacagagcgagactccatctcaaaaaaaaaaaaaaaagtgtataagtatacacatatatcatattttacagttcaacccatgttcgttttggagcttgtcagcaatcgtattttacagttcaacccatgttcgttttggagcttgtcagcaatgctatgtgtaaatcgggtgcatccatgttcatggctgtgtgcgcggcttcccccgtttgtgagcatttgttaccagtccctccactatgaggaggaaaagtgagatggtgaacacccttgagtcccctggggcacacacataggccatttgctccagagcactgctgtctaatggaaatagcttatgagccacgtacatcatttcacattttctaatacccaccttttttttgtttttttgagacggggtcttgctcttgtcacccaggctggagtgcagtgatgcaatctgggctcactgcaacctccacctcctgggttcaagcgattctcctgccttgtcctcccaagtagctgggactacagatgcgtgccaccacgcccggataattttgtatctttagtggagacagggtttcaccattttggccaggctggtctcgaactgccaaccttaggtgatctgcccgcctcggcctcccaaagtgctgggattacagttgtgagccaccgcgcctggcccctaatacccacatttttaaaagtaaaaataggcaggtgaaattaattttgagaatatcttttatttattcccgcagatccaaatattatttgaacatgtaatcagtatttaaaaattaacgaggtaatttacattctcttttacatactaaggctttggaacccactgtgtattttacatgtccggcacgtctcagtttgaaccggccgtatctcaggtgcttggtagcctcaggtagctggtggcgactgcactgaacgatacggctctgcagtttgtatgtaaaagtggatttgctaagcaatcgatgggctgtgcctatccacactgttattagttcaactgaaaataggccatgcctattctcagctttattagttattaacaaattgctctccaaataattgtactaatttacacttccccgagtagtctaagagtttaaattggccgggcgcggtggctcacgcctgtaatcccagcactttgggaggccgaggcgggtggatcacgaggtcaggagatcgacaccatcctggctaacatggtgaaaccccgtctctactaaaaaaaaatacaaaaaattagcctggcgtggtggcgggcgcctgtagtcccaaccactcaggaggctgaggcaggagaatggcgcgaacctgggaggtggagcttgtagtgagccgagatggcatcactgcattccagcctgggtgacagagcgagactccatctcaaaaaaaaaaaaaaaaaaaagttttaattggccgggcgcagtggctcacacctgtaatcccagcactttgggaggccgaggcaggtggatcacctgaggttgggagtttgagaccagcctgaccaatatggagaaacgccgtctctactaaaaatacaagattagccaggcgtggtggcgggcgcctgtaacgccagctactcgggaggctgaggcaggagaatcccttgaatccgggaggttgcggtgagccgagatcgcaccactgtactgcagcctgggcaacaagagcgaaactccatctcaaaacaaaaacaaaaacagggagtttaaatttccccatatgcttgccagccgttgctgtcaattagacttttaaattttgacccttctgatgagtataaaatatctcgtgatggctttaatttgaatttctaccctttggtcccttaagaggaagtgcttatatacagcgcagcgaagcctttccataaatatttggggaattgacttatggagcctcggtttccccttttgcagaaaggggcgatggggtctgccctgcctctcagaagaggcgaggctctgtgtggttgtgactcaggttgtgactgtgtgagtgacaggcaaacgtgtagtgaggctggggctttggctccttggaggtagaggaggtggaagaggtgaggacggggcctcaaggccaagggaaatggaaagacagcatcttcatttgttgttttgttttctttttgagacggagtcttactctgtcacccaggctggagtgcagtgacacgatcttggttcactgcagcctccacctcttgggttcaagcgattctcctgcctcattctcctgagtacctgggattacaggcacgcgccaccatgcccagctaatttttgtatttttagtagagacggggtttcgccatgttggccaggctggtctggaactcctgacctcaggcctcccaaagtgctggggttacaggcgtgagccgccacgcccggccaagacagcacctttaaatgtcgttccccacgctgcacgtggggagggaggcctgagcaggccacacgtgccagctccccccagcacacacacccccctctctccctgctccggctaattccaggatgtgaaggaagtatgagacattaagggatttcaaaccctgggagaccttcaccgtgctgaggaaagctggatgctgtgaagagttgaatttctagcaggccaacaaaggccctagcctggtctccccaaccccagaccccctcattaaccttattggctgagctggtttccatggaaactgtccagttcaaagggacactgtaatatgttcatccctgcgtttccccaagttcccaacgagctgagtgagaggttttcagtgcaggggagctcccggtgctccgtgaagctttcatccattcattaatcctctcccctcccaccctcctctccctctgttccctgactcctccctgcaggccagccagctcggtgtgtacaaagcgtttgtcgataactataaagtcgctctggagacagctgagaagtgcagccagtccaacaaccagttccagaagatctcagaggtaggccgctccccacatagccaccctgagggacaaggagctttgggggctgctcagagcccttggtctcccctccctcgcttgccagtcggtgaagtggttactctaatgggtaacacttagcctgatatttgctttcttgcacctgacattttccctcttaatagaaaacgatctattttatttatttttttattattctctttcagattagagagaggaacaggggaggcaaaaaaaaaaaaaaaaaaaaaaaatccaaggcagtgttctcccacaccacactatggtgaccttgagcaagtcacgtcccccctcttggcttttatgtcctgtccggtagaatgaggggtttagaaatggccagataatccttttttttttttttttttttttgagacagagtcttgctctgtcgcccaggctggagtgcagtggcgcggtctcggctcactgcaacctctaccccctgggttcaagtgattctcctgcctcagcctcccaagtagctgggattacaggcgcacaccaccacgcctggctaaggtttgtatttttagtagagatgaggttttgccgtgttggccaggctggtctcgaactcgggtgatgtgcccgtctcagcctcccaaagtgctgacattacaggtgcgagccactgagtccagcttggccagctaatcctgaccttgcttgataagaatcactggggcattgtttaaaacacagatttcctggcaccttccccggagcttctgattcagaaggctttgcgtggggcccaagattctatatttgaacaagcttctgggtaatatttatgacagggaagtcttgaggaaatttggactataggtcgtcttttaaggttcttgccaactctaagactgccatcccataaacacaaaaagggtaagagccacttatgtggagaaggagccttagaatccctggccgggaacacgcgtgcttctgctcctgaggcccagccttcctggccaggaacacgcgtgcttctgctcctgaggcccagcctacctggccgggagcacacgtgcttctgctcctgaggcccagccttcctggctgggaacacgcgtgcttctgctcctgaggcccagccttcctcccgcactcctccacagggcagaggtgcagtcctatctgccatcaacatttctacctaagaggtggcatggagggacagttgcttaggatccttcaggacagagcccagttcatccctttgtccaaaaagacctcagtggcacccctgaagcactggcctgagaggaacagcccccagctcagggcaagagaacctccatcctagaaaaggggagaagcttctgcagttttgggagtcctgccgtaaaggcccctcttggccctttgtgttcccgtctcagctctaacgctagaagagttggggaaacgcagggtagttttcctgaaacttcaggggtgacggtcgatgcccacgtttagaatccaccgagaggcagcagagaagctgacagttggagatgaacatgtcaccttcattactgttaaaaaaatgcagcttggaaaatgtggatttggatctgtagccacagtgggcttgctgacacttcgcctctggaatgaaacgtacctatagaagccgggcgtggcggctcacacctgtcatcccagcactttgggaggccgaggcgggcggatcacctgaggtcaggagtttgagaccagcctggccaacgtggcgaaacgccgtctctactaaagatacaaaaattagccgggcgtggtggtgcacacttgtaatcccagctatttgggaggctgagacaggagaatctcttgaacccgggaggtggaggttgcagtgagctgcgatcacgccactgcactccagtctggtgacagagcgagaccctgtctggaaaaaaaaaagtatctattgagtcccttgcaggaataggaaaacacaggcccctctccacaatgaggacagagcccacgcctcttacccagtgtgcagagagaggatggctgaccatagtttcttctcccagacccatggagcagatgtgtcaccctctgcctgggaggacgaagtgcagggtggggaagtccctctccatggagtcaagtggctggagaggccaggtgcagtggctcacgcctgtaatcccagcactttgggaggccgaggcgggagattggcttgagcccaggagttcaagaccggcctgggaaacatggtgaaaccccgtctctattaaaaatacaaataaaaggggctggagaaatggtgctttccctgcggtttccagcccaacccaggaactacctggactcccctggtctgtgttcagatcagccctgccaaggccgcccaagatcccggggtcagacatggtgcagagagtgtggggtcttctcttggcctgggctgattgcctgttctctgtgcctaggcagaaacccccacacccaaccataagcccctcacagcctgcccaccctggagggcagagccaggcccctggctttctgccaggtggcttctcatcctgactcactcgatgacgtgcttgcttcctgctgaggctgccacttaattactgcaattaggctcctctctgcagcaggagtgatttcataccctagacttcactggagggggcgtgaggaaacattcccgaaatctgggagtccaggcaccagccagagacacaggctggggacgctgagtatcccccacccccccgccccccaaaatatacacacacccaagctccatctccaggagttttctctgtctagaaacagcttgagacagaagtaggaagttcctgctgtctgagcgcttcctcccctgcagaccaagcaggtggcatcacctcggcagctgaccttggcctcatcacctgggcagctgaccttggcctcatcacctgggcacctgaccctggcctcatcacctgggcacctgaccgtggcctcaccttgcctcctgccttccctcccacacccctctttgaggctccgtgtgctccgtctgccaagtggggatggtattacagctccagttgcaggctgcactgtcctgttagcaaaagctggggctggaacgtctctaaaggaggataaagaggcttggagcagatgagtcatcccgggggtctttccagtactcactacctgctgcctggcttgggatccaggaggggcattggctgttcctccctcgaagcttcctctcggacccccagcatgggcagtggtgggtggggagtgtcgggggtgctgggggctgagtaagtgctctctgatgggggtaggatgcagctcactgtcctggggagctcagcatctctgccgaaggtccaccacttccctgctggcgtgtgggacccttccttcctacctcatgggttcctcatgccctaaagattggctggagtacctggcgctggtcaactcaaaccctgtctgcccttggccgacgtgtagggttcctgagtcggggttcctgtaatcacagggctccctgccagcctctctcatctctgggacctggagtcccttccttcttgcccacgccccagccactggactccacgaggctccaggagttcacaggtgtggtgcaggggattggggtggcagaggcagcccatggccatggggctcctttgtctttctttttttttttttttttttttttttttttttttttttttgagacagagtctcgccctgttgcccaggctggagtgcaatggtgtgatcttggctcactgcaacctccgcctcccaggttcaagcgattctcctgccccagcctcccaagtagctgggattacaggcacctgacaccacacctggctaacttttgtatttttagtagagatggggtttcaccgtgttgaccaggctggtctcgaacttccgacctcaggtgatccgcccaccacggcctctcaaagtgctgggatgactggcgtgagccgccacacccggcctctgttctcatatgtacaccctgagtttcagaactccccttcttgccaggctcacagtgggggctgggagaggtgagggacagaacaggccatgactcctctcctccctttggcaggaactcaaagtgaaaggtcccaaggactccaaggacagccacacgtctgtcaccatggaaggtacctcggggagcgggctggattacaggcacctacctttgtctggctgtgcaggcaacaggctgcgtgaacgcggcgcccttccccttgtgtgtgcgtgtgtgtgagcgcgtgtgagcgtgagcgtgtgtgagcgcgtgtgagtgtgagctgagtgcgcgtgtgcgcgcacgcgaggactctagcctcgtgcccaggcagccagccagctacaaacgtgctcctctttaggatgccagcaggctgctggctccctccctccctacccctcctccccttccccttccctcctctcctcgccacgcgcctccctcccctcccccttgctggaagagcactccggagcggctgcccgatgctggagtccgtgcggcagcatcagcaaggtggctgagtggccgggctgctggtgggcgccggggagcctggagcgatggctgcacgctcccgccgcggggacagaggctgccatggagattctcctcattattcgcttctgctgtaactgcacctatggtaacccaggtgctcgctgtgggaggtggcggaccctcccacctctgggggccggctggagtgggcttagatgtggccggggaggttagagggccgcagggaaggagggtgggcgagcggctggacctgaattcccccttcgttttggcggcatccagcctagagttgaaacctgggggctgctcagagcagggccgcttgcaaatggaaggaccaggctggaggggtccaggtggccccgaggatcggtggggaattggtgggctagtgtgagagaacttcctggaggggctgttagggagagacggcgacgagctgtgcccgcagacgtagtagccctgaggccagggagagggtctgcgggggccaggcacagcgtggcgatgggtggcgatggtccggacggcggcgttgccagccgagagggtgccagcgcgagccagagggagaagttgggagtttctttgtttctggagagaggcgcggaggctgggcggcacggtattgtgtgctccgcgcacatgcagcagtaggcggaggacacggaggggctgtgggagcaggaaggagaggtttgtttccagccgtgagagacccccagccgaggtctgggccctcaactgtggaaggcaggtcggcagggccagcgggagaggggtgtggcaagctactctgtgaaggtcacacacacacacacacacacacacaccacctttcggtggaagggacccggaccatcctccttgcagctcccgcagctggctgggggctggggggaagtcccgggacaggtgcatgtcatcaacacgactgtcggtcgtaggaggatgaagccggcccaggtagggaggtgtccagaagcccgtggaccctgcctcaagaggcaagacgtgccaaggggtgccctgcctgcctgtggcagggagtggggtgggcacgtgtggctcccaggccggctgctctgggcctgagtctgtgggagcagcaggcggctggttttaggaccttcctcttccttcccaccaggtgtttcggctctgcacccttctcagtcactttgctttcctatctccctggtaacctggagctccttggagctccttgtcgaaggctgacttgagggggatggtggcttgccggaagagagatggcaggtttcctgggctccttcccaggggcggctgtgctggaggggctgtgtggggccagtgccccctgaccttctcaggaccctcttgatggaagcaagctctgaggcagcctctctcctgcggcccagcagggcggctgcaggaaccctgttctcacttgaaattggcctggtcagcgatcagaggagaaatggtctttttggtctggcctaggagttggtcaggtcttgactctgcctccctgaaaaggaaacgtacccttggcttcctctcccttccccaaaaggaagcttcgactcagtgaaacggacctgggacctggagttcacgttgcttcggtctccgtgatactgttgttgaagtcggcttcaaagtggggaatgaggagtgaaagggccagctcgtgaggagggggctcaccccatcctggtcactctttccaagaacgctcctgtggttcattgaggttttacaggtgctgcctttccctgaagaaggtgcagctcaaagcaaggagtgcgggtggatctacccagctcccaccacttgtagccacaagtctctggcctcagttgccttgtctgtaaaatggggctagtgagaattgcttcccgttttaatcacaggaaataatgagagcaaagcagttaactcagtacccttgggcacagagcgagtacccagcaaactagagagagaccagcttgctgcccaagtcagtgtcagtggagagggagagtgggtgaggccgggcaggaagcaggccagcctgcaggagcccagggacaggggaagggccagagcgagtgcctcaccctgagttctcaggggaccccagcgtgcaggggccgtggggagcacaaacttcagggccgctcttattcccccggttccctccgtatctgatgtggtcccagtgccgccaccccccccacccccaccccccccgtgcacctgccctcctggccgcccttccagggctcattccacagccttactcaggtggactctggaggtgaccacagacatgttaataacccctctgaaacccaacctgccatgtgttcagacctctgagcttagtcagaaacctcttcctcttgggacccaagagagggctgcggggagccgataatgcagtgtcagctttctgtggagccgccactccggagcccaccctggcaggtgtctgctgagcttgtgctttcttttgggtctctggggttctccagtgtgattttttccccctgaagatgggctgagccacaggtgggtgccttaaacagcctcagaaatggatcccacctgagctaggacctgggctgcaccctcagtgccgaggataccccaagactggcctcattccttcaagcttccatggcccatggggagggtctctggaaactgctagataagaaagggctacagatatgtcatatgaagtgtatttacgtaaaccagtggttggccgggtactcatgcctgtaatcccaacttttggcagactgaggcaggaggattgcttgaggccaggagttcgagaccagcttgtatttggcttgaggccaggagttcgagaccagcaacatagtgagaccttgtctctatatttatttttatttaaacgaagactcactgtgtcgcccaggctggagtgcaatggcgcaatctcagctcactgcaacctctgcctcctggattcaagagattcccctgcctcagcctcccaagtagttgggattataggcgcctgccaccacacctggctaatttttgtatttttagtagagatggggtttcaccatgttggccaggctgttcttgaactcctgacctcaaatgatccacccgcttcggcctcccaaagtgctgggattacaggcgtgagccaccctgcccggcccctcgtctctatatttttaaaaaaattaaaataaatacataaataaaacataaagcagtggttttcaaccattattatacattcaaatcagtaaagaagctttatagaaatgctgatggcccttgtggtcttgcagagatttgggttgagttgacggggctggggagcagcatctgtatcttttaaccgctcccccagtgattccgacaggcagccaagctcggactgcgggtaaggctggtggccctgctgaggctgcattttcttcacagccagcagattgctccctgaagtgtctgcttagccgcgcacggggtatttatatctcaggctttggagaactatcaggtttggggcccggctagggcgtgcgtgttcacgctgggacctgtcacaacctggtcttatgggacacccagtctgggatccttcttcccagatgaccaacctgcctctgtcactgcccctgcggcaggaggcccaaggtcatgaccccagggacagagcatccaggtgcaggactgaagctgagcctcctgttgggagggtgggcgcagccgcgtacaggaagggtgttgggaagtgttgatccaccagctgccacctccacctgtccctgctgaatcccagccatcctcacttggtgtccgggttgtggagggtgtggctcttgggggcctgggctggccttgcctgcgtcctcccagcctctttggggctctcatatgtgaggcctaacctgagttgcttcaggaaacctttgcccctcaggctgccacgtgtttgagagcacagccttttttctttttttttgagatggagttttgctcttgttacccaggctggagtgcagtggcatgatcttggctcgctacaacttccgcctcccgggttcaagtgatttccctgcctcagcctcccaaatagctgggattacaggcatgtgccaccacgcctggctaatttttgtatttttaatagagatggggtttcactggttggccaggctggcctcggggagcagagcctttctgtggagatcaggccagcctcctggcctccagcctccctgcctccagccttcctgtgctttgctatctggggtttgaggatgtggggaggggtctttcctctgagagatgaggccagtcctgtggatcacagtgaggcatgccaatcccagctggctgtgcctggccttcagctccaggagcctgagaatgataaggtctggagagctgcccttcctggaaacacagcatgtctccttcccccattctggggtcctgcatgtggcaggtgtgctagactctgcagggcatggctgggtggagctgtgtgattctggggttctgcgtgtggcaggtatgctggactctgcggggcgtggctgggtggagctgtgtgattctggggtcctgcatgtggcaggtgtgctagactctgcagggcatggctgggtggagctgtgtgattctggggttctgcgtgtggcaggtgtgctggactctacggggcgtggctgggtggagctgtgtgattctggggtcctgcgtgtggcaggtgtgctagactctgcggggcgtggctgggtggagctgtgtgattctggggtcctgcgtgtggcaggtgtgctggactcttcggggcgtggctgggtggagctgtgtgattctggggtcctgcgtgtggcaggtgtgctggactcttcggggcgtggctgggtggagctgtgtgattcagggctgggggtccaggagagcatctgccttgagccaggtgaggccaggacaggcctggggaggggggcggggcggctctcgatgaagccatgtctgatgggagaggaggcagggctgcggagggagcaggggctgccagggctgtgtgtcacctgtgtctgctgtttggtcggcccggggagtgagaacagaggtgggggctgccgtgggctcactctggtgtccctcgaggggtgttcacgtgggaagcatgcgggtggggggacgaagctggtctctggggtgttgggttgccctcgtccatcatcctcttcctccttctccctgtctcccccgacagctctgctctacaagcccattgaccgggtcactcggagcaccctagtcctacacgtgagtgtcaagcctccgaatggccagagagggcttaggagttcagtggaagactgagcctgggtgagagggtgctggagtcaccgagaacagtccacctggggaatcaggggttcctaggctccaaggatgcctgtctggcccgcggtatccatgccgccaggctagggcctgaatacagcttggctactaagcttgacgtggccaggtgctcccggggaggcaggcattcctgcttccccacccgctgcctcctggtctccagtgtccttggagcagctgcagggcagacacagggtttctctcccagctgctcggggggatgagcctccacctggtctccacactggggagagagtatgactgtggccaggagaagagggggcagccagggccctctcccctgctgtgctggctctgattttttttttttttttttttttttgaggcggagtctcactctgtcacccaggctggagtgcagtggtgcgatctcggctcactgcaacctctgcctcctgggttcaagcaattctcctgcctcagcctcccgagtagctgggactacaggcgcccgccaccacgcccagctaatttttatatttttactagagatggggtttcaccacgttgcccaggctggtctcgaacttctgacctcaagagatcccccgcctcggcctcccaaagtgctgggatttcaggcatgagccgccgtgcccggcctgactctgatttgtagttcagattttgcgggaattaggcaggtccctgagtgcccaccctttggatggggactgagcactccccggtggccacacatcaggccccagagccgctcccctcaactcaccgcctcacccttcccaggacctgctgaagcacacacctgtggaccaccccgactacccgctgctgcaggatgccctccgcatctcccagaacttcctgtccagcatcaacgaggacatcgacccccgccggactgcagtgacaacgcccaagggggaggtgagctcagagcccggcacggcccctcacccaggctgagaagtatcaggtccctcgtccccttctctcacacacgggcggcaggtccctcgtccccttctctcacacacgggcggcaggtccctcgtccccttctctcacacacgggcggcaggtccctcgtccccttctctcacacacgggcggcaggtccctcgtccccttctctcacacacgggcggcaggtccctcgtccccttctctcacacacgggcggcaccgggtgcctcctgcctctccaatcctgatcccccattcccagccaaggagaggttttcagcccttggtcaccctgatgacctgcagctttccaggccctaggctgagaagtttaagtccagtgtctcattaatcctcataataatctagggaggccgggcacggtggctcacacctgtaatcccagcactttgggaggctgaggcaggtggatcacttgagttagaagtttgagaccagcctggccaacatggtgaagccccgtctttactaaaaatacaaaaattagctgggcgtggtggcggatgcctgtagtgccagctactcaggaggctgaggcaggagaattgcttgaacccaggaggcggaggttacagtgagccgagatcgcaccactgcactccagcctgggtgacagagtgagactccatctcagaaataataataacaatccagtgagccagaagaacctgaggctggggagtctctccaggtccaccacgcagtctttcagccactggtgtcagagctggattcctcacctgggactgtctggaggcccacgccggggaagtggcctccgggtgcctcattcttgaatgcagacacctgcctctggccagtgtgatgccgtcagggtctcctaggaagcgaagggagcaggagcttggagctgcttcagctcggcctgcacacgcagtggcttgcggggagcccacagcaggaaaggctggcgttggaggtggtggaggccgtccaggttgccggaatgtccagtgggcacctgcatgtgggacagccgttccctgggggcccttcttgatgcaagggtggggacagcccagcaaggggagtaccaggaagcatgagagggacagttgccttcgtggattggcagccgggcccgggtgaaaggcttcctgtccaggggaggccattaggcggccgttacgagtgaggctgacagggtgtctgctcctgtggtctgtttacgagcccccagggtctcctggggagaaagtggtgagggacaggcctggacagtgtccactgggcagagagagccgattccgtgcggctcctggtgctgatgtgcagcgtctggggatcccgtcgtctgttttactctggggatatctgaaaaatctccagagggcttagcgtaccctccgttttcagtcatcctttttttgagactgaatctcattccatcgtccaggctggagtgcaatggcgtgacctcagctccactgcagcctccaccctctgggttcaagcaattctcctgcctcatcctcccaagtagctgagattacaggcaggcgtcaccatgtctggctagtttttgtatttttagtagagacggggtttcgccacgttggccaggctggtctcaaactcctgacctcaggtgatccacccgcctcagcctcccaaattgctgggatgacaggtgtgaaccactgcgcccggcctcggtcatcttaattgtatactttgaatacgctcacctacgtattacagcagatgtaggtcacaccgtgtatcatacaggaaaggctggcacagatggggacgaccccccggctctgagcgggggttggaaactctggaactcccacgtggagcagaaaccacccagagcccaggttagagttggctgcaggtcccctctgggcactgctgcagtcccaggctggagggcccaggtctcatccccagggggctggagaagccagggaggagtagcacagacaggcctgagtgggtctcgggtctcgggtctcggttgagccggggctagatgaagttcgccgccgcggtcgggagggattgcaaacggggatgttcgtgccccagggtggagaaaccaggtcgtcccgggcagggggctccagggttagccgcggagagccccgtgcgttgcacacacttaatgtgccaggcactgtgctgtttcacatgcaccatctcgatgagtcaccttatgaggcagacctcactgtccgcacttaacagaaggtgaatctgggattcagagaggtcagggagcctgtctgagatcacagctgagaagcctgttggcattcaaacccatgcccatgtgactccaaaggcagtgcttgaaccacctttggttaagggatgacaggctatgccgcctctcggtccagtcctccctggctggccgtgcccccgtgtgcaggctctgccctcggccgcattcccctctgagcaggctggggggtctgccatctccctcagacgcgacagctggtgaaggacggcttcctggtggaagtgtcagagagctcccggaagctgcggcacgtcttcctctttacagatgtcctactgtgtgccaagctgaagaagacctctgcagggtgagtgtgtgagtccaggggcacggggcgggggagggggtccggacctctgcggggtgagtgtgcgagtccggggcgggggagggggtcctgacctctgcggggtgagtgtgcgagtccaggggcgggggagggggtccggacctctgcgaggtgagtgtgtgagtccaggggcgggggagggggtcctgacctctgcggggtgagtgtgtgagtccagtggcacagggcgggggagggaggccggaccctgccacccatggagccttcagcaactttgttggttttttttcttttgagacagggtcttgctctgttgcccaggctggagtgcagtggtgcgatctcggctcactgcaacctctgcctcccgggttcaagcgattttcctgcctcagcctcctgagtagctgggattacaggtgcacgccaccatgccaccatgtctggctaatttttgtatttttagtagagacggggttttgccatgttggccaggctgatctcaaactcccaacctcaggtgatctgcccgcctcggcctcccaaagtgctgggattacaggcatgagccaccgcgcctggccggttttttccttttaaaaactatattaattaacttaatttcactacatagccttttttcctgaaagtaagtcatgtttttaattataaagataatataaggccattggaggaaaccccgtcccccactgaagcatgaggtccgactcctgccgcgctgcttccttccctgtttttaaatgttctcatgtttcttcacacagtcgtaatcactgtgaatgcccaatttggggctctgctgtttctgtttcgtgtcataagcattttccctgttgctgcctcatcttcataatcatccttttactttcctgcacgatgttacccgtagatgtgccatcgtctacttaagcattctccttttattagacatctctgaatttctgctaactgcagtgctgtgaatattcaccacgtctcctgctactatttattgagggtttatgccatgccaggtgccgtgacacatgctttgaatacatgatttctagtcctcccaacacctccacaaagtagcgactgttgttccctaatcatagatgagagaggagtcttggagaaggtaaataagcagcccaagctcgcacagctagaggcacaggtgggactggaaccccaagctgacgtgcaaactcctttgagcctccttctctctacccgggagggtgggactggaaccccaagctgatgtgcaagctcctttgagcctccttctctctacccgggagtgtgggtctgctctgtgccttgagcagaggctcattctgcgttcattcacacattcttccacccacacttagtgatcaactgcagtgtgccaagcacaccccttctcacggctgagaagcggcagtctggattcaaacccgtgtctgtgggactcgtttaccatcaggctatcttgcctctcccttcagccctccctggttggctgtgcccccaagtacagcacaggggactccacagccagtgtgttacaccaccaggctatcctacctctcccttcagccctccctggctggctgtgcccccaagtatagctcagggggagcaagccccacgcccacctcaacactcaagggtcagaatgagaagtgcaaatctaagtcctaggggaaggatcgatgattatgaacgtcaataaagggatgactgggcgggcacggtggcttatgcctgtaatcccagcactttgggaggccaaggcgggtggatcacctgaggtcaggagtttgagaccagcctggccaacatggcaaaactccgtctctactgaaagtacaaaaattagctgggtgtgatggcaggcacctataatcccagctacttgggagaatgaggtgggagaatcgcttgaaccctggaggcagaggttggagtgagtggagatcgcgccattgcactccagcctgggaacaagagcaaaactccatctcacaaaataaaaataatttaaaaaataataataataaaggacatgactccctggaactagatcatgtttgagatagttctgaggcagagatggcaataataagcacacatgcttctgcctgtcgtcctttgcgatggcagacattactaatcacatatgcctctgcctgctgtcctttgccatggcagacatcactaatcaactagggcacactttcttgctagacttggatgtggctttgtaatcctccacccagtgttgacccatgtgaccactcttgataagaggtggcatttggaataacacctgtattccattgctagcctgaaggatattgaacacggatagtctagaagggagggaggggattgtggtggggaataggaaaatgtgagcccagccaggaaggcttcgctcttcttgatacctaagtggtttgggatgtttgacaacatgagtcatctgggccagaagcctggtaaggtgaaggggcggagttgctccctgcgggcggggcggaccccagaacccagctttcatcactccagtgtgtgtttcccaatcaggctcctcaggagcagggatcgttcttgcttctggcgagttctcagtcaacccctgtcagtggttctgtggttctggacccaagagttgaggctggaagagccaggctccctctggctcatggctccctctggctcgtttgcaggaagcaccagcagtatgactgtaagtggtacatccccctggccgacctggtgtttccatcccccgaggagtctgaggccagcccccaggtgcaccccttcccagaccatgagctggaggacatgaagatgaagatctctgccctcaagagtgaaatccagaaggaggtgagcagagcttggtatctgagcctggggccctttgagccagctgtgttgggggaggtggaggcaggaagttgtaaggtttgagactttgagagggagccttgagtgtgtagttactaagggaaagaccccgactacagtagctccaagcagatcgagggggtcagtgctcaggatttcatagggctaacatgggaagtgccctggaaagcagtgcatgttgaacacgatagaaaggggaagcaagtagccaggcgcagtggctcacacctgtaatcccagcactttggaaggccgaggcaggtggatcacctgaggccaggagttcgagaccagcctggccaacatggcaaaaccctgtctctactaaaagtacaaaaattagcagagtgtggtggtgggcacctgtaatcccagctactcgggaggctgaggcagtagaatggcttgaacccgggaggtggaggttgcagtgagccaagaacatgccaatgcactccagtctaggcaatagagtgagattctgtcaaaaacaaaaaaaaaaagtggaggtagagggaagcaagagaagaaaaagcaggcttttgtaaggaaaagcaggacctgtgcaaggaaaaggacctgggaggcctctcagaaactgacagatcaagtaggcaaataaataaggagagagaggacctgaatgccacaattaacatgcttgacttaaaaatgcagagaagcttgtgccctgacagaaaactgagattcttgtcacacacgtttgggaccttcacatttatcctataataggccactaaggaaatctcaaaatttttctgcaagttgatagcatacaagtcatgttcacagaccacagtggagtaaaattagaagtgaacaagaatattggtcagcctgggtgcagtggctcacacctttaatcccagaactttgggaggctgaggatggtggatcgcctgaggtcaggaattcaagatcagcctggccaacatggtaaaaatccatctctactaaaaatacaaaattatccaggcgtggtggatcatgcctgtaatcccagcactttaggaggcccaggcaggcaggtcacctgaggtcaggagtttgagaccagcctggccaacatggtgaaaccccatttctactgaaaatacaaaattagcctggcgtggtggcttccgcctgtaatcccagctactcaggaggctgagacaggagaattgcttgaacctgggaggcagaggttgcattgagctgagattccgctgctgcactccagcctgagcaacagagtgagactgtctcaaaaaaaaaaaaaaaaaaaaaaagcattggtttggaaagttcaaactgacaaggtaaagaggaaatcaaaattcaaaatgagaactgcaaactgtttagtgctgtctggaaatgagtgtactacataccagtacccatggatgcagccaaagtgctgtttagaggaacatgaatagccctcagttcacataacaacagtgtctagaggaacatgcatagccctcagttcacataacaacagcgtctagaggaacatgcatagccctcagttcacataacaacagcgtctagaggaacatgcatagccctcagttcacataacaacagcgtctagaggaacatgcatagccctcagttcacgtaacagcagcgtctagaggaacatgcatagccctcagttcacgtaacagcagcatctagaggaacatgcatagccctcagttcacgtaacaacagtgtctagaggaacatgcatagccctcagttcacgtaacagcagtgtctagaggaacatgcatagccctcagttcacgtaacagcagtgtctagaggaacatgcatagccctcagttcacataacaacagcgtctagaggaacatgcatagccctcagttcacgtaacagcagcgtctagaggaacatgcatagccctcagttcacgtaacagcagcgtctagaggaacatgcatagccctcagttcacgtaacaacagtgtctagaggaacatgcatagccctcagttcacgtaacagcagtgtctagaggaacatgcatagccctcagttcacgtaacagcagtgtctagaggaacatgcatagccctcagttcacataacagcagtgtctagaggaacatgcatagccctcagttcacataacaacagtgtctagaggaacatgcatagccctcagttcatgtaacaacagtgtctagaggaacatgcatagccctcagttcacataacaacagtgtctagaggaacatgcatagccctcagttcacataacaacagtgtctagaggaacatgcatagccctcagttcacgtaacagcagtgtctagaggaacatgtatagccctcagttcacgtaacaacagtgtctagaggaacatgcatagccctcagttcacataacaacagtgtctagaggaacatacatagccctcagttcacataacagcagtgtctagaggaacatgcatagccctcagttcacataacaacagtgtctagaggaacatgcatagccctcagttcacataacaacagtgtctagaggaacatgcatagccctcagttcacgtaacagcagtgctagaggaacatgcatagccctcagttcacataacaacagtgtctagaggaacatgcatagccctcagttcacataacagcagtgtctagaggaacatgcatagccctcagttcacataacaacagcgtctggaggaacatgcatagccctcagttcacataacaacagtgtctggaggaacatgcatagccctcagtttacataacagcagcgtctagaggaacatgcatagccctcagttcacgtaacaacagtgtctagaggaacatgcatagccctcagttcacataacagtgtctagaggaacatgcatagccctcagttcacataacaacagtgtctagaggaacatgtatagccctcagttcacgtaacaacagtgtctagaggaacatgcatagccctcagttcacataacaacagtgtctagaggaacatgcataaccctcagttcacataacagtgtctagaggaacatgcatagccctcagttcacataacaacagtgtctagaggaacatgcatagccctcagttcacataacaacagtgtctggaggaacatgcatagccctcagttcacgtaacagcagtgctagaggaacatgcatagccctcagttcacgtaacaacagtgtctagaggaacatgcatagccctcagttcacataacagcagtgtctagaggaacatgcatagccctcagttcacataacaacagtgtctggaggaacatgcatagccctcagttcacataacaacagtgtctagaggaacatgcatagccctcagttcacataacagcagcgtctagaggaacatgcatagccctcagttcacgtaacaacagtgtctagagcaacatgcatagccctcagttcacataacagtgtctagaggaacatgcatagccctcagttcacataacaacagtgtctagaggaacatgcatagccctcagttcacataacaacagcgtctagaggaacatgcatagccctcagttcacgtaacaacagtgtctagaggaacatgcatagccctcagttcacgtaacagcagtgtctagaggaacatgtatagccctcagttcacgtaacaacagtgtctagaggaacatgcatagccctcagttcacgtaacagcagtgtctagaggaacatgcatagccctcagttcacgtaacagcagtgtctagaggaacatgtatagccctcagttcacgtaacaacagtgtctagaggaacatgcatagccctcagttcacgtaacagcagtgctagaggaacatgcatagccctcagttcacataacaacagtgtctagaggaacatgcatagccctcagttcacataacagcagtgtctagaggaacatgcatagccctcagttcacataacaacagcgtctagaggaacatgcatagccctcagttcacataacaacagtgtctagaggaacatgcatagccctcagttcacataacagcagcatctagaggaacatgcatagccctcagttcacgtaacaacagcatctagaggaacatgcatagccctcagttcacataacagtgtctagaggaacatgcatagccctcagttcacataacaacagtgtctagaggaacatgcatagccctcagttcacataacaacagcgtctagaggaacatgcatagccctcagttcacgtaacaacagtgtctagaggaacatgcatagccctcagttcacataatagcagtgtctagaggaacatgtatagccctcagttcacataacaacagtgtctagaggaacatgcatagccctcagttcacataacaacagtgtctagaggaacatgcataaccctcagttcacataacagtgtctagaggaacatgcatagccctcagttcacataacaacagtgtctagaggaacatgcatatccctcagttcacataacaacagtgtctggaggaacatgcatagccctcagttcacgtaacagcagtgctagaggaacatgcatagccctcagttcacgtaacaacagtgtctagaggaacatgcatagccctcagttcacataacagcagcgtctagaggaacatgcatagccctcagttcacataacaacagtgtctggaggaacatgcatagccctcagttcacataacaacagtgtctagaggaacatgcatagccctcagttcacataacagcagcgtctagaggaacatgcatagccctcagttcacgtaacaacagtgtctagaggaaggcaccacgggaggagcatccctgtgagtggaggaagggcctggagcggtttggtcagcttggtctgttttcctcacctctcaggttcagcttaggcctcaccacccctgggaagcttctctgacacccacgcccaccacagtcttggttgggtgccctgtccccagatcctgtggctttttgttcacctgtggctttgcttaaatggtactgaattgtaattgcattgtcagactcctctcttccccactggaatttgaactccagggacagcgctattttcttctgttccatgttcctcatattcgacacgtagaaaacaggtggttagggcccagcatggtggtttacaccggtaatcccagtactttgggaggctgagacgggtgggtcacttgaggccaggagttcaagaccagcctggccaacatcatgaagccccgtctctatgaaaaatacaaaagttagccgggtgtggtggtgggtgcctgtaatcccagccacatgggaggctgaggcaaaagaattgtgtgaacccgggaggtggaggttgcagtgagccgagatcacgccactgcactccagcctgggcaacagagtgagtgggactccatctcaaaaaaaaaaaggcacttagtaaacaaacaattattgaagaaaacataaccagatggcctctctgaggatcctttcaactcaagcatctccctttgaacaggggaaagcaagatcaccattacagccccaggagtgttcagggctgggggatgtcctaggacagagggtccaactggtggtacatctgcccagagggcttcctcgccagcacagctgtccccctcctgaacggctgggccctgcccacagtgcccgcccaggagcatcctgcgtgcctgtttcccacccgcccctgggaggcttgctgcctccccgttgccccagctgtgcagacgtggccttgtgcccagtcgagtcaacagtcaacactcagtgagccccactggctgtgctgcctggggtgtgccgggtgcctcatgtatatccctgtccagtggaggaagcagacacgccccttgctgaccacagagtgtggtacatgtgagtcactggagaggcacaggtgccgtcctctgagtcacagaagaagcagtgatttgttttttgttttttgtttttttttgagatggagtctcactttgtcactgtcgcccaggctggagtgcagtggcacaatctcggctcactgcaacctccacctcccgggttcaagcaattcttctacctcagcctcctgagtagctgggaataaaggcgtccgccaccacgcctggctaattttttgtatttttagtagagacggggtttcaccgtgttagccaggctggtctcaaactcctgacctcatgatccacccgccccggcctcccaaagtgctgggatgacaggtgtgagccaccgtgctcagccttgttctcttgataataattttttaaattttcatgttttttctaatccccaatataatactggctggttttaatgagaaatgctcgtagtaccagcatgtacagggtaaagctggtcgccactcacctcccactgctgacagtttgaggtgtattcttctgaactcttctttgcttatgctggtgtgcgcccgcgtgtccaatgagactagactacacgtgctgttttgcaacttcagcattttactccacagtgggtctttgagccctttggatgtatcagattctttttctttctttttgaggtagagtctcgctctgtcacccaggctggagtgcactggtgagatttgggctcactggaacttccacctcccgggttcaagcgattctcgtgcctcagcctcccgagtagctgggattacaggcgcccgccaccacgcccggtagtttttgcatttttagtagagacggagtttcaccacgttggccagggtggtctcgaactcctgacctcaaacgatccgcccacctcggcctcccaaagtgctgggattacaggcgtgagccaccgcgcctggcagtatcagattctttttaacaactgcctcctgctctgtcgcttggctgcatacaaatgtttttgggtgtttggattgtctctgattcttcgctcttagcaggcaagtcaacagtaaacatcactgcgcaggtgcctctgcagtaggttccctccaggtgggatgggcagggcagggtgagtgtgcgcttaattgacaggcttttacctctgaaaaagctgtgactggtggcattccccctgcggtgtgtgagggtgactgtcccccacagtgtcacaacactggctgtgaacattctttacaattttgccagtccagtgggttaaaaagaacaaaacaccatagaggtgaattctaactgaggagcttgaggatggccttgggagctgagacttgaagcataatggtggttaataaaagggagggggtcctttacgaaacagacagaaacttggaacattgagggagcaggctctgcccgcagaggatgaatgtctggtgagagggggaggctgagccgacgggacctggtgggttgtctgccgggcagggaggctggaaccctgccatgggggccttggtgccaggctagcaggtggggcttcaggctgaaaggtgtctgaggtttctttaagcaggtgtctctgttgtacccaggatttaatgtgtagaggcagcagagtgacagtacagagaggttaatactactgtaatatttgtattatttagggttctcaagagaaggaggcatagcaccccgcccagggccacgtggagaggtgccagctttgaacaggaggcaggaatggaaagaaagtgtggccacagcttttctgtggagaaacagggcagggaaagggcttggcaccagctggcttccgttatgtcggcagccctgggctagaggagtggtctctggtgacctggtccctggccctgggtgacgtggggcagaggagatgctggcttggcgagtgagcgtcaggtagagaaggtggttggggacatgggctctggatcagtgggtgtgtgtatgaaagctgtgctcatagggcatcactgacaggcttaggaattagtgagccctgtgggggagcagtttctcacccagctacccgcctctcctgccacaagatgtcaaaacatcacgaaatacggaaaatgtaaagagcatgttaacacacagtggagtgtcgtgcttagtgctgctcgtgagaaaggcccgagtgtgaggggaaccctctgtgtccccatctcctgcagaaagccaacaaaggccagagccgggccatcgagcgcctgaagaagaagatgtttgagaatgagttcctgctgctgctcaactcccccacaatcccgttcaggatccacaatcggaatggaaaggtcaggatgggtgggggtgggaccaagacagccccttccttagtccagagcagcccactctgtggctcctggccctgacctgtacgaaccggaaactcaggccccctcttcctgaggaggctgccatggctccagctgttgactcgctctcccctctcgtgtggaatgagtgccctctgctggccgtccctggcacagccgctcctgtcaccttggcttcccaggaaggagctcccccttcacccacccacccccagctgcctcctcctgcaaggtcagctgtgcctggataaggaggagctttgggccgggcacagtggctcatgcctgtcatcccagcactttgggaggctgaggcaggcgaatcacctgaggtcaagagtttgagaccagcctggccaacatggcaaaactctgtctctactaaaaacacaaaaattagccgggcgtggtggtgggcacctgtaatcccagctactcaggaggctgaggcaggagattggcgtgaacccgggaggtggaggttgcagtgagccgagattttgccattgcactagagcctgggcaacaagagcgagactctgtctcaaaaaaaaaaaaaaaaaaaagataaaaggagctttgttggggtccccaggatctgggagtacgctttgcctgactgtggtcacccactttatgcttatctcctctcttcagagttacctgttcctactgtcctcggactacgagaggtcagagtggagagaagcaattcagaaactacagaagaagggtaaattcctgcctcttccacgctccccaatgatgtccgtggcattgatgggccttttgtatttctaagcgtttcatgtccagtatcacgtctttggccctcgcagtcaccctcagaggtgccagggtgagcgtttaaggatgttacggattaattgagacccaaagaatctaactgattggctgaaagacatgatgatttagtcctgggactggacccagagcccagcctgggctttctctctctctctacctctctctctctctcacacacacacacacagagacacacacacacacacacacacacacatacacacatacacagaggctgggtacggtggcttacgcctgtaatcccagtcaggagtttgagatcagcctgggcaacgtggtgaaaccccgtctctactaaaaacacaaaaattagccaggtgtggtggtgggcacctgtaatcccagctactcaggaggctgaagcaggagaatcccttgaacctgagaggcggaggttgcagtgagctgagatcacagcactgcactccagcctgggcgacagagtgagactccgtttaaaaaaaaaacgaaaacaaaacgcatacaccacacacacacacacacacacacacacacacacacacacacacacacacacacacacaaacctcttcagttagattctcctactctgacccctctcgcagcatctacaccagtcctgctgtgtccacaaatccttccccctccctcgcaaggaccaagtctgccccagggattaagccgtcttcctgcagcagcccccagggaagagcagccggtcctggtggaccagtgcccacgctcccttctctctcggctctccctccagatctccaggcctttgtcctgagctcagtggagctccaggtgctcacaggatcctgtttcaagcttaggactgtacacaacattcctgtcaccagcaataaagacggtaagctcgggaaccagaggtggcccaaccggcaggtcccagccctcagagcgtggccggcttcccgtaaggactcagacagacatgtggctgtaaatggctgatccctgctcggctgtgctgagactgttgagtggccaggacacagcttgggtaggggtgactgtctactgagttcccagatgaccccagcttttccttgggcccctctgtctggcttgggagaactggcaccctggtgcactgagattgtgctgttaatatattcatgagagagcagacccggtagataaaatggtgtatgggaaatgaggctggaagtttccagggaccagctcttgaaaggccttgaatcccaagcaagggagtttggaattcatgctgtaagcccgggagtctgggggggttttgagcagtggggagctgtgatcagggctgggaactgaccggagtgggtgtattctagctgcctgtgtgctgggaaagggtccactttgtgaacggggtcctgaaggcaagctttcctcgacataaatcattagcagaatgatttatcatattggtcagttttcagtgccaggataggcaggatttggagggagagacagtacccatggggaatggtactaagtccctgggccaggatggtgggtgtgctggacccccccaggctgagtggaggagagaaggaccccctagccctaccccgggcagctcacatataaggccgccgtggccttcggaaactttttcatctggccaccaggtggtgatgttggaccaagactcagctgagtctcataccccgtctgcctcccgccggcctggggtggaggctgaggggatccgctgaccaccctctgccctgggggcttttctctcttgcagacgatgagtctccaggactctatggcttccttcatgtcatcgtccactctgccaagggatttaagcaatcagccagtaagtgccctggccaggacgaggttgggtgggccattgtggattctgcactgctctgcccaggatggggccctgccagcacgcctttagacatggggcattcccctggaggccagaaaccagctcctcttggcagggaggtcacccctggcctttgtctccaaagtcctctttctcaagccctccctgaagctgtctgaaacctaggggccgggcgcggtggctcacccctgtaatcccagcactttgggaggcccaggcgggcggatcacgaggtcaggagttcgagaccatccgggccaacatggtgaaaccccgtctctactaaaaatactaaaattagcgtgggcatggcggtggacgcctgtagtcccagctacttgggaggctgaggccagagaatcccttgaacccgggaggcggaggttgctgtgagctgagatcatggcattgcactccaccctgggcgacagagcgagaatccgtctcaaaaaaaaaaaaaagaaaccgagtgcgacaaacacgtggactccaacttcatatctgagggcgacaaacacgtggactccaacttcatatctgcccatgacaagctgtgtgaccttgggcaagtttcttaacctctctgggcctccactaaaaggcagtcacgcttgtgaattttgacccgagagcaggctgggatatgatcgtgtgtgtgcaacgctggtgtgctgccacgctcatcgctttttctccccttcccccttgtgggttcctcatactaaatctgtttttagtgtctcacaaagtaggattgcactttttaatttttaaaaaatttttttttagagacaggttctccccatgttggccaggctggtcttgaactcctgggctcaagccatcctcccacctcagcctcccaaagtgctgagattacaggcgtgagctgctgcgcccggcctggttgcgctttttatctacctgttatccacacgggaatctgtgagtcagttagacagctaatagtttctacccatttgccagaggaggtaaccgagtcacagagaggagaaaagacttaacatcacagaggatcagaaaccctgactctctccctctccacctgcccctcccactccctgctcttcactggcaggtggggtctgccctcacccctccctgcagcgccccacacagaggtgactccccgggccgttagagcagcctttcccaggaagcctccctgagttcctgggggcaaactggcctcccttctttgtcccttctttgtgcccacatcccctcaggttccttgtgcccccatcccctcaggttccttgtgcccccatcccctgaggttccttgtgcccccatcccctcaggttccttgtgcccccatcccctgaggttccttgtgcccacatcccctgaggttccttgtgcccccatcccctcaggttccttgtgcccccatcccctcaggttctttgtgcccccgtcccctcaggttctttgtgcccccatcccctgaggttccttgtatccccatccctttgaggttccttgtgcccccatcccctgaggttccttgtgcccccatcctgctcagggcaagctggttatggcacctgtcatgctgttttgtcacttaacaatttgcgtctcccactgtgagttctctgagggcgggaaccaggtctcctttaccctgggatgcatgggagctcagaaatgtggaatgaagtcgttaatttacacagcacctaccgtgcacctggagaaggtgagaacatggctggcgtgtggacgtactcacatgtgcaaagcctgtggcgtgttcagagcctctcagtctcacggtccgctctgagcctccggcatcccgccgaggtcacggaaaccatccctgttttacacacgaggacgccgaggctcggaggggctcaaggttccttcctggagtcacacagtagcaggtggtgcagcagaatccacgtcttccggcaccagagccggagctctaaccttttgggcacttctcgatgtctggccgggaacaccacacggtccctcaggctgcttgttaccgtggaagcttcctgaactctctccagacccacagacctcccttcttgggggctgccgctgaggagcttctggctagtgagctctgaagcactgtcccacccatgtctggaccaggcgccaccactccatgtccccagatgccgcccctccctctcctgcttcccgttggccgggaggtcctcgcctcagggagccgacccgtggcctcccagcctgggcgggtgtcagagccggctgagctgctccaaaatctctctttacccccagattatcctcactcccttcgccgccgccacccctgacccactcatatgtctgttctcactcagaggtgaggccctgtgtcttcagccgtggtaaactcaggacctctggacaggcaggcccagggtgtaggcaccatgacttttcctgctgtgcagacaggaacctggggagagaagggaggtgatctgtgcagagctggggtgtggacccagatggtctgactccggaaccctcgctctgaccctgtgagccgtccccagctccttccggaaccctccctctgaccctgtgaaccctcccccagcccgttccggaaccctccctctgaccctgtgagccctcccccagccccttctcgaaccctccctctgaccctgtgaaccctcccccagccccttccggaaccctccctctgaccctgtgaaccctcccccagccccttccggaaccctccctctgaccctgtgagccctcccccagccccttccggaaccctccctctgaccctgtgacccctcccccagccccttccggaaccctccctctgaccctgtgacccctcccccagccccttccggaaccctccctctgaccctgtgacccctcccccagccccttccggaaccctccctctgaccctgtgaaccctcccccagccccttccggaaccctccctctgaccctgtgagccctcccccagccccttccggaaccctcgctctgaccctgtgacccctcccccagccccttccggaaccctccctctgaccctgtgagccctcccccagccccttcctgaaccctccctctgaccctgtgacccctcccccagccccttccggaaccctccctctgaccctgtgaaccctcccccagccccttccggaaccctccctctgaccctgtgaaccctcccccagccccttccggaaccctccctctgaccctgtgagccgtcccccagccccttccggaaccctccctctgaccctgtgaaccctcccccagccccttccggaaccctccctctgaccctgtgacccctcccccagccccttccggaaccctccctctgaccctgtgacccctcccccagccccttccggaaccctccctctgaccctgtgacccctcccccagccccttccggcaccctccctctgaccctgtgaaccctcccccagccccttccggaaccctccctctgaccctgtgagccctcccccagccccttccggaaccctccctctgaccctgtgaaccctcccccagccccttccggaaccctccctctgaccctgtgagccctcccccagccccttccggaaccctccctctgaccctgtgagccctccccagcccctcgaggaggggctcacaccgagatcaatccatgatgacagcacttcatggcccgtctcaaacacacaggcccactccctggtctggcccaggctggggtgctcagggcctctgtgttgttcacctgcaaatccccagccccgttctgtgtgttctgaggcccacctgggtcttctttctgttgctccagctggaggcttcttggggtagctgcactgtcctttctgcaggaaagctggtttttttggtttttttttttttgagaaagagtcacttggtcgcccaggctggagtgcagtggtgccatctcagctcactgcaacttccacaccccaggttcaagcgattgtcctgcctcagcctcccgagtagctgggactacaggcatgtgccaccacgccgggctcacttttgtatttttagtagagatggggtttcaccatgttggtcaggctggtctcaaactcctgacctcaggtgatctgcccaccttggcctcccaaagtgctgggatttacaggcgtgagccaccttgcccggccaggaaagctgttctgatggagaatggcccagctgggcagctgcaggggctaagtggagtaagccacctgcactgtatgcccgcactgtgacctctgacgttgtttcacgctgcagagggttggccatagtgtcccaaaggcacctcccacaccacctctggtaccctgggaacaacctcggcatctccctggaggtgggaggactgctggggtccgagcccagggcgggtgtgggtttgcagagggcctggggtccgtgccggtgctgtggcctcagcagttgggtcccaaggtagattttcagcctgaaggccagggtggaagatggaaatgccggggaaagcccccggccctgccctcccgccccagccctccactgccttgttacctggagcgcttggtggtggtgggagcctcgttcaccgtgtgccagctgggttcccagccctgttcttggtactgcgggtacaccggcaggcaggaaaacccaggcttctctccacatggtgtttacgtcgtggggggagagagactagggacgcacgagtagagaagatccctttggtttatgttaagtgcagcggaggaaaccacagcaccctgggcttggggatgtgggcgttgttggtcgtcaccgcggcaggggatgctccgagcattcaggacccagaggcagggctgctaaacgcctcccaccccaaatgccgctgttgaggcctgggcacccatgttacggggagaggtggctccagggcggtcagtgaagagtttgtggtgtcgtctccatggtgaggaagatgtggagacggaacagtcaagggccctttagagggaggaggaggccagagtgtggggagggccgaggtgggaagggcagagtgtggggagggccgaggtgggaagggcagagtgtggggagggctgaggtaggaagggcagagtgtggggtgagccgaggtggggagggctgagcccctaagaagggggcaggggagaagccagatggtcccgggcttcagggaggagagagccaagatgccatccgtggggacgttggaaaggacagatgcgatgtccccctccatcctgagtgccgccccagctgccccaccctggccccactcactcagtatctccgtctgtccttcccccacagacctgtactgtaccctggaggtggattccttcggctattttgtcagcaaagccaaaaccagggtgttccgggacacagcggagcccaagtgggatgaggtgagtggcaggggctggcatctctgtggggaccccaccaccccgtgctcgtggcttgtctgctggggacggccagcccattggttggaccagctatgtctgcacccccctttctgctccctgctcctctggcttctgatcgcggtgtgtgtctgggtgtcagaccctgtggtgtcagctcaggcccccagactccaggggtgatgggaggcctctgggagctccagaaaatctgacgtgtccttcgtgggccgtgcttactccctcctccttgcaaagctgaggcacgcacctgccggaaagccaggcctcccagcttcggaggttcagggccctttgtcccatctttccccaggagtttgagatcgagctggagggctcccagtccctgaggatcctgtgctatgagaagtgctatgacaagaccaaggtcaacaaggacaacaatgagatcgtggacaagatcatgggcaaaggacagatccaggtgaggccagggcgccggggcgaggctgagggagcctccaggaggtggttccagttgaaaaggaattctggtcaaggagcctgctctttcgtgattttggttccaagctggttggaggaaagttcccaggaggtggttctcccctccctgctagaggtggctgcctgttgtggccccggaagcccaggcgtgtgcgtggctcctcaggtgggtcatctgcgcttctgcaagatggaaacaaccagctttgttttcacacgccagctttagtctatgggtggttgtttcccggaacgccatgttgagaaggactcagaggctgcgtcggtgaacgggagggaggaatgctgtgtgtgaggagccgtgtctgccattgacgggggaccggagttaggcacacggaccaggcgtttgctcttctgcccgaaagacttagggtcctgctggttggcttggggggaggggggtctctgacttgttgttagggtggccggaccttactcagctgcgttgggagtctgtggcttcgggtggggactctgggtgttagtagaggctgcacctcgggttaagggtatttatgcttctgggtgcggtggctcacgcctgtaatcccagcaccttgggaggccgaggtgggtggatcacgaggtcaggagttcgagaccagcctggccaacatggcgaaaccccatctctactaaaaatacaaaaattagcaggtcgtggtggcgggcgcctgtaatcccagctactcagtaggctgaggcaggagaatcgcttgaacccaggaggtagaggttgcagtgagctgagatcgcgcctgggtgatggagtcagaccgtgtctccaaaaaaataaaaataaataaaaacagcatttatgcctcaactgtgcttttggctccctataaacatatatagggaaaaggcctctgtgtgtgcagcctgtgtctctgaaacattctgccaattttgaagatggctgctattcaccaacctattaagagaagtaggcttgggagcgggaaaaggcgtgacgtggtggagccgctcacactcccgtctggtacctcgtgtggcctcgtgctgtgccgcaagtggtctggtttgggggtagattctgtgaccatgaaatgaagggagacggtaactgacccgtactgaggttgagcctcgggcgttgggcgtgctgagcttcttgacagtggccgcagacgtgatccaggcacagctgggcgccgagcttcttgaccgtggccccggacgtgatccaggcgcagctgggcgccgagcttcttgaccgtggccccggacgtgatccaggcgcagctgggcgccgagcttcttgaccgtggccccggaggtgatccaggcggcagctgggcgccgagcttcttgaccgtggccccggacgtgatccaggcgcagctgggcgccgagcttcttgaccgtggccccggacgtgatccaggcgcagctgggcgccgagcttcttgaccgtggcccaagaggtgatccaggcgcaggctgcgatggctccgtctacaacagggagctgaacgatgctttttagcaggaagcatttgttctctgatgcattgtcatggccaccgagtttggtatctggctcttacctgcaggtccttggtagcattgcccctggggagctgtgtgggtctcccactcgctgccccatctcaggctccagtgtttgaaccaggggccccacgtggaggggcctggcctctgccgcatacgccccgtgttcctaaacacgtctctttccgatgctgtggggtctgcaccctgcttctcagtactcgtcactagggagacagggctgccaggcaactgccagccagtccttcgtgatttaggaaatgggctctagagattcagtccctgggacctgctctctgtggggataaggggagggagccccatctccctgtccctgggctgggctagagggacaggcacggaagggttctgggctggcctgtgcagccccaggagacgcccaggcaagagacgagtggtcgccacgccacactccctgggccactggtggctgtggaatagaagagttacaaggatgtgccgggcagccagccccgtgggcacggtgggccccagcccctcgagaactcagctcccaaggcccgagggcacattcccccacctggacttcagccccattgcttccctccttctcactcagctgcacaagccccgggggaaacacaccatcagtcactgcaagcctcttggagacaggagcagatggaggcagtgggggagggaggaagccaggttatgtttggcaaagcagaaggcagagtctggtaaggaaaatgtttctgtgtttaagcttcgaggaatgttaaatgcctgggagttgatattaaaagaaacataaaccttcctgctgccagctgacctgggcctgtgagcggacagttcagagccagagtcccctgcaggcctttgaagtcccccagcactcagcatgccaaggcccggccctggccctccgctgcagaaccatctcaccagcctgcctttggtgggggaggcatgccccaggggcgggctgtggcttagaaagtctcgccccgtgactgccctcagagccaccgtggatggccaggctgggtgacgagtccacacggagctgttcccacgaacccgggccccacggagccacggaacggtctgtccccacagcttgtctctgccttcactccggccacacatctaaggaagggagctggcactagcctctggaatgcagtctttctgcccgccagcaggcgctgaggacatagtcggaggtggctttgagatagggcccagccctcggggatattcagggggcctgtaggaaaggcaggaggaggagggcagtctctgaggcccccacttctctctaagccccctcccagcagcccatccagagaaagcaaggggccctacggcctaagcgcaggcatttgctgctgtgatgaggcccccactctgggtcgcctgatggggcagtggggcaggagtctcagcggcggggtggggtgggggaagcatttagtgacagacagacggcagcatgcgtcaccaatgtgtgtccagcacttgtgctcctggaggccgcttcccaaatgccatctcctcgtgtgatccttgtcgtgatcctccagggagaatgacagtccctcctccccatcttacagatgaggacactggggtactgaggttaagtaccttggccaaggcatctctgcgtatggtatgtgggaaaggccatgttccctcctctgtgccatgtccccacgtctcaggcctttgtcaacgaatcccccagcccggacagagggccgtggcatggctaatggcctggagaagcagctgaggtgctgctttatggcataaggtgagcgtcctttgtcttggagtcctctgggcaggggacacttgtgcctggtgcccctgggaggaaggagaggagcacgtgcgggaaagagcaggaggccgaggtgggctgatcacgaggtcaggagttcgagaccagcctggccaacatggcaaaacccctttcctactaaaaatacaaaaattagccaggcgtggtggcacgcgcccataatcccagcactttgggaggccgaggcgggcggattacaaggtcgggagttcaagacccgcctggccaacatggcgaaaccctgtttctactaaaaatacaagaattagctgggtgtggggcccacgcctgtaatcccagcactttgggaggccgaggcgggcggattaggaggtcgggagtttgagactcgcctggccaacatggcgaaaccccgtctctactagaaatataaaaattagccaggggtggtcgtgcgtgcctgtaatcccagcacttcgggaggccagggcggggggatcacctgaggtcaggagttcgaaaccagcctggtcaacgtggtgaaaccctgtgtctactaaaaaaacaaaaattagccaggcgtgatggcgggcacctgtaatcccagctacttgggaggctgagggaggagaatcacttgaacctgggaggtggaggttgtagtgagctgagattgctccattgcactccagcctggacaagacagaatgagattctgtctggggaaaaaaaagaaaagaaaacagcaggaggggtacttagcatgcgtctgtgaggtccccagcccaggagggggtcctggcctccagggacccactgtcagattggaaagacgagtatattggtccatgttctccagtgagaagaatgctagatgtcagccacaatagccgtacacacataagcgagcccaggacgagcccagcacggtgctaaatgcttccatctgctgtctcaggagatcttcccaggaccctgtgggagaggaatatcatcacagctagaaagatgaggaagctggggctaaggagcccggacaaggccatgtgcccaggagtgggccagggcgggcagctggctgcagagcccatttctagatgtcctgctgcctcctgctataagaagacggaagattgtcctgctgtaagaagacggaagattgtcctgctgtaagaagacggaagattgtcctgctgtaagaagacggaagattgtcctgctgtaagaagacggaagattgtcctgctgtaagaagatggaagattgtcctgctataagaagatggaagattgtcccgcaggaattcagaggcagaaaggtcaccatgggctggaattagggaggcttcaaggaggaggtggaacgagagcgatttggaagccctgggttttttaattccaaaagcaatgtttgtatgagaaagaaaattgcagtagaagcaaagagacttgaaacctaatcagaaaccatccttcctccggctcctccgaagcagccagtttattctgtgccttttcccttcttgaggtatacacatttttatgtagatttaatcagggcctgttttgtctgtttttctgttttcatggattattataaacctccttttctctagagctgtatggagtcttcttaagcacctttttggatactttgttaaaagtactttatattctttgtagaaatcttggtatagagcggccagcgcaattgctatgctaaggctctgtgttattccagcaaggtgcgcaggctccgcttccgcagaagggagtagggtgggagttctggaggacagacccgcctggcagggaggcacgaatgtgaagggagggtcccaggaaagtcaggagcctcagcaggggtggcggggagctgcaagcaaggccagtagaaggaatgaataaaaggaggggattcctgggggtttggccggaagaggtattttttttttttttgagatggggtcttgctgtgctgcccaggctggagtgcaatggcgcaatcttggctcactgcaacctctgcctcccaggttcacgccattctcctgtcccagcctcccgagtagctgggattacaggcgcccaccaccatgcccagctgatttttattagtagtagtagagacagggtttcaccatgttgaccaggctggtctcaaactcctgagctcaggtgatctgtccacctcagcctcccaaagtgctgggattacaggcctgagccacggcacccggcctggaataaatcttagagggcgtttaatccaatcctgttttccggagagaaggaaatggacaccagcaagggtgagcgaggcagccgcggtcacagagcttgttagtgggtgaacaagggccccagactcagggaccccatccaggtccgcttagctgggagccccccctccaccggctcttgcccctgcccccggcgtagtctgccctggctcctggtcccaggggactccactgtgtttatcctactctatttccagccttgccgctccagctgcaacctacccgctagctgattagcatattcccagggtccggcccttcttggcgggctgggcctgaggagagcgctttcccttggggccccacagctcagtttctgccagcgtccccagactggagaagggcctgagaccaagaagctacttaaacctgaggggccctctgcaccccctgcccgccccccggccctgcgtcattccctcgctcaccgcaggctggggacagcccccaccccacagtccacctctgctccctgtgcctgggaggcagctccacttccccacgtgcctgccagggcagcccctccctgggcacagcagcgctgaagaccctgtggtgggaggggcaggttccaggccaggaagggagtgtgagccaccgcgtccggcctttattctttttaaagaaaaaatagtggtagaagccaggcatagtagctcacgtggtgtagctgtggactacttgggaggctaaggaggctagagtgagctaaggattgcgctactgtactccagcctgggtgacagagcaagagtctatctccactgaaaaaaataaaaaataaaagattgtagtgaaatatacataacataaagttaccattttaataaattttaggggccgggcgcggtggctcacgcctgtaatcccagcactttgggaggccgaggtagatggatcacctgaggtcaggagttcaagaccagcctggccaacatggtgagaccccatctctacaaagattaaaaaaaattagccgggcgtggtggtgcacgcctgtagtcccagctattcgggacactgaggctggagaattgcttgaacctgggaggcagaggttgcagtgagccaagatcatgccactgcactccagcctgggcaatagagtgagactccatctcaaaaaataataatttttgggtgcacagctccgtggccataggtggatttggtgctgtgcagccgttgccagtgtgcatatccagaacttgttggccctccccagccgaaaccccatccccattaaatcataactccccactcctgcacccttagcctccagtaaccacctgcctgctttctgtctgtacgaatttgtccagtctgggaaccttacgtaggtggaatcagacagcatttgtcctcctcatgtccttgagcttcacccatatgccgttgtgtgtctgaatttcctccctttctgaggctggatacaatttccctggatgtagatgccacgtctctttatctgcccgtccgtccgtggatgtaggtgccacgtctgtttatccgtctgtggatataggtgccacatctgtttatccatccatccgtccgtgaatgtaggtgccatgtctgtttatccatccatccatccgtggatgtaggtgccacgtctatttatccatccatctgtggatgtaggtgccacgtctgtttgtccttctgtctgtccgtggatgtaggtgccacgtctcttcgtccatccatccgtctgtggacgtaggtgccatgtctgtttacccatccatccgtccatggatgtaggtgccacatctgtttatccatccgtccgtggatgtaggtgccatatctgtttgtccacccacccgtggatgtagctgccacgtctgtttatccgcctgtccatctgtggatgtagctgccatgtctatttatccatccgtccgtggatgtaggtgccacgtctgtttatccatccgttcgtggatgtaggtgccacgtctgtttattcatccgtttgtggatgtagctgccacgtctgtttatccatccatccgcggatgtaggtgccacgtctgtttatccatccattcatggatgtaggtgccatgtctgtttatccgtccgtccgtggatgtaggtgccatgtctgtttatccgtctgtccgtccgtccatccgtgcacatttgggttgtttccacccaaaacgctcttgcctttcgttgagaaaaagaaccttgtccctgaggatggagacagcacagcctccttctctccagacccaagctctgtcccccacctgcctcccagctgtaatagatgagcaggacccgtgaccctagggcatgactggtcactattagtctcctgtagttgaagcacacagttgggccccctgcctcggccttctctccccctcccggccaagtgtccctgccccttgaccccttcacccttcttcctgggtcagctctttcctcccctggtcagtggtttaggtgcatcgaatgcagacgcagtcaccctgaggccgcgggaacaacctctggtcccttgacttcttggcatctcagtttcttcttttatttatttacttatttatatttatttgagatggagtctctctctgtcgcccaggctgagtgtaatggcgcagtcttggctcactgcaacctccgtctcccgggttcaagtgattctcctgtctcagtctcctggttagctgggattaaaggcgcccgccaccatgcccagctaattttcgtatttttagtagagacggggttttgccatgttggccaggctggtctcgaactcctgaccttgtgatccacccgcctcagcctcccaaagtgctgggatgacaggcgtgagccaccgcacccggccaagtttctttattgattcagtgggggtaactattcctaccccaccttcagcactggcttaaaggatctcacatacctggaagagccagtcggtgctgtgacgtgtgcgtccacgctttcacctgttcactcacttgtttctgtttacgatacatcctctgaatggcaggccctgggctgtgggtacaaagaatgaccaggacctcaccgtctggtaaagaaaacaagagaacttaggccaggcacggtggttcatgcctgtaatcccagcactttaggaggccgaggcgggcggatcatgaggtcaggagttcgagaccagcctggccaacatggtgaaacgccgtctctactaaaaatagaaaaatcagccgggcgtgatggtgcgctcctgtaatcccagctactcgggaggctgaggcaggagaatggtgtgaaccaggacccaggaggtggaggttgcggtgagccgagattgcgccattacactccagcctgggctacagagcgagactctgtctcaaaaaaaggaaaacgagaacttggatcgttagccagtgttgccggggttttgaggccagacagatcttgcggggctgagtctagctttctccatcgttagttgggagaacagagcgagtatctttgcctctgagcctcagcttcctgacctgtcagatgggctgtaagaggactgaatgtgagggtccatgaaaccctggacccggggcctggcatggagtcagtacgtggtttgccctaagctggcgggttcaggcaccctgtcccccacccccttccagtggttctgggtgtcacttgtccagcagccccctcctaaaggctgtcacctataagtggtcccctgggtcggggcctttggctggccgaggcagcattattttcttaagctgatggggtcagactggctttgctgaaccaacctcatagcaggggcggggaagtcaaggctggggccctcaatgccggctggcccgaggtttccctgccatgacccagcacggcagctctgagcttggcctggtgtggtcggaaacaaggggcctttgtcagcggctggggagcagcttctggtttcaattactctggagagcacgaggaagcttgcagagaacgtggggccggagcccgccagggcaggagtcaagggctcccctgccccacttccctccctctgacccccaaggggtgtcttgtccccattcgaccctgcctgagggtcctgcgcgtgcgtcctgggggccctgggttgtgagcccagagccccttccagctccggccccctctcgttcttcatagtggtactgggacccctcccaggaagatgatcgacggccggtaacgtgggtcctcagtgcttccccgttccaggcctcacgcgtgggccacactgaccacagccgggcccctggccctgagggaggccttgattcaactgggaaggaacacaggcctttccctttggttccatctctcccgtccccaacccctgccctggcactcacagcccccatagctccctgtcgtgggacaccggagtgacctctccctggaagatcagcccgcgtcggcgcccgccaaggccaggagtgcatgtcaggccccgcctcggctcctggcttaggagttccgcctccctgctgcttgccaccctcacagctggcccacgtggggctcttccctctgccgccacccccacccctgtgccagttccccaggcacatagggaccgtggaggctgagccccaggcctggttctacttcctgctgactctccacttcctcccagggccccgtgactgcagccattgtcctgctctggccctgcccaccccagctgtttcgggcacatttgttctccagcccagactcccacctgctgtccctcttcaaggcaggtctagacgcctggttctccttggagagtgggcagcagagactgtcctgggtgggggaagtcgggggagggtccctcgagagtgcctgccctgccgtcgaaagcttttccaaacgtggggcacgaacctctctcgtcagccctgctcagctgcctccatcgcccaggtgttcctgattttgggagcctggactctgcccagtggattctgggcaggaagcatccagcaggaagcagatggaggtgtgagtcggctccccccgctcccctccacccctgggaagtgccgcctcagcaggcaggcttggcgcccgctccccctgacccgcctctgaagggtgggcaccatgcagagaagccggtccagacaggacctcaggagccgatgcagtcaggccctgagaacatccagcctcccgacagaccaaaaaaaggtgttctcagctctgggtgccgggctcccagactcagaggcacgggacctgggtttgatcttagccggccaacctcgggtgacccttcagagagtgtcctctcgggtccgtggcattcagcgaactcgccgaggcgaaagccgcagacatagattcctccccgtgagccgctaacctccctgctggcggaggctgctgcttcctcctaggaatccaaaggatcagctccagggttgtcccactttccgtgttttctgaaagcttcaagagaaggatgccacagaagggttgccagagaatttcttgagttagggctgaggctgcagatgaatgctgagcgggggtcacctttagggtgggctctgctggcctccctcaagcctgcggccaccgcagactcacagcagcccctcgtggccagccccgcccttgccgtggcctgggggcgtggacattggtggtgctgggcgagggtctaagccccagtgtagcctgtagctttgggctggggcagggagggatgggcacaccgtgttcacgccctcggaggcaagtgctgagctgccctggcttcaggaaagaccctagcgcggctggagacgcaagatgacccagacacacccgcctgacccactagacaggtgctgtcccctctcgaggctgccagggcgaacccacagccactgagcaaaagccctgagtttcccaaaggagggagagaagcagagacacgactggagctgcaggttcagcgtctgacccagaggtgtccttacaaagcccctaatctctcagacccccacgtcccccaccccgagggagagcgaggccttcgggagaactgcctctaggagctgctgggaacctaaggtttgagctgtagatgcctgaaaggagggcggggcgctgaggtgtgcctcagattctgcctgtggggcgtgggaattccggggagggacgtgagccccaaggcaggcgaggggtggtggaaaagcaggtgtgagccagtgggccccacgtcccctcttcagccagggcgcctgctctctctgcttctgcttttatccgacgaggtgggcagggagacgtcggcataaaatttcatttggaaaaaacggcaggggtgcgtcctcagcagaaaagaaatctcaccggagaccatgtgtctgttccgagctcctgatttgacagctgtggaaactgaacccagagaaaaacacagccgttgagtccacaggtccctggctcccagggctttgcttctggccaccatgagctcggagcttgggtggaagggaggtgttcgggaatccagaatgaagaaagagcagggaggctcggcgaccccatcccaccttcaggcctcagcccctcctgcctcaggctgcaatttatggctgtgctgggagacccggccacaccccctccttcccgggaggaggagcaggcaagcagcccaggggggctccagcggtagggacagcatactgaggggccacgccctgcccactctgtccctgggtgagttttgttctagataagcaagatgttcccaaaggctcaagtgcatttttcacccttttccatgaccaaatgtgctgtgagaatcgctagggtttgccagggacgggctgtcgggacacttctcctgcagcagacaagctcttgggctgtttcagcctctcctccgtacctagaaccaccgagcaccctggcgacaccagcctgacgtggccagagagaggctggaggtcaggcagagggaggctggagctgtgtgagaagcagcacgtactcgggactgccctatgagccggcacaggcctttggggagttgggaggacagcaggttaccttgggcaggcctaggtctgggccgtagagcaactgatttcatcctgactgccttcttccttacactgtgcccatcttcaaccttgagcccaccctggacccctctcccagccccacctggatggatgggtgggtgggtggatggatggatggatggatggaaggatgggtgggtgggtggatggatgggtggatggatggatggatgggtggatggatggaaggaaggaaggatggaaggaaggaaggatggaaggaaggaaagaaagaaacaaacatagctcctagggtctaatctgccattggctgctgggtgactcctgtccccaggctgaatgcaggctctgaacattgcaaatacccagaggtatccgatgggtggggagaaaaacctagagtgagtctcagtgtctcattctgggaagacatttggccttccagtccgcaggttttggttagggtcggtacaggaaatggtcagaacacacagtaagaatgcagtgaccacagagccaccgagttgggggacactcccgtccccactcccccacagctgtccccggaacgtgccatcctcccgcccaactcgcacgccctgtgtgggcgctgggcaccccgggctcccatgctcggcctgcttgtctctctctcatcctggagcctgcacctgtctttgggcaggagccactggcaggctctctgcagcccccaaagcctcgggtccgccctgctctcctccagcaccttcttgccccccagcctcgggtccgccctgctctcctccagcaccttcttgtcccccagctctggtcctctgatgcccagccggtgccctgatcctctggtgctgagagagggagtgttcttggcagacctgagccacatcccctcggtccccatcctcagctgggtgccaggctcctcctgggctctggactctctgggcggcctcttggggctctccccgccccaactggctcccaggctatccccactggggcgcctgtggccttggtctagctggctgctcagaaaccccctctcctggagtcatttgcgctagcggataggacgaggaatcggggttcaagtgtgggctgggggagaggagcgtcgttctggtgggaaaaaggaggtcactccaggaaagcggcagctgcatttctaggttctgaggcagaaccttcctcctggtgctcacaggctggaggatttgcctggaagccgtccccacccccagctgtcaccgaggcagccccactgcagcctttgcccctcccgctcgcacagggcaggatgtgaccttttttcctcgttgatgccgccactgaacaccttaacccgattttacctcagtcacagctgtgctgggtggcatgaccccctccctaggtgtaatgcggggtcccacccacgtctccccggggacagcccctctcactccccttgcagagagcctggggaggggctgagggaggatgggatggtccactaggaatgtttttaattccaaaggcagtgacatctgttcgtgggggccttaccaccaggctctgtttatccagccgggggagtcttgcaggtcgtctgaggagggctctggcaggtgtgggggatggaaggggtggggggagcaggtgtgggggatggaaggggtggggggagcaggtgtgggggatggaaggggtggggggagcaggtgggggtagaaagggtggggggagcaggtgtgggggatggaaggggtggggggagcaggtgtgggggatggaaggggtgggggaacaggtgtgggggatggaaggggtggggggagcaggtgtaggggatggaaggggtgggggagcaggtgtgggggatggaaggggtgggggagcaggtgtagggggtggaaggggtgggggggagcaggtttaggggatggaaggagtgagggaggaaggagagtggccccttcccaggtggttgggatagcctgagctgaacccagcagagatgaggaggggtccgtggtgggctgcagcgactagaattcagacttctgcttttgctggggacatctgtcttgcacagatcttcttccacccaagaccattgactccaggaagcaatgagtcgggcttgggggagagaaggcaagtctgcgctgtccccagaggaagcccccagtccatagggaggaagggaaagatgagcgtctcaggggaagactcccaactcggctacccatctgcgaaggcacttatgtcaccatggagaccagctggccatcgttcatccagtccgagcttgctttacctagacaagtattgagcctgtggtacctaagacagatgagtgccgggccttgggaacgggattcacacggcccccttctcccccacacccggcggcagggaggggcgtgcattctcgcagtctgcaccctgtggcctgggacccagcccgagggaaggggaccataggccagtgaggggccgattctgaagttaagtcacggcaccaggagcactgtggcgcaaacgtggagagcagttataatggcatcctaccagccagttacatgacagccattgcacgtttgctggagggaggtagagtaaagctgggacccagtgagggtggatggcctttccctacagccccgagggccccacgctgacccctctcctccaggaagccttccccagttgcctccagctggaaattgtatctctcgatgttcgtggcattttgtctgtcctgttctgaggccgtaatatgggattttgtgcgggttttgtccatctgggcgtggtgcctagtaggtgcacaagtgacccgtgccaaatgcacaaatgcttgtctgcctcctgttgatggacatctctgctttcttggctgcccctttgtcaagcactgacttttgattcgtctctgtgatgccttaacccccaccccagggtcgggcacgcagccaggccctcagtcactacctctagagtgacatgagtggggccaggtgcagtggttcatgcctgtaaacccagcactgtgggaggctgaggtcaggagtttgagaccagcctggccagcatggtgaaacctcgtctctgcgaaaaatacaaaaattagccgggcgtggtggtgggtgtgtgtagtcccatctactcaaggggctgaggcaggagagttgcttgagctggggaggcggaggctgcagtgagccaagattgcaccactgcactccagcctgggcaacagagcaagacactgcctcaaaaaaaaaaaaaaaaaaatgacatgagtgggaccaagcagtggggcctgaggagtgagcagagccttcctggaggagatggctttgtggctgtgtgaaggggctgtctgggtcctcctggagccctggaaggggcaggcgaaggaggggtggagaagggtgactgaggcctcagttaggggacacaggcatgttcctacctccgtccgtctctccacctccccctcaggcggtgctggtgaggctgttgtggctcagcccccacttagcagctcaggtttgaggaagttccgtgtgcaccgtccaggggtgcgtgtgacgtgtgagccaggaagaagtggagctggtctggccgcccctgcagggacagtgaagactgaggcccggttctagcccaggcaggacgccccaaggcccccctccaccagccaggtggaagatagtccagggccagatcctgccacactagggcatcacagtgagtgacaggggtgtgggctttggagttagccagacctccgtttgtgttccagcttgtcctggccttggacacgtagctcagcttgtcagagcccttcgtttcctcagaggtaaagcggggatgctggtactgacttcatacagttgggaggggtaagtgacttaatccatgatgcctggtccctgccagccttccacgaaggacagctctgactacggctgtctctgcagggaagccacctattcctcaaaaacaccaaggcctctgaggagaaatcccgacacctgcctggctggtgacgccggatgccgagggctcgtctctgggccccgacccacctgccttggggtcaaccaagaaatgtcctgacccagctctttttcctgaatccaaagcatcatccatgtttgagtaaggcacagtgcttgtgagcaccaagggctttggagggacctccccatcctcacttggcactgtgtaaccctggcaagaactggacctcctgaccccctgtcctcacctctctagaacagggcagtaacaccaacatgacaagaatgtgaggctcacatgcagtcgggcgtttgaaagacctggttcgcggttgccacggtgcaaatactggtttcctttctgtgccgtgctggggtctgcagaggtccgaggccccagacacccctgggttttgcatagttaaacatttgggattcagcctttctcttttctctgaataccgtactctaacttgcactgttaccttgagacgtaatttgtgtcctagtctctgcggttagaaagttcactaaataaattgaaggtcaagaacaagttcttctctctctcaaggcgcccagcacggacacgggtggttgcccgtggcgtcctctgcgcccagcacggacgcgggtggttgcccgtggcgtcctctgcgcccagcacggacgcgggtggttgcccgtggcgtcctctgcccctggcagcggaaaccttttttggtgaggtgcaaagggccatggttcaaagtgacccctcaagaggcatctctggctggacgtgtgacccgcgtcgtttcgggcttttgctcctgtccctgagcagatcagtgacccgattcccactgggattcccacactaggggtctcctttatccttacatttctcacctgaggaggcttctgagtgccggtccacaagggtctggccgggtcaccaagctggctctgaggaaggtgcctggggcagaagttgggggtggggaagtgcgaccccagggcagtcagagtcttttgcccggggaggagggcagctgtttgtggccaaaatgcagcccccgcctggcccccggcccctccgcttggcccctggagcagcccggtgggcaacacggggacccagcagggagggactggggtgtggggctggtgtaaactttattgcgagggagggcggcggggtcggggaggagcagcgcccttgccagggatgaaacccggggttggggcttggaggggcggccctgggcctgggaggcggcgctcagcctgggctgcagcctcgcggagggcggggaaggagggatgcggaggagggaggagggaggagggacgcggacggagggagggagggaggggagcgcggggagggagggagggagggaggcgagcgcggggaaagccggcgggactagggaactagcgggactggcagccgggactgagcgctccacaggcgccttctctccagcgccgcgtcccgtcccccccggcatgaccgacgtcctgccccagcccgactgcagcccgaaggcggggcgcgaacccctggcgctggaggagtcggggagcaagcgcccccccaacaccggcgcccggctctggggccgcgtgcgcaacaagctgctccgaaacaaggtgcccgcgggggctggaggttccggggggtgggggctcgggggcgctgcggggctcggggggctgcgggggctgcgggggctgatggggtcccgctcccgccccctccgtggagtcccgggacagagctggggtctgtgcgcgtccctctaagtggcttgaacttgatggcgaacgctggggccgcccccacccggaccctggcgctcgggcatctgcccctgcctcgggagaagggaggtttcttctcggcaggtggaccctgctttccactccgggagtgcaaacagcgcacggggagacgcctgcctctgggtctatgtcttgccgccctgttcagcctctacctgatccctgcatccagcgggccttgctggctgcccctttgctgaggggcgccgaccgcagcaccgtctgccgtgtgaggtttctctgtgcaggattgtggggaggggagatgctgccgggtctgggggctcgaggcttcccttcagggaccacccatctgactgtgggcccagtgcccgccgggcaccaggcgttccgtccatgtgccagggcagaccgccggtgcccctgcagccccagacctgagttgggattaaaatctgagatagaagccgactgtcctgcagctgggcaggctgcctcggggctggcttggggccctggcatcaggcacgtgaggaagagccagacccagcgcccagcgcacaggaagtgctcgataactctgcagatcaaatcaactgtccgagttagctgtctcagagtgccagtccggctggccagggctgggcccatccatcaagagagcaacaagggaggccttggccagtccgtggtggggatctgcagctcctcctgaggctcacaggacctctctgcaggctcttactgccagccggcattgaggctcctggcatcagccaggacgaagtgatcttgggctcactggcccctcgttttgtttcagctcctgccatggggcatacttgacctcccagaggtgacatcagccctggaaagtgctgggcagggcagcaacttgagctgtactgcactggcccctgtgtcaccttcagcctccctggggactgggctagcagagccctgctggccccagctgctgccagagcccctctgtgctgaggcagctgtctgtgcccggcagcgtggactcatcccctccccagcccctgctgaggccagcaggcaccagcccagagctcaccatccatccccaaacgtcagggttggcaagaaactgacctggcaggttccgggtccagcgccagccaaacagggcgcttccagtttacctgcccctttgaggaggtgcctggtgggcagggggcaacttttaaacctgaggtcccagactttcagttctttccctatgcatttgtggccggcagaactgagaagccccttcaagaattccttagctgggtttgcctctggcagtgcctggtggctccgtgtctgatggggatctctgggcaggggtggtggccaggcagacgccgggctattgagctgctgagcagttggcgtcagtgcagctcagggtggccccggccctgggctgctctgtgtgacgagcgattccatcccctaacgtgtgctgtgtgccacagtgtgtccgtgtcgtggacgcaggggtcagcgctgtggcggacggagggacgtctgccacagtgtgtccgtgtcgtggacgcaggggtcagcgctgtggtggacggagggacgtctgccacagtgtgtccgtgtcgtggacacgggtcagcgctgtggtggacggagggacgtctgccctgtgcttcccacctcactgtgcgcaggccagcgggtgagcagcagagtcaaagggccaggcctcttgctttctatcctcagccacattaacctggcattttcctgcaggagcttcacagttgggccgaggggctgggactaggcagtttcgtttcggtggggtaagggaagggtgcctggtactgcccagactggcaggagggattgcctcattaactcctcgttaactttgccctgagtgatgctgtgggtgcgagaaacaccggtggccctcctgcttccactgacctgaaggttcattaaaggctggaggcggggcgtgactcatccagggctgggattaaacaatctgttcagatggaaaggtctcatgatcagaactgagcctttaaatagtgcagggcctctggtttctgggggagaggaggcagggacactcacggaggatcctttgggtaccagcgggggtccctgtggttgggctgttcttgtcaccggaggagagttcaggggccaaagcctcattccagcccctgacttggcagtcagctttttgtgcgagtgtttagctgggagacacgtggcatctgggtttgtgggttcagccagggctctcggtattgaacttcgcgtttctacttttctttccttttccctgtttgtttttttttttttttgcctcaaatcacactcaagtagaccaggcccggtgccttcctctccctcccatccttccctcttctagattcttggttgagctttggatgggaaggggctgaattctagattctcgcttgagctttggaggggaaggggctgaaggaggaacccccccaccctgcccccgcagcatccccttgtgggagccgtgaggaggctaagagggcctgaagggaggccggtccagaagcatttgtctgtcggggaagttgaggcccttatagagcaaccaagtccaagacgctcctgacccagaccaggccagatgctggccggcggtggggactcaggctgagccggcagggtgtaaggagattgagtgcagcttcaggtgaccttgtctctgccctgaagcacagccatgtgggtctgagaatcccctacttccaaagagctcctcttaagctggacaccggcactgctgacccccacggtgagtcccgtgttctgtgatgggagctgctgcctttgcttcagagaggatcagaggtgttacctgaggaagggcggggtggagagcccctcttgggccattcggggaagcttcaggctcatgatggtcttagaagaaggtccctttcttggatcacctgatgtcaggagtccaagaccagcctggccaacatggagaagccccgtctcaactaacaatgcaaaaattagccaagtgtggtggctcacgcctgtcatcccagcactttgggaggcagaggcgggtggatcacctgaggtcaggcgttcgagaccagcctggccaacatggtgaaaccccgtgtctactaaaaatacaaaaaaaaaaaaaatagccgggcatggtggcgggcacctgtaatcccagctgctagggaggctgaggcaggagcatcgcttgaacctgggaggtggaggttgcagtgagccgagatcatgccactgcactccagcctgggcaacagagcgagactcggtcttggggtggggggaggaaagggtccctttctttgtcagcttgatcgccaccgcaggacaaccccacccctcacagagcctgtcgtttattccttcttgatggtaccaggtgtgcagaccacgtgcacaccccagaggttcactctaccactcacttggccatcgagggtacacaggtgctgggtacaagatacagatatgtcttgggctcgtctactttattttataatccagtctgggcgtcaggaaagatctcgcagccttctgcaatagaagtctggcctggcccggctgcccaccgcccttccttgtttcccggtgggaagaaagcttcatcgtgcgtcttctctgttcacacacacccccatagcgacccctcagccacagacaggggactacagtgctgcctcccccgagagctggaggcccctacaccagcccacctcttcctgggcctatgtgtgggtcctgactgcggccaggctggctgacaggttggcagtggggtcgggcgaccctccctcttttccacagcacttacccacctgccgagtgggcagacctcactgctggggcctcatgagtactctctgatctctctgccaggccagctcccaagaggcttgcttgagtccgcagagcgggaaccctggactctgagaatctgatgaaggttctggaggccactcagacacagagccaccccatgcacacactgtgtgcgacttcagagggggctgcagacatcaaggcgggaaccctgctctgagtgaacttggcaaggtgccgcttcttggtacctagggagggtagaagggcgctggtcctccccggcctccctgcaggccacagacggcttggccagccagcggtgctgggcgcggtgccccagcttttggatggctctggaccagggagaggagaacctgccaatcaagggggttcctcaaaggccaaagctgcctgagcccagtgttgctgtagtacccagaggcaatgaggccccagacattttggaaggagcccccaagcctgcaggtgtggctgggggagctgccccaggcattttggaaggagcccccaagcctgcaggtgtgagtctgggggagctgccccaggcattttggaaggagcccccaagcctgcaggtgtgagtctgggggagctgccccaggcattttggaagcgcccccaagcctgcaggtgtgagtctgggggagctgccaggtgttggccacagggcgctggtgctggagaggcctggccctctgctgagtggcctcgctcactgcccaggtggttgggaactggtcagcaggtgctgttctttgacctcgtttcccctgtgaactcatgctggggcaggaagatgtttgtgtcctgacggccccccagcaccttcgaggaacagacagtcccctgcgcctgtgacctgcctgccccaccctggggagaaacgcagcgtcagtcctgggtccagtgagccgtagacccttggccctccaggatgggccctggagaggcgggaggggcccgtggagctggtcctgggcttctgtagagaggccaggaggccccaggatccccacagagacttccccagtcccgcttcaagacagcggaaccagctcctgagccgaaatctggagggatctcctttctggaccgtgaccccagccggggctggtaccgatgaccggcacagccagagccgtgacatccacagcgcccttcccatccgatgcctggatgccgtggctgtgctcggggaggcctccggggtccccagcccctcaggctcatgtggcacaaggtgccagagaagacagggcgccaggccggtgggagtcaaggtttcccatttttctcgtctcagtctgctacttaactgctgtgtgcccgcgagtacatccctttgcctctctggttctctggtatcagctcaatgaaggagctgaacaggatgatctcctggaatccagttcatgtgatgatcttggccatgtctcaagattcctagtcctaaaccttaaaccctgagcaccctgggagagtctgtcacagggctgcacctgggccaatgccagccattcagtggacacgggagcagggggtttagtgggaacacagggcttcttgagccctgtcctgaagcagccccggcggggagccattgtcacctccttcccccatgccccagttggttcctctggcctgtgagtattgccggagcaccttccacgtgccaggcctgcaggaactagggacacagaggcgcccgagacagacgagaccctgtctgcaggaggagtccgtcaacaaatgagatccttgccggtcagatgagtgctgtgaaaaaaataaacacaactgggtaacgcagtagagagtgacggggggatgcctggcttgagaggatcacttttgaacgaagatttaaatgacaagaagaattcagccataaaaaacctgggggcagtgcattccaggccaaagaaccggcaaggtccacaccccgaggcaggtgtgctcagaggcagagggggacagtgtggggcgttacgtggggtcaggggacggcggccaggcgacgtggggccctgcggttcaggacagggcctttaatccgaatgcagtgggaagccgcggggtgttcaagcacagttctgtgacgatatgttttgaacacgtactgtacgaggcatcattcttagcctgtgacgcaactgaggtgacacttacaaggtgctgttattcacactgtttatttatttatttgtttgggttcttttgtttttgtttgctgttgttgttttgagacagagtcttgctgtgtcgcccaggctggagtgcaatggcgcgatctcggctcgctgcagcctccgcctcccgggttcaagcgattctcctgcctcagcctcctgagtagctgggattacaggtgcccgccaccacgcccggccaagttttgtatttttttttttttttttttgagacggagtctcgctgtcgcccaggctggagtgcagtggcgcaatcttggctcactgcaggctccgccccctggggttcacgccattctcctgcctcagcctcccgagtagctgggactacaggcgcccgccacctcgcccagctaattttttgtatttttagtagagacggggtttcaccgtgttagccaggctggtcttgaactcctgacctcaggtgatccacccgcctcagcttcccaaagtgctgagattacaggcgtgagtcactgcgccaggcctaaatgtgttttgaattttgttttacatttttaattttttttttttttttttttgtgggagtctcactctctcgcccaggctggagtgcagtggcaccatctcggctcactgcagcctccatctcccaggctcaagcaatcctcccacctcagcctcccaagtagctgggtctacaggcatgtaccaacatgcctggctaatttttgtattttttgtaaagacgaggtttcgttatgttgcgcaggctgatgttgaacttctggcttcagtggatccacctgcctccgcctcccacagtgctggattacaggcgggagcccccgtgcctggcccagactgtttttatatatgaggaatgaggctcagagagtgactcagatgaagtcacgtgagtggcttagccgaggggcgacgttcagaccccggccactcagcctcagcgcaggctctcacccgcggtgtcctgccttccgtggccggttggggttgggctgcgtgccccagatgggagcgtctggagacgccgggctcctgcccgtcaggcatcagtgtggtgcccgtcctggcacgctgtgcatagcaacaggcaagacggttcttctcgacgacgccactgaacgtgagactcggagcaaggcaaggcctgggaggggccgctcagagctgacctgggccctggaattgctggagcccctcacgtccccggcagcaagctccatgcccagaaagtgttctgggcccgggcagggagggtgaagctggtatcagagaaggctgttgatgctgctttttttttttttttttttttttttgagatggagtctcgctctgtcgcccaggctggagtacaatggcacaatctcggctcaccgcaacctccgcctcctgggttcaagcggttctcctgcctcagccccctgagtagctgggtttacaggcatgtgccaccacgccggggtaatttttgtatttttagtagagacagggtttctccatgttggccaggctggtctcgaactcctgacctcaggtgatcctcccacctaggcctcccacagtgctgggattacaggtgtgaaccaccgcgcccagccctgttaatgtttcttaaccactccaggtccagctcgaggcttcagagcccatggaggtctgacaggtccttggccttcccgtggcctccagcgtgaagcttcctggtcaggaccacagaaggcctctcatcttggactttgacctctgagggcgcccctttcctttcaggacagggcctccgtgttgctttggccctggcctgttccttttctcaagagggccccactgcccctgcccttgccactctggcatcctcgacctgccctgggctggggcagggccggcttcctggctggtatttgtagcccagttctgagctgaagctgaagcctccaggctgcctgcacagggaggcagtggtggggtgggctggccctgaggaagacggagccctaggccgctgggggagatgtgcctggctgtggggcctccaagagcagcccaggtttggattttgtctgcttctcctcaaggtcagccatgcccagcccgggggctaaaagcaaagtgggtgccagggcaggcagaggctctggagtggacgtggggccggcagaggcgctggagtggacgtggggccggcagaggcgctggagtggacgtggggccggcagaggcgctgtagtggacgtggggccggcagaggctctgcagtggacgtggggccggcagaggcgctggagcggacgtggggcaggcagaggctctgcagtggacgtggggccggcagaggctctggagcggacgtggggcaggcagaggtgctagaatggacgctggggaaggcaggttgctgcgggtgctaagaggctagcctgccttggacaaaagcgtcgttcagagctgctaatccccttcctcccatgaggcttggggaacttcgaagttctctggtgttggaggggaagccagccgaggccctgggacacggcatcagcccgagcctatctgtggctggcctgggtatggcaggtgggcacaccttggctgcaggacaccttggctacaagggagcctggctgaccctgcagggtgagggctggagaggcggagcctgcctggcctagcagtgtggatgccaagccatgggaagatgtgtggagagtttatggagcctggcccggtgtccccaacccagctgctgagctggaagccaggggtaggtcctggcagcccctccctctctgccctgcctctctcggagtcgctcggagcagtcacgttgacggaatcctccggcgcctcctcgagggaggagaggcagggtcttggcaactcccgtctcccccgttgccagcttgccagccccgccgtgcctctcacgcctgtggtctgccccaatgacaggccggcttcggtgtcccaaggggacccagccctgagcgtggggctgcccttgggggagggcaggggaaagccagcccgggctgccaccgtggccgctggcctgggagccccaggaaacgtgcccaccctcagacccgatgcctggctcagggcctgggctccgcggcccctccagggcaggcgtgaaatgtgcccacacagctccaccttccacgtggttccctgtccgggggccacttgcactgaggtccttctggagtcattttctgtttttttttttttttttttgagacagagtcttgctctgttgcccaggctggagtgcagtggtgctatcttggctcactgcaacccctgcctcccgggttcaagtgatttccggctaattttgtatttttagtagagatggggtttcgtcaggttggccaggctggtctcgaactcctgagctcgagtgatccgcccgcctctgcctcccagagtgctgggattacaggcatgagccaccgcgcccggctgggagtcattttctagcgttcctgtcccacctctcaggaacagatttaccacctttgttgtgaagaagcattttttttttttttctgccgccaggctggagtgcagtggcacaatctcaactccggctcactgcaacctccgcctcccgggttcaagcgattctcctgcctcagcctccccagtagctgggattacaggcacccgccaccacgcctggctaatttttgtatttttagtagagacggggtttcgccacgttggtcaggttggtctcgatctcctgaccttgtgatccgcccgcctcggcctcccaaagtgctgggatgacaggcgtgagccaccgcacctggctgaagaagcacttttttttatgaacctctgcaaccccctctgagggaaaccctcccgcattctgggatgccggggctcagagggtggagggtagaagagcgccagccgtgagaggcaggatggggcggcccccgagggcagggctgtgcctggaggcagggctcctcggggggtcagctcctgggcggtgggagtgaccgagtgggctcctgagggaagcggctttcaggaaggaggcggaggcctgggagctcttggggccctggcaaatgtggtcttcagattcccgtcgtccagtgagcccctggatcacgtcctgagtggcgtccactgaaggctgcttgggacctctgctcccccctccactgagacccccagtggccagttctaagtcccacctgccttgggcagggccaccacaggccccttactgtggattaaagggccctgggtgagggcttgtgggaggggaggtggtggaaaccatctccgaagaccttggggcgagctgcgtgctggagtggagagtgtggcccagcaggcaggagcactgggttggaatgggggctctgccacctccgagggagcaggagtggagaccggagggagcgtgcccctgaatccgagcacggggagctggccgggagcagccctccgggcagaggcaggagaaatggggtcacctgccccagggggtgagaggtgagccgagaggaagggctgagaccctcaggggcatccccaggatgttcctgaaactcagccctggaggacgctcaggtgtgcgtggagcaccctctgccctggagcctcaaatcctctccccgctgcggggccactttgctgattcctgccccaaacatgaggtcacttcggtccagaaaggcgaggcgacctccaccagccacctacgggattcttggcagagaatccacgctcaccttcgggtcttcactcctgctccctcggaggtgacggagccccatttcaacccggtgcccctgcctgctgggttttcgccgcaggggacctggtcgtctcctggacatgagcccccagcgccagcgtttctctttgggagaggcctgaatgcgcagtcatgatttgaccaggcgaagtgcccagacaaagagaaaacagtcggccggatgcaggggctcacgcctggaatcccagcactttgggaggccgaggcgggtggatcacctgaggtcaggagttggagaccagcctggccaacacggtgaaaccccgtctctactaaaaatacaaaaattagccgggcgtggtggctcgtgcctgtagccccagctactcgggaggctgaggcaggagaatcgctcgaacccgaaggtggaggttgcagtgagctgagatcgcgccactgcactccagcctgggcgacagagtgcgactccgtctcaaaaaaaaaaaagaaggaaatagttgagctgctctcagtgaccatgtacggcccagtcgtcgacccctggcccagtcgttcgtccgccttttggctccacgatgttttgcagcctgtttctgtctcctgcctgtggcccaccttggggaggccccagtgctcgtgtgcccctggtggtcttcccagcctgacccttcacgagctccctctgtctccctgcttcaggtgatcagacatcccccaagtacctgctcccctgggcccatggaaggcacctgtctgctgggaccagagggtgagcagtcaggtgtcccatccaccaacgtcccaggggccagcccctccaccccggtgctaatctcatcaggaaatagcacagtccacatttcccaggagttataaatagccagcgcagttgcgggcagcagcgtttctctggaaaatgtacgctgtgcctctccctccctcctctgtgtttaaatgatatcctgaaatagacttggtttctggaggctgatagcctcctgggaaacagagcgtcgttgtcagggcaccgtggggccaggcaggcctctctgagcggataccagggccacacctgcagcaggcaccagggccacacctgcagcagataccagggccacacctgcagcaggcaccaggaagatgtcagggcttgaggggcttacagcttaggaaagtgcccctggcccaggcctggcctcagaaggggctggagtgtgtgagacagcagcaagtgtcgcctgggaggctgcagagggtagatcttagtggagcaggaaggcagagaggacccaaagtttcccactgtgacctggggctctccgagaaggctctctggaggaggcggggcgagaactgggccttagcatcaggaggtgcagtcctgggtcagatgtgcccaggttgaacctggcagctggagcggaagtgatgggcacgaggcagcgggagggctgtactgggggtggcctcccagcaccaggtctgcccaccgggtcgggacacacaccaggaggcccgatgttgcctttctgaggaagcagcagttacagcagctgcgggtcatggacttcacacattctgcagtttcagcagagagggtgctgggggccttgattttgaaccccagctctgacttcctaggtgtgcactgggtaaattcctcactctcgttaagctgcagcatcctcatctgtgagatgggagcggctatgagagcttaaaccgcatatgtctgctatcatgatcatgaacgcagatgctgtgtgtagaggattcatcagtgtcagacttgcaggaagagctcgagataagtccgttgctctcactcttccataacagccctgtgagtcaggtgtggatgcctccatgaggaaattgaagttcacggaggtgaaaggccttgcccgagtgcgcacggttgaatgggagactcagatcagcctgcctccaaatcctgcacactccccccgaccaggttgtgtccaggtccccctgagacttgggaagggaccattggctcagcttcctgcagaagctgccaggaggcacccagtcgtgggaagctggggcggaggaggggctgtgggtgaatcggaccaggggccatggaattggcctgaggcttatgctgatgtgtggagagacctgcctcaagaaggggtggtctcaaaacatcgaactgcgccccataaatacatacaactgcaatgtgtcaattaaaaaataagggcccgggccaggcgtggtggctcacgcccgtaatcccagcactttgggaggccgaggtgggcgaatcacgaggtcaggagatcaagaccatcctggctaacacggtgaaaccccgtctctactaaaaatacaaaaaattagccgggggtggtggcgggcgcctgtagtcccagctactcaggaggctgaggcaggagaatggcgtgaacccgggaggcggagcttgcagtgagccaggatcgcgccacagcactccagcctgggcgacagagcaagactccgtctcaaaaataaataaataaataaaaaataagggcccacacagtggtacatgcctgtaatgccagctcttcaggaggctgaggcaggaggatcactgaagcccagggcaacatagcagcctggacggcacagtgagaccctgtctctagaaaaataaatacaggccgagtgcggtggctcacgcctgtcatcccagcactttgggaggccaaggtgggcggaccacctgaggtctggagttcaagaccagcctgggcaacatggtgaaaccccatctctactaaaaataaaaaaattggccaggcatggtggctcacacttgtaatcccagcactttgggaggccaaggtgggtgggtcatttgaggtcaggagttcgagaccagcctggccaacatggtgaaaccctgtctctactaaaaatacaaaaattagccgggtgtgatggtgcgcacctgtagtcccagctaattgggaggctgaggcagaagaatcggttgaacctgggagacgggttgcagtcagccgagatcacaccactgcactccagcctgggcaacaagagtgaaactctgtctcaaaaaaaaaaaaaaaaaaaaaagagggcatggccgctccagaatgtttcttccaagggtagcatctcagttgacaaagagcatttgattcctccaccctgtgtggctactgctgggggacagagctggggacagacccaggcccggctccgtgtccagacgagatgaaggaactacgagggacagcctgtgtgatccaggagggtttgcaaagaacagaagcagcttagaggggagagaggtttcgggaaagtaaggccagagctggggcttcctttgagaccctgtaggacccctgcctccagccgggctggtgatggcctcacgcttcccgtgtgtgaagaggtgcccggagcagtggttctccctgaggggcacttggttctctgcacacacccaacttctgtctcctgttctgggttccatcccttctctgggcagggcgaacccagtgcagacccagaccccgtcggaggcttgggtaccacctgcccccagccggtgtgtgggtgatagatgtgggaaggacctacatcgagctgcaggaagcccaaggctgacccagatccagtttcccttccgtgatgacagtggcctgttatagcaactgcgttcaaaccgtggcacgcacacctcagagtgcacagagacgttctgagggcgacgtgggcaggagagttttcaggaaatcagtttgcagattctcagctgccataggtgctattgccagaaagccatctgcctgagagccagcatctcgccatcctgtcctctgcagaggagaggcctgaggctggctgtcggggcttggcccggggtgcgcagacctcctgggtggggaacagaggggcttttagaaatgttggggtaggggccaggcatggtgggtcacacctgtaatcccagcactttgggaggccgaggcaggtggatcgcctgaggtcaggagctcgagaccagcctggccaacatggtgaaaccccatctccactacaaataaaaaattagctgggcgtggtggcaggcacctgtaatcccagctactcgggaggctgaggcaggagaatcacttgaacccgggaggtggagcttgcagtgagccgagactgcaccactgcactccagcctgggcgacagagcgagactccgtctcaaaaaaaaaaaaaaaaagaaacgttggggtcagtgttcagaaagtaaaagactctagtggccacttagaacctttcaaaagtcaggtggtatccagttctttgccttccacaaaactgatggaggactcaattttcaactgagagatcatttcaagtaattttcagtaataggtatatatgcgatttaaggcggatagcatggagagaggttaaagaatggtgtaacgcggctgtgataaaactcttttcgacctcatctacttctttatgtgaacaaaatgtttcattgttcacatatttcttgttcattttagagacatggtcctacattgcccaggctggtctcgaactcctgggctcaagtggtcctgtggctgggagccacagcacctgcacatctttacaacaaaaccagaaacatgaaccaaattgatgctgagcctcgtttcactctagcaaaaaataataccctatagatacgcgaactaaagcaaaaaatgttccgcccatctcattgagagagcattccaccaaaaagttactctgctacttaatatttattaaaatgtataatgaggccaggcgcggtggctcacgcctgtaatcccagcactttgggagaccgaggcgggtggatcacctgaggtcgggagttcgagatcagcctgaccaacatggagaaaccccatctctactaaaaatacaaaaaattagccgggtgtggttgtgtgtgtctgtaattccagctactcgggaggctgaggcaggagaatcgcttgaacccaggaggcggaggttgctgtgagccaagatcgcaccattgcactccggcctggacaataagagcgaaactctgtctcaaaaaaataaataaaatgtatataatgtgtcggcttactttttttttttttttcttgagacagggtctcactctgtcgccaggctggagtgcagtggtgtgatcttggctcaatgcaacctccacctcctgggttcaagcgattcttccatctcagcctcccaagtagtagcttggactacagtgcccgccaccacacccggctcacttttgtatttttagtagagacagggttttgtcatgttggccaggctggtctcgaattcctgacctcaggtgatccaccagcctcagcctcccaaagtgctgggattacaggcgtgagccaccgtgcctggctgtctttttaattatgtactgccaatcatggtactaactaatcctgaatatattttgaatatttggagccttgtggtctctggaaatttttgttttcaatgtatacagattttttttgtggaagcaaaatgtaatggtgaataaaggacttgaaaatataaaaatataaactaggacaacattctttaggagaaatggaatagaaacaaattcaaggagagaagatccaggagctctgtgagggaaagaagagcttgtttgtgtagttttttgttgttgttgttttttttgagacggagtctcactctgtcgcccaggctggagtgcagtggtgtgatctccgctcactgcaacctccacctactgggttcatgccattctcctgcctcagcctccccagcagctgggactacaggcgcccaccaccgcgcccggctaattttttgtatttttttttttttagtagagacggggtttcaccgtgttagccaggatggtctcgatctcctgacctcgtgatccgcctccctcggcctcccaaagtgctgggattacaggcatgagccaccgtgcctggcctgttttcttaatattgaattttgagagttttatataataagccctgaaattgggtaatattagccctatagctgtgttctttttcaacattgtttagatgttttttctttttttttgagacggagtctcgctctgtcgcccaggctggagtgcagtggcgcgatctcggctcactgcaagctctgcctcccgggttcacgctattctcctgcctcagcctcccaagtagctgggactacaggcgcccgccaccacgcccggctaattttttgtatttttagtagagacggggtttcaccgtgttagccaggatggtctcgatctcctgagctcgtgatctgcctgccttggcctctcaaagtgctgggattacaggcgtgagccgccacgcctggcctcgtgtagtttttaaatggatgagtgtgggtatcacgtcgctggggtatttagatcccactgaatccatgagaaggaatgatgtcacacttttattttaggatggcaatattgacatgattttggaaatcatactctttgcaactatttaaacttggaaatgttcagattttgacttcagaaagtgccagggagcgcacagttgctcagaattagttcgcaggtgcacaggcagacgggcgcgaaggcccccgagttacagaaacagaacgtggaacagtcctgtgtgagggttgcctctgacctcccctggggtccgcacctccctgggctccagcccgagcctggggacttcccctgtggaggatttgcttatttgggagccaatggcttgacccaagttttctccctgaatcttcccagcaatcccagggaggcaggttctgttgcagatggaataactgaggcttagtgagtttaaaacttgccaggattcaaacccaggcagcctcctgtgcgcgggctcctgactcttcaacacctccacgtggatgggctggttccctcctgatggacttgagcgcctcctaatcaggtgcttaccttttgtgagcctcagtttctgcatctgtgaaatggggtaataatacccatgtcccgggctggcagccaggagtgcctaacagggtgtgccctgcctcccccacggtgggtaacagagtgtgccctgcctcccccacggcgggtaacagggtgtgccctgcctcccccacggcgggtaacagggtgtgccctgcctcccccacggcggccacaggggcctgggggctagggtccccccaaagggttgatttccaggtaaacatcagcttatcccagctgctcacttccgccttcctgactgtgtagctggctctgagcagtgctgacccacggggagatctctggcttggcctccgagctggcacctctctcacccacattctctctctgcagctggacccacaaaccgtggagaccaagaactggcacacggacgtgattgagatgaacggggtgagccggggatgggaatgatcagtggcgtgagccgggaggtggaacgtctgtgcagcaggtgggcagcccggccctgtggctgctcctggggccgctgtgccgcctcgacctccccgcagcccagccccctctcccctcctgcccacaccctgcccgctgctgtcctgcaggtgttgtgttgagggagacctgggtgtgagctagccctcatttgcagtcttggggaggggacccctgtgttttgggggcattcctcgggcactcacaccctggggaatctttacctgcctcaccccccaaccagatcaaagtggaattttccatgaaattcaccagccgagatatgagcctgaagaggaccccgtccaaaaagcagaccggcgtcttcggtgtgaagatcagcgtggtgacgaagtaggtgctgcctcgggtctcccagtcctggcgtcggtgccccgggtcccccccagcccgggccccccagccctccccgccggtgcccatcctggcacctaatcagttaccccccgctcggcggtggcagatggccggtgtggatctagagtggccgcagaggcgctcacaggacacttcagaagcacgcgagccagcacctaaacgctggaaggtctcttgtgagatcccagatcgtctgctcctcgtaacaagcgggaagctctgtcagccgggggcctacgtttgggctcggcaccaacggggactggcggcccctcgggaaagggcacgtgtcccccggttcaccaccaccctggccccttgtctcaggcctgacccacctcctcatgtgggctgcctgctgggcctcctacaagcatctgaatctgggggacgttctttccctagagtctcggccttaccttcccaagttcccaaggcttctcctgcccacgtccgtcgatgccccttcggcaggcctcgggtgggctggctggggtggggtgcggtggcctctttctctgccctgcccctgcccccgccccagctctccatcccaaatgctagaagctctccagggtgtgtgtgtgctgggtgggggttgctacgggagagctgtcgtgggggctgccctccacccatcctcacgctccaccccaggcgggagcgctccaaggtgccctacatcgtccggcagtgtgtggaggaggtggagaagaggggtatcgaggaggttggcatctacaggatatcgggcgtggccacggacatccaggcgctcaaggccgtcttcgatgccagtgagtctgggaggcccagccggggcaggtgtggctgtgtctgagcaggctggtgggatggacaggagagctcgggggaaccaggagcctccctggagaggaggcttgctctgcttcagagtccccgtggcaagtgctttctcttgtaatcccctcccctccaatctcttgtcccttgctgcaggtaagcaactgcagaaactcacaagggccgactcacttgcccaggatgacccaacttgtaggttttggttctggacttaaaactcagatctgactccagtgtctttcttgctagttcctgggtgcctggtgagccgcagggaaagagctttgagcctgcacctgctgtctccagggccccaggtcccctctggggcagtgctgcctctgcgtgaagcccaccatggtgaggcctgacctttctggtttctcctccctgctcctgctggttcaggtgcagcagccacataccccactgtcaagaaacctgcactggccaggcagggatgaatccgtggggagcctggagtggaggacggggtggggcctgggaactggccggcgttggtgcctctgtgcagcctagaagctgaggctttgtcggaacatgcttttacgtgtgaaaagtgtgcaatgccttccagagaggggcttagcgatggagaggttccagtcggaaggaagctgcaggccacatggtatgaatgtggctctgaactctgggtgatggatttcactccccaaacaccctttcccaagcagccacagcagatggcccccaggctatctctccctgttcccccaaccccgacccacagagccgagtcacagacacctgtgggccctctctacatcctgctcttccaggggagaccagaaccagagctggagtgggtgggggctgtgtcaggatgggtcgggggtggaacggggctgctggcccagctaaggctgcctgacctcggccccacccctgcagataacaaggacatcctgctgatgctgagtgacatggacatcaacgccatcgccgggacgctcaagctgtacttccgggaactgcccgagccgctcctcacggaccgactctacccagccttcatggagggcatcggtgaggccctgagggctcctaggactgggctgggccagactgagccaggactccctgcccggagaagtaaccagcaggagaaatatctgtggcttcctttgctggctgaccttcccagtgcactggggcctgtggctgaggggtccgagggtgaggtgtggcctgctgggacctggtgcagacactgggccctttctcgcctgcctcttgcccctgatgtccccatgggcagccccttctgcttcctatttggacgttggcctcttgcttggaagctcgagcatccagggaagactgccctgaggtgagtggccagaagccagcatcccagaaccaaggaggaggctggcttaagccatagggcactcgagatgggttgtgctgagccttccagcgggaccacacaccgtcccgtcacctctgcggagggccccggccagcaggccttccgcctccacccacctgggccaaacccagccccaaggaatcccttcagccttctctgctcctggggcagactggagcttcagcccccacggaaggctgcttgcacccacgctccagcagcagaaggggtggagaaagagaatccaccgctggcaggatatgtccctactggcttaaccttagccacacagaccagggggtgtcctgttacgagacaggggatgccccagcacccaaggcctatgcagtcagctgcaggaagggggtctgctcccaccagccggcctcctggctgagttaccagtcgtggtggggcctcctggaggaagcagctgctgacagcccacccagacaccaggccctcccctgtggggtctgctccccaaaggcctggaagcctgggctctctcccgcaggggcccacagcctcacgaccacaggggccctggcggggagccccaggagccaaacgccacactggcccttctctcccacagccctgtcagaccctgctgccaaggaaaactgcatgatgcacctgctccgctccctgcccgaccccaacctcatcaccttcctcttcctgctggaacacttgaaaaggtaacggggagcggccccaaccccacctcctcagtccctcctcatgaaaaggtaacggggaggggccccaaccccacctcctcagtccctcctcgtgaaaaggtaacggggagtggccccaaccccacctcctcagtccctcctcgtgggcgctggcctccatcgggctgtctgtggggagtgagagtttgctttccaagttcttgcactcatgtttttctgttttgagaaatatttgggtcccgtaaccagtagtaacctcaaatattgaccatagaatgctcagaatggcagggtgagagcccaggactacaggcaggttttataatcagtgggtcccaacctactggtggttcattcaacgaatgtagccatttctagatgcagtggggggtggacagcagtggggggtggacagcagtggggggtggacagcagtggggaatggacagtagtggggatggacagcagtgggggaatggacagcagtggggatggacagcagtgggggacagacagcaggaggatacattgtaagccttgatgcaggtgctgcttttcagttacatagagacgtgtggactgtgttacagcatgggttgtattgtgggccacagtcaaaaaaggtgaaacccactggtcttggcccacacctcactagacatagggaaactgagtccccacaccaggcggagacttgcttgggttagtagcagacctgtccttagagccctcaacttccagatcctaaattcagacccttcttgccttcccaccaccctttctagtcaggtccaaccaagagtggctaaagttggttgtacttgtagcaaagttcagaggtcctcaggcttgcgtggggaggtggtccctgggcgtcccttaaacccacctgcacgccaggaccggggagccccctcagactgctctgcggaacaattcttccctgagctcagccccagctcagggccaggccccccgctgcagctcagccacgccaggctcgggagagccagtggagacctggacgcgcccggggctggtgtcttgtttttcccatcatgaaacatttttcctctggtttggccaggactagagccccaaccaattccgaaagcatttggcaagccttgtggggaggagtgggaagggaaaattcattcggcttccaccctgggaactgggcacagtctgttcccacatctgggcccctggctggaccgtgtgcgcgcgtgtggtgaggggctggccccgctgcacagctgcctgttggcatcacagtgtttgtttgcctgtttccaaagcaggcgcagccacagctcctgcctggagggtgggaatgatggtattgagggtgagaggcgctgcttagggtgggtgggtctcagcccagaaacattttttgagactgaaggagaaccagaggccctctgatatgtttgctgaccctgggcctgcctggacaccagccctgatggcagctcctgctgttaccccagggaagcatcgcagagcatctggcctgttgagtaagagaagcaggagaggatccagagggaggacaatcctgggtcccacgaggcagacggagaggcataggaggcagccctgggtcccatgaggcagacccttccggagaggcacaagaggaagccctgggtcccacgaggccgacctttccggacaggcacggggggacagtccccgggctcatctggaagtagggctgctcctgccccagcacagctggcagagccccgggtctagctagtgactcctgctgggctccaggccctgcctgcctttctcccctgccccacccaccttaactcttcttttgggccacttagcacatgagaaagcaacagagcggtaggtcctggaggcagctaccggggttcaaatcccagctctaccagttgctggctgtgtgaccttgggcaagtcacttaacccctctgtacttcggtttcttcatctacacgatgggggtgacgataatcatatttacctcaaaggactgcggcgagtgtgagttgttccagggagttttcagaacagtatctgctctcaggcaagggagctggagttggcatctgtgggctccctggctctggcagttcaccatcagttcagggggacccagcagctggagatgttagcacagaacactggcacatggctggggccctgctctcctggatgagtccccttcccccgggggaggtccccactcctaggagacagagacgaggtgaccccttccaggagtccttcaggagttcccacagcgaaggccaagggtcctggagctccgagtggctgctgaggaagggcttctttcctccccatcttctccttcttagggttgccgagaaggagcccatcaacaaaatgtcacttcacaacctggctaccgtgtttggacccacgttactgagaccctcagaagtggagagcaaagcacacctcacctcggctgcggacatctggtcccatgacgtcatggcgcaggtaccctggcaccgcccgggcccgtggctggcggagggtgacggtcccatgacgtcatggcgcaggtaccctggcaccgcccgggcccgtggctggcggagggtgacggtcccatgacgtcatggcgcaggtaccctggcaccgcccgggcccgtggctggcggagggtgacggtcccatgacgtcatggcgtaggtaccctggcaccgcccgggcccgtggctggcggagggtgacggtcccatgacgtcatggcgcaggtaccctggcaccgcccgggcccgtggctggcggagggtgacggtcccatgacgtcatggcgcaggtaccctggcaccgcccgggcccgtggctggcggagggtgacggtcccatgacgtcatggcgcaggtaccctggcaccgcccgggcccgtggctggcggagggtgagaccagccccttaggaggagagagaacagctcagagtccccacacctcttccctcgtgggaagctgggttgatgggctatggggtgtcaccagggaggcaggactgtagacacttctgcccctcccaggccaaaacaaacatgtgagcctagaccagggcccagagatgctggctgcattctcaggagggcctcagtctcagaaagcaagcccaggggtggggagatgctgggcccttgtcctcatgggtggaagctctgaggttgcttccaagggcgggaggcttccctgggattcctgcaagacccagagcaggggccggactgtggccgcctcaggacagagcagaagcttatggccaggttggggaagtggccctaggcccccgaccctctgccccgtagcaccttccacggctgcagaaaggcaaacacacctgggctccccaggaaggggcggtggccggagccagtctagggagtgggaggggcaacacaggctggagtcagcaaggacgaggcctaggacagggagcccagcctccgccttcctgtctccccacaggtccaggtcctcctctactacctgcagcacccccccatttccttcgcagaactcaagcggaacacactgtacttctccaccgacgtgtagcccgaggcagggtggctgcgggcgggtggtggaaccagcccctccagcctggggtccaactcagacttgaaagactgcaatagaaaactcccaaacccagcactccagactcgagggaagccagcttccaagaactggaatgcgtacgtcttttgtgccaccttgtacaaagccggctgcccagccccagcctcaccaccgcatcccacctcctgccctccatacctctagttgtgtctgatgctccgtgctgttcgggaattgttttatgtacacttgtcaggcagaa

SEQ ID NO: 15350 - DNA, 145483 bp, Homo sapiens
ccgcgacctggagcagcgggaggccgaggccaagggccgcccgggctcgcccctcgccgcggaggagacccccgggcgcgagcacctgcccccgtggcggcgccgcaggttcctgcgggtgcccgagcgggactcgcccggccacagctcgccggagagagacagcgacggcagccggcacagctccgaccgcgaggacgacttctccgcaggtgggcgccccccccagaccccgctcgaccccgccgcgcgccccccaccccgggctgccgggaccccttcccggccgactccgcggccctgtttaacctcgagctcggggccggggagcgggcgggaaggagggtgagctgcgcccgtgtaccccaaagccacctgtggagcttagaaaacacgtgcaaggcgacgttaagctcgggcgactctatgaaaatgaactggcggcggcggcagggccggcgcccgggcctttgcgctttgcgctccgtggccctgacatcccccagcccctccctccggcctggcccccgccagatcccttggcgccaccgggtgctgtcacccttctgtctgtcacccctctctgcacacaccccaggggcttcccatctcccggaaatccccgatccttctgagctccgctttcctaaccgcggaaggccgaaccttccactccattttctgaacttagtctcctcttctccaggctgctctgtgtgttggggccacgtgcaaacttcagggaagggccacggccctcaccagccccctctgcggactcgttttcttcttagaaggcggcgcccggcctcttggctttctaggagtctgggagcaagagggcaaggggaggcttaggcccatctcgttttccggctggcctggtgcccagagaccatgtctagtccagcgtcttcactggataaaagaggaaaccgaagctcagaaagattaagtgctcgttggggtgagctgagaccttcaccgggtctcctgtcatctctctcccctcgcatctgctctcttttctgaggacagggcctgatcttagtcatctttgaacccccttctggtagtatgcacggtgctttgcagcagtcaaagctcaacgcataatggctgaataaatgattgcctggaattgagcgtccaccgagctctttctaggtcagggagtgggaatggggctaaggaggagaggtcaggtggggatgggggtggcgtgggagccctttgctgtgtctgtgaactgtcacggtctcctcagccacgcggaaagcagcacactggtggtgtccggttgggtcaagctgcaaccaggaatttaagatgccttcctgctcagtgaaggaggaaaaaaaatcattgatgctgggattgttccaaaatctccattattagattttatctggatgagtttgcatttgaatgaaaaactgtccactttgctaaaagcacagttggaaggtccatcaagtcatctgttttgatcaattacacttattccttagcaaagattggctgtgtttcccacaggcaatgctcttgccgcccatgctggtaacatttttatatgtctctttaacttaagggaagagcctgaagatttcaccctagtgccaagttccaaatgcccttggtggaggctacccaactggccccagctgcttcagagctggctgcaatcctgtctccccccagacccacatctgtcaccctccccggggtgcccagtacactaggcttttcccagggagtgatttttatttctgtgagtcgtcgcctgtctcccttaggacactctagcacatagggcaccttgatgcacgttagaaatcggcgctgcccctgggaattgcaaaagatgctcccctctgggtggaccaatgataacaagagtcaccttcctcaggactacagacgtgagctggggcacgtgtctggcactcacggctttggctagtgatgcctgggctagatttcaggtgccattccagccccctctgcagggcaagctcctgtggcacactgcacagctacatgttcgggttctgcctctgtctccaaagcctcctcgtgaggaagtgagtggggggtggacttgcacttggttacatgcatgcacacataaatgcatagcagcacatgtatatacatggtacactgccacatacatgcatgcacacatatacacacacacctgcacacgtatacacatggtacactgtcacatgcatgcacacacacgcacagcagcacatgtatatacgtgacacactgccacatacatgcatgcacacacacacacctgcacatgtaaacacatggcatactgtcacatacatacatgcacacattcacaccttcacatgtacatacatgcacacacacctgcatatgtacatgtgcacagtgccacataaatgcatgcacacacatacctgcacacctgcacacgtatgtacatggcacactgtcacatacatgcatgcacacacatgcacacctacacgtatacacatggcacagtgccacatacatgcatgcacacacatacacacctgcacacgtatatacatggcacactgccacatacatgcatacacagacacctgcacatgtacatacatgtgcacactgccacatacatgtgtgcacacacaatctaggagaaagagccctcaagcatacagggaggcattagagtggagcgattaagggaaggcgttttcgcactgtgggaaacagctcattgaaattagtgcagttggcaacagaagcacccgggcggtcttccttggccacccttgtcctttgttgcttcatttttctctacagcattccccaaattaccaccgtggatgctgcaattttgcatgtgggtcttattcactgtctccctccagtcaaacgcaagctccaggcaggcaggggtttttctctctcaagatgagtgcattggacacggcgagtattattctgtttttggactccgtttcggttctatgcggacgcgtatgtgtacactgggagctgatgtagaatgtatttcttgctgtgagatgaacaaaaaggtttgaaaacacggaattaaaccatgtttctgaagctagactgcctgtgtgacattgggagaagttatttgacttttctgagcctgagtcccctcatctgtaaactgaggctaataagcacctcttctctcctgctgttgatatgagaaataaatgggtcatatttctaaagcgttttggacgggtcctggcacgtaggaagcacccataagtgttaattaaccactactacaggtcatttttctttgagttgcttcttctttctttttcttttttgtcgagacagagtcccgctctgtcacctagactggagtgcagtggcgtcatctcgggtcactgcaacccctgcctcctgggttcaagtgattctcctgcctcagcctcctgagtagctgggatgacaagagtgtgccactacgcctggctaatttttgtattttagatgagatggggtttcaccatattggccgggctggtcttgaactcctgacctcaggtgatccgcctgtctcggcctcccaaagtgctaggattacaggcctgagccactgtgcccagctgagttgcttcctcagagcttcccactccccagtcattctggatcgcagatggtttggttttccgtggtgcatgtggctggtacaatggctcacacctgtaattctagcactttgggaggctgaggtgggaggactgcttgaggctgggaatttgagaccagcctgggcgatacagtgagaccccatttctttctttcttttcttttctttttttttttttttgagatggagtctcacggtgttgcccaggctggagtgcagtggtgccatctgggctccctgcaagctctgcctcctgggttcacaccattctcctgcctcagcctcctgagtagctgggactacaggtgcccgccaccacgcctgtctaattttttgtatttttagtagagacagggtttcaccgtgttagccaggatgatctcgatctcctgactttgtgatccgcccatctcagcctcccaaagtgctgggattacaggcgtgagccaccgcacccggtgagaccccatttctaagaaaaaaagaatcagtcagttgtggtggtgtgaacctatagtcccagctactcaggaggctgaagtgggaggatcacttgaacccaggaggtcgaggcttcagtgagctatgattgtgccactgcactccagcctgggtgacagagcgagtccctgtctctaaaaaatatgaatgaataagatacgtgtttccccctcccagcaaggctctgactctttctagaacctttcaggcagcagggcaggactcaaggcagaggtcatcttggctcatgagtctctttttgctggattggcctccaccagcaatcacactcattatctgcattcagaggtccttaaggtcaggttttattgggcaatccaggctttgccttagtctcagggtttcagagagagaacacgtgaggcctcacctacagaggcccagaagcagaggtgaaaagggcctccatttccttttagatgaggggcagattcctaagccaaaacacatttcggcttttttgtccgcgcacgatagcaacatcagagtgtaaataagttagtctgccaattcgcttagtatcttccttctagtaccttgtagccttgcttggtaccaggaaagacaaagaccaggccgtgttggtgtggtgaggagtgaggggacgggcagagccaggatcagctgtgttgggtggtgcgtgctgtgaagtcaggcctgcctctccccaggtgtgagaccaccggccagccactgacccttccaagcctccgtctctgacagatgggaataataaacgtcgctaaccctaagggcttacttttgccagctcctgttctgagcacttcgtatgctttaattcatggattccacagagcaccttcgggagacaggcactgatagggtttggctctgtatccccacccaaatctcatctcgaattgtcatccccacgtgtcgagggagggacctggtgggaggcgactggatcatggggcggtttcccccgggctgttgtcctgatcacgaggggagttctcatgagatctggtggttttaaagcgtttggaagtttcccccgcaggcttgcttgctctcctgccgccttgtgaagaaggtggttgcttttcctttgccttccgcggtgattgtaagtttcctgaggcctccccagccttggggaactgtgagtcaattaaacctctttcctttataaattacccagtctcgggtagttctttacagcagtgtgaacacggacaaatacaggtgctgttattatttccattttccatgagaatcacgaggcctggagaacttcaataacattgcccatggtcacccagcttataagtagcccttaggatttgaagccaggcagtctggcttccaggtccatgctttcgcacaccaagctgtaccgcctcaaatattagtacttccctctcaggatagttacgaagattaaatgcaagagaataattaaagagtgtagcagaacacctggcgtagagtgacgatggagggtattcgtgtctctgtgtgtgtgtgtgtgtgtgtgttgttactgattttttgtttgtttgagatggagtcttctgagtagctgagattactggtgcccgccaccaagcccggctaatttttatattatttatttttttgagatggagtatggctcttgtcaccccggctggtgtgtaatggcaagatctcggctcactgcaacctccgcctcctgagttcaagcaattctccagcctcagccccccgagtagctgggattacaggtgcccgccaccacacccggttactttttgtatttttagtagagacggggtttcgccatgttgtccaggctggtcttgaactcgtgacctcaggtgatctgcctgactcggactcccaaagtgctgggattacaggtgtaagccactgtccctggcctattttattttaagacagggtcttactctgttgcccaagctggagtgcagtggcatgaacacagctcactgcagcctccacctcctaggctcaagcgatcctcccacctcagcctcccatgtagctggaactataggcacatgccacgagccggctaatttttaattttttgtagagacggggtctcactatgttccccaggctcgtctagaactcccgggctcaagtgatcctcgctccttggcctccacaagtgctgagattacagatatgagccaccacacttggccctgagactttttatttttaatctttatgggaaatgaatttcctactaagtagtcatgttacctgaacctgattcatctgtaacctgatgggttttctgcccttcccatcagtgactaatgagattgttgctctaggaagaattccttgtgttcagtggatgtctgagtaacttaatttgaaggattgaattttcagcctcagctgtgatagagtaattttttcccatccctattgtgaagagatattaagaagccatttgaggccgggcgcggtggctcacgtacgcctgtaatcccagcactttgggaggccgaggtgggtggatcacttgaggtcaggagttcgagaccagcctggccaacatggtgaaaccccgtctctactaaaaatacaaaaattatccgggcagagtggcacatacctgtaatcccagctacttgggaggctgaggcaggagaattgcttgaacccgggaggcagaggttgcagtgagccgagatcacgactctgcactccagcttggtgacagggtgaaactccgtctcagaaaaaaagatgggatcctccatggtgctgttatcgttactcttcctcgatggtgtctttattgttgctgttataagtccaggaattttcagttggctaaaccaggctactgcttatatttgaatctctccaggtaataaagtttcccaagcttatttgtttgcctttctctccttttttacttaccgctgtccctactccagaggtgttttgcatcttcagaggaagacaacctttccaggtcccctggggtccctgatgcttccccgtcaagccctgtctctcttggcgtctgcaaagccaccatctggcttcttatattctgttttctacgcagatcctttctgccattgctcattccatccggcgtcttttcccgtgccctttctggcgtttgaagagccctcccgccttgacttccccaaaccagcccccaaaccaacccctcctttaagggctgattttccgtggaacctgggattggtcgataggggtttgctgtatatgacaaaactgaaaaaaagtagcttaaacaagatagaggcttatttatctcacatgtaacagaattccagcggccagcagtccggccgagagtatggtgactccatgatcatcaggaatggaggcttttcagtctttctgcttctctgtcctcaagctcacctcctggtccgaaatagctgctggagatccagccatcacattcacatttcaggcaggaattagaagaatgggaagaggagcgtaagagtgagtggtggctgtttgtctgccttttaaggcactttcctgggaacctctcttgacagtttctgtttttatctccttagtcacctcgaggtataagagaggctgggaaatgcagtattttatctgggtgtatggccacctcaagtaaaataggggctctgttacaaggaaaaatagaagaattgatattgcgtaggcagctagtggcctctggcacagccttttccaacgactccaacccatcttgcggttcttagagcgggccccacacggcacaattgtcttattattatgccatctattaatttattgagtcagtaaacaaataacaacggagccacggccctgtgcaaggcagtagccttttacatgtttactgtgaagagctgctctcaaactgagtggttagctgactcctggaaagcggggaccgtcgtttagaccccttttctctcccacaacagtatctttcacagggctgggctcatggccggcactcgataagttcctggttgattttagaatagtcacgaatgagaagttcagtgaaaaaaatacattccctgccttggtttactgtgctggaaaatgctggttgtgtaaggttcgtttttagcttgttctggttttgaggaacccattgcaaggagggtggggagtgggtcacctccaaacatcagggctgtgttgtagtcacagggactcgtcgtccaggtgttggggcagatttggctgttttggaaactgggctctgtataccatactagaatcataagcagaaatccccgtgaccacctgactttgcaccaccgctctgtgtagctgtatttacaccacgtgagtctgtcctgttatttctgcaccgcgtagctgcagagtaaatctgcaagtctttccgcagcgatcctgttcctgtcttcccattcgacgctcgctacagtcggcctgagataacactgtctgaggggaggctgcctggacctcacgtcgcgtttttcaactgctgagaaaaatgattactttaaattttttttttttttagacggagtctcgctctgtcgcccaggctggagtgcagtggtgtgatcttggttcactgcaagctctgcctccgggatccacaccattctcctgtctcagcctcccgagtagctgggaccacaggcgcccgccaccacgcccggctaattttttgtattttgagtagagatgggatttcaccatgttggccaggctggtgtcgatctcctgacctcgtgatccgcccgcctccgcctcccaaagtgctgtgattacaggcgtgagccaccgcgcccggccactttaaaatttttattgacacagagctgggaaggaactagagtataaagatactccagtacctactctctgcaaagcactaggtcaagtgctttacctacgctgtcacgttgaatttttagaacagcctcctattgggcagatggggagactgaggctctgactggtccaccagcaagcccaagatctcttagtgctaagtggtggggttattctttcctcagttttaaaaatcaattattttattttatttttttggggcatggagtctcgctgtgtcgcccaggctggagtgcagtggggcaatcccggctcactgtaacctccgcctcctgggttcaagcaattctcctgcctcagcctcctgagtagctgggattacaggcgagggccactgtgcctggctaacttttgtattagtctgagattttaatgggaggctggtcacataggcacatcgtgctatacaaccagccatggcaagaaaaaataaggaccgcaaaaatgaaataaatccagatgcacatcatcagtcttgacggcttatgcaaaggaaaatgatcagccttacaggatggttcattgctgcaggtgcaaggttattaaatcactaacatagtgagaaggatcctccttgtcacccatgagccaggtgtgtgaggccatggctgggcgtggtggctcacacctgtaatcccagcactttgggaggccaaggcaggcggaccatttgagctcaggagtttgagacctgcctggtcaacatggtgaaaccccatctctactaaaaaaaacaaaaattatccaggcgtggtggcaggcacctgtaatcccagctactcgagaggctgaggcaggataattgcctgaacccaggaggcagaggttgcagtgagccgagatcgcgccactgcactccagcctggacaacagagtgagactctgttacaaacaaacaaacaaacaaacaaacagatagaaaaggatactagaattaagcaccatgcaaacctattgtgttcctgatgtcattgacctagtagtatattaacttcatttgtgagggtggaaggcctaaagatctgattgctcagctctctgaaaaacgcgatttccttggggattttgcacatttggaatgtataaggaattcagagaagtctagaagtacactgcagttttccaaggtctctgttcactggacttgggggcccatcttggtgacctactcatcacttacagcattatttcaaatcataaagaacagactcatcggccaaagtttgaaatcgtccatttgtaatttggggacagctgactataatgagatggttttggcatgccgaatgttgagcagaagtgtaggttacacacatactttaatcagtatgttcccatgagactaaggatcattcttctcattctatattaacaagtctagagacattgagtcactggtctgtagtcacacagctcacaaaggacagagccaggattggaacacagctctttctggggccaaagttattctctactccagctcaccactaactgttaacctctccagactatagcttttcactttaaaataaggtgactggactagataattttcccgacagacctaaattttatggacgccagtaagttaaatgagctgggactacgtaccaagtaaggttaagagcctggctttgaatcagagaaactgggtttggatccaggctgtagccacttgttattttgtgtccttaaccaagttaattcacctgtctataagcttattttcttttctatacaatggggatcattgtacctcacttggtgttgcaaaggttaaatgaaataatgtagcatggggtccggcatgtggtgagctccgtataaatgaaaacagctactggtgtgatgatcaagagcatgctgtccgaggtagcggattacttgaagtcaggagttcgaggccagcctggccaacatggtgaaaccccgtctccactaaaaatacaaaaattagtcgggcgtggtagcacgttcctgtaatgccagcactttgggaggccgaggcgggcggatcacctgaggtcaggagttcaagaccagcctggccaacatggtgaaaccccgtctctgctaaaaatacaaaaattagctgagcatggtggcacgtgcctgtaatcccagctactcaggaggctgaggcaggagaatcgcttgaacctgggaggtggaggttgcagtgaactgagattgcaccactgcactccagcctgggccacagagcaagactccgtctcaaaaaaacaaaacaaaataaataagagcacgctgtctaggaccacattgcctgggttcgattcacggctctgccacttaactgctatgtgaccttgagcaaattcctcaacctttttgcacctcagtgtttatatttgtaggctaggggacgatgataatataatatcaatagtcaagtaagttggcgtgaaggttaaataagtcaatatgtatataacataccttgaaccagacctgacacatggtaaccactcagtacgtgttggttaattttatgattatccccactgttactagtttggccatgcttcttgctgaaatagactataaaggtgaaacatggtatcttgctcatcttgttgcctggtcataaccttaattgaaactgaaaatcctgtaatttgaataatccaagagctggaacagcgaagcatccaattacagacgcgtcacggctgcagccttgggggggacggtgaggcggccgcactgtgctctggggttggggtcctattacggagaaagcctcgttttgtaggcagctgcctcgccttctgtttggctgcataattgcgcctttccgttttattttaaagcatcttgaggaatccagagcccactcctgctgacagcagggaaagccgccgcatgtcccatctctaatgagcctccatgatgctctgtggccccacctaggcagcaggctgggctggcatccgctggctctctgagcacagctcaccatgctgggcttcattatggggctccctgaacacccctaggatccccccacgcctgtcctcattgtctcagagggcacagagtggcttcctgaatgccgagcttgttggtaacctttgtgggctggcagtgagcacgcagaaattaattattcatatcaatgggctgaaggagctgttgttcactgaggtgactcccctttggccaccagacccagagttccccagggtctttagacaggcagaggacagcgcagtccttagagacagctgcaacagcagggtggcacgtggccggccccaggctaagtgcagtctgctgatgtgctttgtttgggctacagagggttaaaacaaaattggatccatttaaaaccaggttttacctagcaatctggatttctggattttcttgaaagatgggaagatgggcaatgtgaatgggaggcattagttagagccgacgggccccttcaggctggacgtgattttgccaatggcgtcagctttcctctggcccctttctccacttctgacgtgagaggagtgagtctagtgcagggaacagaggaagactcggagctgggtttgcggctgcctctgctactcactcctgcgtgactctaggcaaatgacacagcccctgtgggccccgctctcctcctctggagcagggggttataacagcttccctacctcgcagatttgtgagaactgagcaagttgatataagggctgagcctggcacatagtaagttctatttaggtgttcagtttctttctttttttttttagtatttattgatcattcttgggtgtttctcggagagggggatttggcagggtcataggacaatagtggagggaaggtcagcagataaacaagtgaacaaaggtctctggttttcctaggcagaggaccctgcggccttccgcagtgtttgtgtccctgggtacttgagattagggattggtgatgactcttaacgagcacgctgccttcaagcatctgtttaacaaagcacatcttgcaccgcccttaatccatttaccctgagtggacacagcacatgtttcagagagcacgggggttgggggtaaggtcacagatcaacaggatcccaaggcagaagattttctcccagtacagaacaaaatggagtctcctatgtccacctctttctacacagacacagcaacaatccgatttctccttcttttccccacatttcccccttttctattcgacaaaaccgccatcgtcatcatggcccgttctcaatgagctgctgggtacacctcccagacggggtggcggccgggcagaggctgcactctgggcactttgggaggccaaggcaggcggctaggaggtggaggttatagtgagccgagatcacgccactgcactccagcctgggcaccattgagcactcagtgaacgagactccgtccgcaatcccggcacctcgggaggccgaggctggcagatcactcgcggctaggagctggagaccagcccggccaacacagcgaaaccccgtctccaccaaaaaaatacgaaaaccagtcaggcatggcagcgcgcgcctgcaatcgcaggcactcggcaggctgaggcaggagaatcaggcagggagcttgcagtgagccgagatggcagcagtacagtccagcttcggctcggcatcagagggagaccgtggagagagagggagagggagagctctttcttttcttttttttttttttgagacagagtcttgctctgtcacccaggctagagtgtagtggggagatctaggctcactgcaatctctgcctcctgggttcaagtgattctcctgcctcagcctcctgagtagttgggactacaggcacacaccatcacgcctacctaatttctgtatgttttgtagaaatggggttttgccatgttgcccagggtggtcttaaacacctggactcaagcaatctgcctgcctccacctcctaaagtgctgggactataggcgtgagccaccccacctggtcaagagcaatacttttttggtctgagtattttatttggagagaaatagaacttggccattgagcttatatacaccgagatagctgccacattacagggaaaaactatgtacaatcaaatatatatatttttttctttgaggtggagtttcgctcttgttgcctaggctggagtgcagtggcacgatcttggctcgctgcaacatccgcctcccaggttcaagcgattctcctgcctcagcctcccgagtagctgggattacaggcatgtgccactacgcctggctaattttgtatttttagtagagatggggtttctccatgttggtcaagctggtctcgaactcctgacgtcaggtgatctacctgcctcagcctcccaaagtgctgggattacaggcatgagccactgcacccggccaggatcagaatttttatattcaaatcttaaatctctcctttatattcctttaaattgctattaactgtagatattcagcattgttagggtaatttaaacttgttaaggaataatttaaatattttgcctaagtcatccctggggtggtggttactcatggagaggaaatatatatatatacacacacatcctagtatcatagattccaaaaactgatgaaagccaaaataaatgttcattttaggttgaagggacctgaagttagcttatctttaggtttaaggtggtggtggggggcggggaagtccaagtcctgtgtaacatttcacatctcaggccgggagcggtggctcatgcctgtaatcccagcactttgggagcccgaggcgggtggatcacaagatcaggagttcgagaccagcctgaccaacatgatgaaacctcttctctactaaaaatacaaaattagccgggcgtggtggcgggcgcctgtaatcccagctactcgggaggctgaggcaggagaatcacttgaacccgggaggcggaggatgcagtgagccgagattgtgccattgcactccagcctgggcgatagggcgagactcggtctcaaaaaacaaaaaacaaaccatttcacatctctccaaaatagaaacagcaccttagactgccttgttttcacagttttgtcgctttggaaccatagagtctgtcatctttgaagaagtgaaatcactgtggggttaagacagtatctttgcacagtttgcgtgcaatctctgagaagctagcacagaaggacttaggagttaagaccgtaacctttggccgggcgtggtgcctcacgcctgtaatcccagcactttcggaggccgaggcgggtgagtcacgaggtcaggagtttgagaccagcctgaccaacatggtgaaaccccgcctctacttaaaaaaatacaaaaattagccgggcatagtggcatgcacctgtaatccaagctactcaggaggctgaggcaggagaatggtgtggatctgggaggcggaggttgcagtgagccgagattgcacccctgcactccagcctgggggacagagcgagactccgtctcaaaaaaaagactgtgaccttcaagctctgcagccttaattcacaccaaatagtacctgcttagtcacctaaactatggccacgtcttcctgctctttggatgccccttagtttgctagttgggtctcaaatcatggtctttaggtgaattaatggccggcacagtgtttgggagaaaaacagaatctgcagcttcacatctcatcatttcctgggctgagctgtctcccaccctgagcatattacaaaattaacaggttttagaagctgaaaagtggaaataaccagctttcgtttctgggctgcagcttgtttagtgccacatcttggagaaagctctgtgcgtggttagatgggttgactctgattgtctgcagctccattcaaggatttgttgggggaatttcacactcctttagctgtttggtaaaagggtgaaaaatttcttaagtccaaattcccatcccagatacagcttctccccaagtatctctttatctctctctctcttttttttttttagacagtgtctcactctgttgcccaggctggagtgaagtggagagattttggctcactgcaacctccaacttctgggctcaagcgattctcctgtctcagcctcccaagtagctgagattacaggcgtccgccaccacacttggctaattttgtacttttagtaaagatggagtttttccatgttgatcaggctggtctcaaactcccgacctcaggtgatctgctggcctcggcctcccaaagtgctgggattacaggcgtgagccaccatgcccggccaatttttgtatttttagtagagacgaggtttcaccatgttggccaggccagtctcgagctcctgacctcaaatgatccgcccgcctcagcctctcagagtgctgggattacaggtgtgaaccactgtgcctggcgtctctttttgttttgttttgttgttgtttttttttctcttttgagacagtgtcatggtctattgcccaggctggagagcagtggcatgatcagggctcactgcagcctcaaactcctgtgctcaagcgagcctcccacttcagcctctcaagtagctgggaccacaggcatgtaccaccacacctggctaatccttataaaacttttgtagagatgaggtcttgctctgttgcccaggctggtctcgaactcccagactcgagagatcttcctgccttggcctcccaaagtactgggactataggcgtgagccaccatgcccagcctctttgtatctcagtttaacactgtttcattcttcttcttgttatagtaatttttttttttttcgagatggggtcttgctcttgtcgcctaggctagagtgcagcggtgcaatctcggctcactgcaacctccacctcccgagttcaagcaattcttgtgcctcagcctcccgagtagctgggattacaggcttgtgccaccacaccaggctaattttttgtatttttagtagagacggggtttcaccatcttggccaggctggtctcaaactcccgacctcaagcaatcagcctgccttggcctctcgaagtgctgggattacaggcatgagccaccgtggccggccttgttacagtaatttacatattgttcccaccttgctagcattgctgaaggcagataccaccttatggcagtaaaggatgcaggttctggggtcagactgcccacgtttgaacctcagctctaccccttactagctgtgaggatttaaaaacgttatttcacgtctctgtgccttggatatcttatctgtaaaatggatgtgttaatagtgtctatttcctggaatgttgtggggattaatgaggaaatctatggtaaaaaaatcacggtgaataatcaatcaataatgactcctatgattcacgctttgttttctaagcacctgccacaggacctggaataatttagataaggactgactgcaagtcagacacctctgcaggaacagcagaagaagatcgatttttggtggctagctccactgaaatggaatcccactgggtcagagcaaaacctggaatccatatttttatttatttttcattatttatttatttatttatttatttattcatttttttgagacggagcctcactctgtcgcccaggctggaaagaagtggagagatttctgctcactgcaacctctgcctcctgggctcaagcaattctcctgcctcagcctcctgagtagctgggactatgggcgtctgccaccacgcctggctaatttttgtattttttagtagagacggggtttcaccatattggacaggctggtctcaaactcctgacctcatgatccgtccgccttggcctcccaaagtgctgggattataggcgtgagccaccacgctcggccaggaatctctgtttttaacaagctcgggagatttttcagcagccagtccagcaccccagagtttggcaggctttgccaagtgcttgatatgaggtggtaaatgtctggcacctttaaaatatagggccctttccgtccatctggccctacaggttgatgttaaaaggatgcaaaaatacggttctaaatgtccttaagaggctaaggttggtctaagcaaagcatggaggaaaaagcccttttgagtttgtgtgtgagtagataggagttgccagttggttgataaagtgataaagtaatccttttgtgttaggagccaggaagcagagagagaggaaacagcccaaagtgatttttggcttgagagcaaacacaatagcagaaagctgagtgacacctggacgatagtgcagagaagctgagtgacacctggacgatagtgcagacaagctgagtgatacgcggacaatagcatggagaaactgagtgacacctggacgatagtgcagagaagctgagtgacacctggacgatagtgcagacaagctgagtgatacgcggacaacagcatggagaaactgagtgacacctggacgatagtgcagagaagctgagtgataacgtggacgatagtgcggagaagctgggtagcagagatggggtttcaccatgttggccaggctggtcttgaactcttgacctcaggtgattcacccacctcggcctcccaaagagttgggattacaggtgtgagccacggcgcccggcttaggtcagaactttctacgcaggtaaaaagtgacagcccccacagtaccaacacagctgggctgagcttccgcctctctagattctgttactttctacctctactttctccctgtctctctaagagatcagccgtcactaatttagtgctttactaatttaggtgtctttgccatgaaagatatgtgttttctttttttaatttgttggaggttctgaaggcactttggcatatgtatctgttttcttcagcagcaaagatcatcgtggagttaagatggcagctttgttgtgattcgtaaatttgctgaatttgtaaataactggggatacctgctggactttgataaatgcaactttttccagtgcttaaaagaattgctgcagaaaatttagagtgattatacctccaaactgctcaatgaaaaaggtcaacaaaacagtataattatctatgtatatgtgtaactcgtatgtgtgtggggtgtccacgtcaccaagtattagaaagttaagagagaaggatgtggacaataaaacaccacccacttcaaagcaggtgcagagagtaaggcattgtatgtctgattttatgaccacgagaggtcagttctgggctaccataaactctatctggaagaaagggattcaggcaccattcaagcaaactttggctgagcatggtggctcactgggaggccgagacaggtgaatcaccttagtccaggagttcgagaccagcctggccaacatggcaaaaccctgtctctattaaaaatacaaaaattagctaggcgtggtggcgcatgcctgtaatcccagctacttgggaggctgaggcaggaaaatggcttgaacccaggaggtggaggttgcggtgagccgagatcacaccactgcactccagcctgaaggacagagtaagacggtctcaaaaaaaaaaagaaagaaacaaacaggttaaaagagaaggatgtgaacaataaaacaccacccacttcaacgcagctgcagagagtaaaacactgtatgtctgattttatgactgtaagttccaggctcccatgaactctatcaattccaagctcccatgaactccatccggaagaaagggattcaggcaccatgaaggcaaactttattggcacctgcattgagccgagcagtgaaccaagggaaagagttcaaaattctgcttcaggagccttcagtgtaactgtggtactaggctagcaaacaggtgttcactacatacatgtatgtacaagagagacccatactaagcacttgccgtctttaactgacttggcaggcacaaagcaggctttttttttttttttttgagacggagtctcacactctcacccaggctggagcgcagtggcatgatctcggctcactgcaagctccacctcccgggttcatgccattctcctgcctcagcctcccgagtagctgggactacaggcgcccgccaccacacccggctaattttttgtatttttagtagagatggggtttcaccgtgttagccaggatggtttcgatctcccgacctcgtgatccgcccgcctcggcctcccaaagtgctgggataagaggcgtgagccactgtgcccggccggcagctccctcttgaacctctcccttacagagtcaacaagggagcagtggtcagcacttctctaccgcgacgttagcagagaactcgaatctcattagtagcaaggacttctctgccacagatgtggctctgagactggttcttcacaggctgacaggggaccgtggcatgcagtgatggtgtgggaatcacccgatcgagacgcagcacatgctgctgctgttcctggagaggagaatgtcaattcctcagctggccaagggcacttcacactggggtgccctgcgttgctgctcctgacacctagttccttcgggtcacaggcagagctgcctcctgtgtgtcagttgcccaggaaggccaggaagaacaagttctagtatccaccatttcctttccacccagggactcatctgggggtcgagcaacttctcttttataaacactcataactcaatgggtctgctacaccctcattcctagacaagagcagggaggccatctctgatatcaatggccccaaagtggttgatctggacaggtgcggtggctccggcctgtaatcccagcactttgggaggccgaagcgggtggatcacctgaggtcgggagtttgagaccatcctggccaacatggtgaaaccccatctctactaaaaatacaaaaattaggctggtgcagtggcaggcgccttgtaatcccagctactcgggaggctgaggcaggagaatcgcttgaacccgggaggcggaggttgcagtgagccgagatcgcacctctgcactccagcctgggcaacagagcgagactctgtctcaaaaacaaaacaacaaacaaacaaaaaacaaagttactgatcttctaagagaggctgtgcaaggaattacaaagtcataaggtctgtgattccaacagtttccttttttcccccacttctctttttttttttttttttgagacggagtttcgctcatgttgcccaggctggagtgtactggcgccatctcggctcactgcaacttccacctcccgagttcaagcaattctcctggctcagcctcctgagtagctgggattacaggcgcctgccaccattcccagctaattttatatttttagcagagatggggtttcgccatgttggccaggctggtctcgaactcctgagctcaggtgatccgcccgcctcagcctcccaaagtgctgggattacaggtgtgagccactgcacacggccaaatatatgcattttaaatacaaatagatattgtaaaattatccttcagaaaagttgatccaatttatattctcaccttacttctttttgagagaatctgttcacatttttttttttgagacacgtctcactgttgcccaggctggagtgccagtggcacaatcacagctcactggcacccttgaactcctgggctcaagcaatccttccaccttagcctgtggagtagtagctgggactataggcacgaaccacaatgcctggcttttttttttgtttgttttgagatggagtctcactctgttgtccaggctggagtgcagtggtgagatctcagctcactgccacctccacctcccgggttcaagcaattctcctgcctcagctcccgagtagctgggattacaggcgcatgccaccacgcccagctaaattttgtattttaagtagagacggggttttaccatgttggccagggtggtctcgaactcctggcctcaggtgatccacccaccttggtctcccaaagtgctgggatgacaagcatgagccaccgcgcccagcctaatttttgtatgtttttgtagagatggagtttcacaaatttcacaaaatatttttggagacatggtgaaacccaatatctggtgagctggtttgcagaccaactcaggctagcctcaaactcctggactcaagcaatccacccaccttggccattcaagatcaacccatctaaccacaagcacagagctttctccaagatgtggcactaaacaagctgcagcccagaaacgaaagctggttatttccacttttcagtttccaaatgcctgtcatcctggctactcaggaggctgagacaggagaaccgcttgagccctggagtccaaggctgcaagtaagctgtcatagtgccactgcactccagcctgggtggcagagcaagaacctgtctctaatattaataataataaattaatgtagtgaatcatgcagattgtctaatattgagctaggcttgtattcctgggataaaccctgtgtgatctaaggggtcaagggatgctcggttgtgcacgcaacaacccagtcacgtggcagttacactataaacgcatcagtgtctaacccatcacagtgatgtgacgtcagtggtcacatgagagctcactgcagcctcaacctctctggctcaagtgatcctcccgagtgtgccaccacacccagctaattttgtttctcttttttttgagacggagtctccttctgtcaccaggctggagggcagtggcgcgatctcagctcactgcaaccgccacctcctgggttcaaataattctcctgcctcagcctcccaagtagctgggactacaggtgcgcgccaccacgcccagctaatttttgtattttttttttcttttttcgagtcggagtcttgctctggcgccaggctggagtgcagtggcgcaatctcagctcactgcaaccgccacctcctggttcaagtgattctcctgccgcagccttctgagtagctgggactacaggcatgcaccaccacatccagctaatttttctatttttagcagagatggggtttcaccatgttggccaggatggtctccgtctcttgatcttgtgatctgcccgcctgggcctcccagagtgctgggattacaggcgtgagccgccgcgcctggccaattttggtattttttgtagagatgaagtcttactatgttgtccaggctggtctcaaactgctgggtcaagcagtcctcctgccttggcctcccaaagttctgggattacagacgtgagccactgcacccagccaatgcattttcaatagaaaagattcaaacgctactgaaatcttggaaatgaagcctgtcatttcctgtcacctctccccccgaccccactcctctctccagaaggagcctacagaacaggctgttacagatgatacattctcaggcctttcacggcatgcttagaagtatttgtatctcatttgtgcactgtttcatttattctcacaaccagagaggtttgtattattagcccccatttgatgtatgagaaaactaaggcttaagaatattgggtaatgtgccaaagggcccagagctcattacagtctcttaataatggggataaaaccgggtatggtggctcaggcctgcaatcccagcactttgggaggctgaggtgggcgggtcacctgaggtcaggagtttgagagctgcctggcttacatggtgaaacctcatgtctactaaaaatacaaaaattagccgggcgtggtggtgcacccgttatcccagctacttgggaggctgaggcaggagaatcactttaacccaggaggcagaggatgcagtgagccgagatcacgcccttgcactccagcctgggtgatagcgcgagactcagtctcaaaaaaaaaaaaaaaaaaaagaaaaagaaaaagaaaagaaaaaaagaggttctgagaaatgtgtagatgatttcactgttgtgcaagcatcatagtatattttacacaaacctaaatacaaaaatcacctggctgtatatttcacacaaacctaaatactaacatacagcccaggtacatagtaggctcaatggtatagcccactatgtgatatagatatgatatatgatatagacagcttactgctcctaggtacgaacctgtatagcaggtcactatactgaatactataggccgttgtaacacaatggaaaatgtttgtgtatctgaacacgtctaagcgtacaaaaggtacaggaaaaaatacaggattataatcttctggaccacctttgtatatatagtcctttcaggtcatatggctcaggactgtagtttgaacccatgtttctcattttttttgtttgtttgttttttgagacagagtctcgctgtgtcgcccatgctggagcgcagtggcgcaatctcggctcactgcaacctctgcctcccgggttcaagcgattctcctgcctcagcctcccgagtagctgggattacaggcgcgcaccaccacgcccggataatgttttgtattttagtagagacggggtttcaccatgccgtccaggctggtctcgaactcccaacctcaggtgatccgcccgcctcgtcctcccaaagtgctgggatgacaggcctgagccaccgcgcccggcccacattaagtctttaaatgccccgctggggactaagatgcccctggtggaatccaggagccctggtggtggcttctgcggggcccaggccgagatgagggagaggccgggaggagtggactgggctggcccgtgggccgggggtcggtggtttctcgtgccctcccctcggctccagggatttcccccgtgaagccggcaccgaggtccggacaggaaagcactttgagccatggatttatgtaaaatccagatgaggagctggagctggtttctcctcccgcgtcaggcggcgccaccggaacgtcctggcgggacacacactcacgccacaccccctggcgggtctctcgccacgcggagagagcgcccgagcccccttcgccccgcgaggttcccagggtgtaggcaggcccggggggcgccatccgccttcctgcgcgagtcacggacacgacccgggccctgaaggcgtctgcatcaccgctcccgccgaaacctcagaaaccgaggccgaacactcgccgggctcctcgcagcggcggcgggcggtgactcaggggttcccgactggattaaccgcgcctggaggactaggcagcccgggcgacttaccgcagcctcatcacgtgaccaggacctgcggcccccgcccccgcagactccgtccccgcgggccccgcccccgcagactccgtccccgcgggccccgcccccgcagactccgtccccgcgggccccgcccccgcagactccgccccccgcgggccccgccccctcaaggccccgcccccacgggggaccgccccgcaggctcctccccgcggaccccgccccccatggactccgcccccacgagccgggccacgccccctgaggactgcgcgggagcctggctggatccgaagccccttccaaggagtctccccaggatcctctgctcacaccggcaagtgaaagaccttttaaaaggaatggggctgggcgcgatggctcacgcctgtcatcccagcactctgggaggccgaggcgggcggatcacctgaggtcgggagttcgagaccagcctggccaacatgatgaaacctcgtcgctactaaaaatacaaaattagccaggcgtggtggtgcatgcctttaatcccacctacttgggaggctgaggcaggagaattgcttgaactcgggaggcggaggttgtagtgaaccgagatcacaccactgtactgtagcctgggggacagagcaagactccatcttaaaaaaaaaaaaaaagtaatggcaaaaacagcaattacttttgcaccaacctaaatagtagggttcgaggagagctgagctgaccactttctcccaagcagtagaagcttccttgttgaaacaagagggccatttgtctccaaggtctctgtttctagccgcagtgtttcctaaccctaaacctaggcctatttcatcaagggtcagcggattaggagtagatggctatggatcaccttccctttcctaacagggtcttcatttcatgcaacatttgctgccagctcatatgtgaagatgtgaaaagggggcagctggggcctttcagaagagggtcaggaatctgagcctctttgtccataggggaaatactctgaatgcaacttcatcatgagtgggcacgtgtgtgtttggggactgttcgctgaagagtataggaaagagacagccgggatcccctttgaatttgcaatttagaatgagtgatctaagatgagtaataagaggttggagattctcttttgaatgtgcgctctggggctctggtatggctgcatctgttataaagaggttcttgggccaggtgcggtgtctcacacctgtaatcccagcactttgggaggccgaagggggtggatcacctgaggtcgggagttggagaccagcctagccaacatggggaaaccccatctatgctaaaaatacaaaaattagctgggcatggtggtgccccaacctgggcaacagagcggctacagagccagactctgtttcgaaaaataaataaataaaaggaggcaaagggattatgtttttctagatggatcttctttctcttaatctagctgctcttgaatagcaaagtatgggaggaacacacttatgaagaatagcgttgctttgactttttaagaaacactagtaagcaggatgggcgcggtggctcacgcctgtaatcccagcactttgggaggccgacgcgggcggatcacgaggtcaggagatcgagagcatcctggctaacacggtgaaaccccatctctactaaacatacaaaaaaattagccgggcgtggtggtgggcgcctgttgtcccagctactcaggaggctgaggcaggagaatggcgtgaacgtgggaggcagaggttgcagtgagccagagatcacgccactgcacaccagcctgggcaacagagcgagactctctcaaaaaaacaaacaaacaagcaaaaatgctagtaagctacctctgcactgtcaatgagacacccccagaaaacaaagcgtgtggttttgctttggtgaccttcacaccacgcacaatatcggggttgccgtcatctcttcggcatcggggggcctgtttcactttttgtcttgtttttaccctccggagagaggtgttgtgtgtgtgtgtacccgtgttatacacgctcacataaaagtcagccagcatgatgataatagctgatactgcgtgagtgctaacgagggaacaggcgctgtgcggggtgtcttcttttcacgatctcgctgggtcttgttaacaatctcagttaaagcacttaccgtcattactgaagagactgaagctcagagaggttcaatacgtcgtgacaccaggccgtgaaccgggtctgttctgtctctagaacccacatcctgacctaaagcattgtgctttgcatccggagcagcagcctcgtggacaccggccccgtgaagctattgctgatgtgaacagtcttgagtgatgcggctgcctgaggggcaccaaagcctccccggctgctcctctgatcattttattcctatcagggtttggggcttgggccctgaatccaaacagaactttccctttacaagtcttcctgtactttcctccccccatcctccttagtttccattgctgaaaggctgatgtcattaacacagcccctcctgaggcaggtgggtgtccctggccaaccccaaggctttctcccagtctctaagctgtagccctgcccagaggaaggaagagccccaggaccttgtcaggagcaattctcagctttttactggggatgttatagatgaggctttatctctggtgtccctggacggtgctgataacccaggtcatgttcctgtctccccgaagtaaccggagacatcttgcaccatgaacaaaccgggatgacgtgcccgggtttccacctggggatccatctttgtgtctgcaccacggaggccccgaataaagtgaggtcatagctcatctaggtgaaacttgttctgcttgatgtaacgggaggaggggagaaaatgaagctggactggccaaagatcaggctgagaaattcctgggcacagtctggagagccactccaattacacctgtccctccattttcatgggggattggccccaggacccctggcagataccagaatcccaggacgcccaagtctcttatataaggtgctgtaatagttacatgtaacctaatcacgtctcccatagactttatttaaaaaaattttttttaatggagacagtgtcttgctatgttgcccaggctggtcttgaactcctggcttcaagcgatcgtccgaaagtgttgggattacaggcgtgagtcaccatgcctgcccccgacccccgtgtactttaacttatctctaggttatttttaatacctaatacattgcaaatgctatgtggttgttatgctgtattatttgtattttttatttttgtggtgtttttttttaattgttttcctcccaaatatttttgatctgtggttggttgaatctgagggtgcccttggatagggatagtgtggcttccagccaggtagagaaggccaactataaaactttgtaaagagctctatggttgcagcacaccaacatggcacatgtatacatatgtaacagacctgcacgttgtgcacatgtaccctaaaatttaaagtataataaaaaaaaaaagaaaaaagagctctattatatgcatacaaaaaaagctggaaaatgctaattggggtggtgtattttatgggtcacattttactcttttattgtctaaaagtttttaaaattctggctttatgacttatatgacagaaaaaaaaaactgaataaacttatagttttaaaaaattggccaggtgctgtggctcacacctgtaatcccaccactttgggcagctgaggtgggtggatcacctgaggtcaggagttcaactgaggtcagcctggccaacatggtgaaaccctgtctctactgaaaatgcaaaaattagccgggcgtggtggcgggcgtctgtaatcctagctacttgggaggctgaggcaggagaattgcttgaacccgggagggggaggctgcggtgagagtccgtctctcccttccacccccaaaaatatcccaccagctacagtgagctgtgattgcaccactgcactccagctggggaacagagcaagatcctgtttcaaaaaaaccagaaaacaaaaaccccaacagcctgtatgttttgtaccttccgtgtggcctcttggtggtctatgacatgggtacagatgagcccctgccagtgtgttaattgcagcgtggcttctgagccagcagcccgggtgatcttcctagccgggccctggctcactgcctctgtttcccccagtcttccctggcacctgcagagccagagagaggttttgttttccagaaccaggcattcgtgaccctgaccactcccgagcaaagttttcacaccttccccggccccctcagaggaatgaaggtctgggaggagatagggcctcgtccttggaaccaggcacctctttttttttttttcgagtcagagtcccgctctgttgcccaggctggagtgcaatggcaccgtctcggctcactgcaacctctgcctcccaggttcaaacgattcttctacctcagcctcccaagtagctgggattggccaggcgcggtagctcacgcctgtaatcccagcactttgggaggctgaggcgggcggatcccaagttcaggagatcataaccatcctggctaacacggtgaaacccacctctattaaaaaaaaaaaaatttgccaggtgtggtggtgggcaactgtagtcccaggtactggagaggctgaggcaggagaatggcgtgaacccgggaggcggagcttgcagtgagccgagatggcatcactacactccagcctgggcaacagagcgagactccatctcaaaaacaaaaacaaaaaaccaagtagctgggatcacaggtgtacaccgccacgcctggttaatattgtatttttagtagagatggggtttcaccatgaggccaggctggtctcgaactcctgatctcaggtgatccacccgcctcagcctcccaaagtgctgggattataggtttgagccactgtgcctggccggaaccaggcagctttgattgcagaatcaggcagaggccaggtgggaagttgccgtctgttggtgtctcaggccaagctctccttgtccagacagaacctcttcctttttggtcctgaaagtcacactaaaaatcagcagcagctcggccttgggcaacgtgccacgtgtaccgacgttggggttagtggtctttgcaggaagtcgaggttgtttgtgggcctggaaggaaatgtggcctgcctgcatgtacagcctcatgtgtggcctctgggagggggagcagacagaacccgcagccccagagactgggaggcttctctgtggcagcttcctcatttctggttagttgtggcagggggcagatacagtctcttttgcaaaagcagctcctttatgtccagaaggcgacagctcagctctcctttagggcccccaaagaactaacccacagcgtggggctgcggccagccgggcgcagcagcagcggcagtgttcctgtctcagctgcctgcagcatggctttgatctgacagtcagcagggtgtatttgcccccaaagccagtggtctgaggagcccagctccagttaggtcttaggtggggacaccatagatactgctctctggggaaaaccaagtcacggtctggtttgggtgagcgctgatcttccctccagtgtgatcccaagctccctgggatgttggctatagggagcaatcaggagccactccccaagactcaggggaccagcctggggtccaggaaagaagacttcccagcaccctccccctctctgctggtggtctggcactcccctcatgtgacaggcatgtggcttttgggaggaaagaatctttcacaatcagacagaaacagcaactgggaaaataactcatgcaggggtttgggcaatgagtgtctagaaggctgtgggccacgagaaggggattagggtgaggtttcatcagagctgtggctaagatccgaggaggctcctagagctcaaggcttcagaatgaccggtcaggagccagagggatggtgtctttctctctccaacctctcagaccaaaaatggggcatggggctgaccctgcccaatttttttcaaacccgcagagacagaggtttgaaatcattcactccagcattaagtggaggtggctccagctcagagcctccagccaaaccctccctgcgccacagcaggagatcacggcctgtttcccagaggctctgaaataggagtgactctccttaaagtgctccttgcaatgctcatccgagcctgggccaggcagggctgggggctgccttgaagaaagagatgcccccgagatccgataccctctggagcgttgcaggatgcgtctgtccaggaggcactgcaggggagccggggttcccggagcatttgggaaggtttctgagcagcacagggtccttccttaggaaggcggatcttggccgggtgcggtggctcacgcctgtcatcccagcactttgggaggccgaggcggatggatcacgaggtcaggagattgagaccatcctggctaacacggtgaaaccccatctctactaaaaatacaaaaaattagccgggcacggtggtgggcgcctgtagtcccagctactcgggaggctgaggcaggagaatggcatgaacccgggaggcggagcttgcggtgagccaggatcgcgccactgcactccagcctgggcgacagagcaagactccgtctcaaaaaaaaaaaaaaaaggaaggttggatctcctgtagcttcctgtggtgccgtcttctcccagggactcgagccttgttcagagcactgacaggatttttcagaaagttctgtgtgtgtggctgctctttggtaagcccagggcaacagagtcatcaacatttagggagggggtgggtgaggcaggatgtagagttaatacccagttttgtcctatgttcctctgagaagttagctaagaaatcttttctaaattaaatttaattaattaatttgttttttgggccagagttttcactcttgtcacccaggctggagtgcagtggtgtgatgtcagctcactgtgacctccacctcctgggttcaagtgattctcctgcctcagcctcccgagtagctgggattacaggcacgtgccaccatgcccagctaatttttgtatttgtagtagaaagagggtttcgccatgttggccaggctggtcttgaactcctgacctcaggtgatccgcctgcctcggcctcccaaagtgccgggattataggcgtgagccaccgcaccttgcctatttttttttttttttttgagacagaatctcgctctgttgctcaggctggagtgcagtgtcgtgatctcggctcactgcaaccttctccttcttggttcaagcgatcctcgtgcctcagccacctgagtacctgggattacaggcacctgctaccatgcctggctaatttttgtatttttagtagagatggggttttgccatgttgcccaggctcgtctcgcactcctgacctcaagtgatccctgacctcaagtgatctctccccacaatcccaacttgccttcccaaagttctgggattacaggcgtgagccaccgcgccggccaataattttttttttttgagacagagtctcgctctgttgcgcaggctggagtgcagtgacacgatctcggctcactgcaacctttgcctcccgggttcacaccattctcctgcctcagcctcctgtgtagctgggactacaggcgcccaccaccacgcccggctaatttgttgtatttttagtagagacggggtttcaccgtgttagccaggatggtctcgatctcctgacctcgtgatccacccgcctcggcctcccacagtgctgggatgacaggcgtgagccactgcccagccaataattttctttaaaatgctccttacgctacttgctgagcctgggtcaggcagggctgggggctgcctttgggagagagatacaccagagactagttaatcactgtagcagtagaaaacacccttaagggccgggcctgatggctcacgcctgtaatcccagcacttggagaggccaaggtgggaggatcctttgaggccaggacttttttttttttttgagacagtctcattctgtcgcccaggctggagtgctgtggcgcgatctccgctcactgcaagctccgccttccgggttcacgccattctcctgcctcagcctcccgagtagctgggactacaggcgcccgccactgcgcccggctaattttttgtatttttagtagagacggggtttcaccgtgttagccaggatggtctcgatctcctgacctcgtgatccgcccgcctcggcctcccaaagtgctgggattacaggcgtgagccaccgcgcctggcctgaggccaggacttcaagagcagcctgggcaacatagtgaggttctgtctgtacaaaattaaaaaaaaaattagggtcgggcgcggtggctcacacctgtaattccagcactttaggaggccgaggtgggtgaatcacctgagtcaggagttcgagaccagtctggccaacatggcgaaaccctgtctctactaaaaatacaaaatttttagggcatggtggcacatgcctgtaatcccagctactaggggggctgaggcaggaggattgcttgaacccgggaggtggaggttgcagtgagctgagaccgcaccactgcactccagcctgggcaacagagcgagactccatcttaaaaaaaaaaaaattagctgggtgtggtggtgcatgcctgtagtcctagctatgcaagaagttgaggcagggggatggcttgagcctgggaggtcgagactgtagtgagctatgattgcaccactacactccagtctgggcgatagagtgagacttgtctctaaaaaataaagaaggctgggcgaagtgtctcacacctgtaatcccagcactttgggaagacgaggcaggcagatcacctgaggtcaggagttgagaccagcatggccaacatggtgaaacccctctctactaaaaatacaaaacaaaacaaaaaaatagctgggcgtggtggcgtgtacctgtaatcttagctacttgggaggctgaggcaagagaattacttgaacccgggaggcggaggttgcagtgagccaagatcgtgccattgcactccagcctgggcgacagagagagactctgtctcaatcaatcaatcaaaatataaataaataaaaaaaaacaaaggaaacacccttgccaccagagatcctccaggtacaaacctcatgttcaaggagaaatcaaaagacccaggagcttgtcagatttcagtagaggagaaagaggatggaaattcatctttgtgtcttccttcctctgccacttcccctggagagtaagctttaagagctgcagtggccaggcgcggggctcacgcctgttatcccagcactttgagaggccaaggtgggcagatcacgaggtcaggagatcaaaaccatcctggctaacacggtgaaaccccgtctctattaaaaatacaaaaaaaaaattagctgggcgtggtggcgggtgcctgtagtcccagttattcaggaggctgaggcaggtgaatcgcttcaacctgggaggcggaggatgcagtgagccgagattgtgccactgcactccacactccagcctgggggacagagggagactctatctcaaacataaaaacacacaaacaaaaagggctgcactgatgtgcttgaattagcgtcagttgccagtactccctggcgtgctggaaaccgagctcttcctgagtgaatgtcgggcggcatctggtcaggatgctttcctgaagcttcaggactggtggccaggtacaattgctctggaccgagccagacccgagtgagaacttggctctgtcactcactagcagtgtgaacttgagcctcttctgtaaagcgggcgtggtgactgtggcttccacatagagaggctgcttgcgaagagtgaaggttacgtgcttaacagggtgcctagaacgtaaatactggcgatgctcgggacacgtcggccgaagggcgttcagcaaactcgccgggagagcgggggagtcctgaatccttgtgggtattgagggggagggggtgtcccagaaaggcttctctataaggtggatctaagaaaagctgctaattctgttgttttcctgaattcatgctgaggccacacgttagattagtagcagtttctatattcgcccccagttcccaaaagaaccttctccacagtcatccattctagctcttcgctccatttccacgtctgcctctgtgcaagtttttgttttgttttgttttttgttttgagatagagtttcgctctttttgctcaggctggagtgcaatggcgcaatctcggctcactacagcctccgcctcctgggttcaagggattctcctgcctcagcctccccagtagctgggattacaggcgcccgccaccacaccccactaattttctatttttagtagagagggggtttcaccatattggtcaggctgctctcaaactcccaacctcaggtgatccacctgcctcagcctcccaaagtgctgggattataggtgccttccaccacgcccagctatttttttgtatttttagtagagacggggtttcaccatgttggccaggctggtcttgaactcgtggcctcgggtgatcctcctgcctcggcctcccaaagtgctggaattacaggtgccttccaccatgcccagctaattttttgtatttttagcagagacgggatttcaccatgttggccaggctggtcttgaactcgtggcctcaggtgatccgcccacctcggcctcccagaatgctgggattacaggtgtgagcccccgtgcccagctcacattctttctagaagcttttagtcatcagctcagtttgaagtggtacctccctcctgccccctccataactcactgtccagaccactgtctgtctttccctctctgtgatttctgggcatgtctgaagtctattatcataagcagcctgggaaaaggaactctggtttatacagtagggctcagggaatattcagtgaaataataagtaacttttctgcagggcgccgtggctcatgcctgtaatcccagcactttgggaggatgaggcaggaggattgcttgagcctacgagttcgagaccagcctgggtaacatagtgagactctggctctacaaaataataataataataacttttctagccctgaaaacccattaaacttcctggaatataggaactgaagggcgggaaacaggaaagtttcccccttcctttatcagctactgcctgggacttacatctcttcgtgtcgaggtgagaacatcaagggacagacagggaaaggcagttcttcagagtcacacagcaagttagtggcagaaccagcagctggattcaggctgtgctcggtcgagcgctctttccctcctgttggagaaaggcagcagagtgttgaggggctcatgtgtggctcctggagcggtcgtgtggcacggtgacaatgaagtgatttaatacatgcagagtcctgacggcagcctgggcgcaggtagcaggtgcaagtgtttgctgcctcgtttctatgttaccctctgttcttcttccacacccctactgctttcaacaggcccctcatttcaggagacagaagaaccctgacactattgaatatgtcagaacaggccaggtgctcacgcctggagtcccagcactttgggaggccaaggcaggtggatcacctgaggtcaggagttcgagaccagcctgaccaacatggagaaaccccgtttctactaaaaatacaaaattgctgggcatggtggcgggcgcctgtagtcccagctactcgggaggctgagacaggagaatcgcttgaacccgggaggtggaggttgcagtgagctgagattgcgccactgcactccagcctgggcaacagagggagactctgtctcaaaaaaaaaaaaaaaaaaaaagaaaagaaaaatgctggaacatccagaacatcgttactaggcgggggtgagaagctggtgagaagctggcaggaagcttggcgggaggctggcgggaagctggcagaccaaccgccgtctgctggggtggctttctggatctttacaaactcgaggcccgagaaccggatcttgatttgacattggttgttttgtttatttctttgttttggtgacgggaacatggaaaggagcctctcccctgggcacaggcccccagcagacctggagtctggtgtcgcactgtatagcgccctcgggccggcgtggtggttaccatggcccagcgcaatctgcagccgcagaagtcgtgcccaagccctgtctgtcaggccctgcagactcgctcaggccagccccttgggagcgtgagggcccagaatccatttctatcatatttctcccatcattgaactgaaagccagattttccatctgtctggttggaggttcatcaaagtcattcctgggagctggtgactcacagcttcgcctgcagcgccgtggggcagaggggttgagcataccgtgagcaaccagcatcttctttctcggaatcccagcagacggcgagagcagacgggacgggcacccacctagaaactgctttcttcccagggaagagctactgtttacctccctccccgaaacataagtttttttgtgtgtgtttttttgagatggagcctcactctcttgcccaggctggagtgcagtggcacgatctcagctcactgcaacctccacttccgccttctgggttcaagcgattctcctgcctcagtctcctgagtaggtgggattacaggcacccaccaccacgcctggctaatttttgtaattttagtagagacggggtttcaccttgttggccaggctggtctcgaactcctgacctcaggtgatccacccgcctcggcctcccaaagtgctgggattacaggcgtgagccaccgtgcctggcctaaaaacaagttttattgcaaatttgggacaggcctcggagaaggactctgagaactgagaccgaagttcccttagtgggctgaaccatttctgggtttctatgccgtttccatgttggagcctgattggatagaaaggagtacagcctccaatactggctgctgaacaagggaaccctgtgcactggggaattttcagttagggttttttgtgagcagttagagaattaattggaacagcaattctcccaccccaaatcccatcctaggggccatttgttctttctttgcatctttccagagagggtggtcattctcgacgcgacgtctcaaccagccaaacagttcttttccagctggtggaggtgggctgggtggaacacctgtactgcctcattccaggctctttgtgaccaggaatatgcttggtcattcattcattcacacttgctcattcattcactgaaactatttgtgcaaggtcctggggttacagtgaataacagatgtggttcctatcctccaagagacctcagtctagcaggagagacaggcattgaacgtttacaagagtcctgagcattcagaagcagggaacgacgcaggccttcctggtctggtgggtcgggaaagctccctggaagacaagatacttaagttaagaccagaagggagagtaggagttacccaggcagagtgggggtagagcgtttttgccagcgatgtcaacctatgcaaaagttccaaggcaggaaaaagtagaagagagcaaggagcagaatgtgccagatgaagctgaaaggggtgcagaggcccggccacaggttccttaggccaccaaaaggatgtgcgggtctctatcccgacagcagtgactcgggagactgaggcgggagaatcacttgaactcggaggcggaggtttcagtgagccgagattgcaccattgcactccagcctgggggacaagaacgagactctgtctaaaaaaaaaaaaaaaaaggaagccatagacaggtcttagtaagagaggaatgacatgctacatgtgttttaggatgtcttagagcaagccttcagttgctgttagacactgggaaactctttcctctaattgatcttcatatctttgatgtcagtctcgtgagcctgggactgctccaaccaacggacccagccaaaacgtggccactgtggccggagtctcacccttcttcactctcctttcgggagaacacgagtcatgtgtgctagtttctcgtgccagctcctggcaccggactgtgtgttcatgagactgagctgaccagctcaggacaaggtgccaagagcttggggaagaggaaattaggagtcacgaggtttcacgatcagaacccgaaagtgctttatggaaaatttgcatgtcctgggtgcagctcagcctaagagaagctggtgcagtgatttcaggggtgtgtgtgcctggcttctgggaggggcagccagaggcaccggcttcccttgtgaaggcagctgggtcagactgccccctccatccacccctacgtttatgaaggcgaaatttagtaggaaggacatccaaagcagtgtgatggggaaagaggaccagctgggggtgagatgggaactcgccatccgccatcctgttttccccaaccaggtagagttctcaacgctcttggcacttacaacagatgttctgtagggcaagtcctgtaggacattttaagatttctggcttctgcctactgaaggctagtagcgacccctagttattgtgacctctttttttttttttttgagacggagtctccctctgtcacccaggctggagtacagtggtgcgatcttggttcactgcaagctccgcctcccaggttcaagcgattctcctgcctcagcctcctgagtagctgggactacaggcgcccgccaccatgcccagatgattttttgtatttttagtagagacggagtttcaccgtgttagccaggatggtctcaaattcctgacctagtgatctgcccgcctcggcctcccaaagtgctgggattacaggcataagccactgcagctggcctattgtgacctctttaaatgctcccacacattgttatttttatttacttatttgtttttttgagacagggtctcgctctgtctcccaggctggggtgttagtggtacgatctcagttcactgcagcctcgatctcaagtgattttccggcttcagcctcttgagtagctgggactacagatgcccgccaccatgtccggctaattttgtgtttttaatagagacagggtttcaccacatgagccaggctggtctggaactcctgacctcaagtgatccgcctgccttggcctcccaaagtgctgggattacaggtgtgagcctctgtgcccggcccaatttgataatattttatttatttatttatttattttgagagggagcctcactctgtcgcacccagattggagtgcggtggcatgatctcggctcactgcaacctccgccacccaggttcaagtgattctcctgcctcagcctcccgagtagctgggattacaggcacccaccaccatgcccggctactttttgtatttttttaaagtagagatggggttacaccatattggccaggctggtctcgaactcctgacctcagctgatccgcccacactggcctcccaaagtgctgggattacaggtgtgagctgccacacccggcccatttgaggatattttagtgaaggttttgtccggcgggatgatcattctccccatgtcactcctgggggcttctgctctctccttcccagacggagctcctcctgactcccccagctgtgttcccaacagcagcctgcagccctgtgtccaagctggagatttttgtccaggcacttgcgggccgcttggctggaagcctctggtggccgaggtgctgctgtgcggccgccagatggcgctggggagcccccactctctgccgcaggacgggcagaggcaggactggactgcagagggaacttgccttgaagaggcctggtccttaaagagacacagcacacacggcccgaccggcagccccagagcagaggctccactgatggcaggcgcccctggctaggctctgaggttcctttgccctcgccttgctgaatggtgagccgctgcctctcggagcccgtctccttgacagcctgccctcggctcctgcagccactcctgggcctgatggggacagggccagcctggtgggtggtgtcagaggtcctggcagagcagcgtaggcctgggatgcgtctgcagaattctggctgaacgagcgaggagcacggccagcttcggggccgtcgtgaccacaggagggcagagggccagcccgtgagctctgaccccagctggacgtgctcttgtttcccttggggctaaggagattggagccactgaactgaatctctgggttttggagacttagagaatccattggactcttctgctggcgtctttctgaatgctgatggggacttggtggtaagtaaatgagtagggggctccaggccctgctgtcgagccctcggacggaccctttgggaaaactctgctgttgacctgtgggtggtgtcatctgagccatgtcaggtgagggccacgtgagctggggcttggcgagagaccctcctaaaacggtggctcggggagtgcataatctaagccagcggctctgcccaggatgctgcccttgctgtggcccctggccatgggaacggggcttcaactcggcccctgggaagtgtgtgggggcgtgtggggagtgtcacagctgcaaggacctgatgtcactgtgctttatcctgcagtgatgcctagggaggcagtgagggggtgaatgcagctccccggggagcaggtccacatcttgccagggcagcaggtcttcccatgactcaagctgacacaaaagtttggtgcagaaatgactaactgggaagggcttccagttcacctctgttgcctgtagatctcactggctgctggaaaagccgggaggctgagcagagggcaggtgagaagagggcaaaagacagactcataggctgagacttcacccttacaggtgacactgtggaggcctggggaattttcttctttccccagactggagggctgaggatgaatcttagaatagtaaatgctggccgcacatggtggctcacgcctgtaatcccagcactttgggaggtggaggcgggcggatcacctgaggttgggagttcgagaccagcctggccaacatggcgaaaccccatttctactaaaaatacaaaaaattggccaggtgtggtggcgggctcctgtaatcctagctactcgggaggctgaggcaggagaatcgcttgaacccaggaggcagaggttgcagtgagccgagatcctgccactgcactccagccaggcaataagagtgaaactccatctcaaaagaaagaaaaaaaagaatagtaaatgctgctttactgtaccaaggaaatgggaatagagcaaagcacggaaaacaggccaccccaggatctgacaggagagtttgtattctgctagtgctcataggaggcctggaggtcgtcttcttgatccacctgggcacataccttcttttttttttttttttttttttttttatttctttctgagacggagtctcactctgtcacccaggctggagtgcagtggcacgatctcggctcactgcaacctccacctcccaggttcaagcgattctcctgcctcagtctcccgagtagctgggattacaggtgcccgccaccacgcccagctaatttttgtatttttagtagagacggggtttcaccatgttggccaggctggtctcgaactcctgacctcaggtgacccgctggcctcggcctcccaaagtgctgggattacaggcgtgagccactgtgcctggccctgggcgcatactgtctacagatgtgaacactgaggctggaaactcttgagattggccggaggcattgaagaagtggggtttggccgggactggcatttgggagattgtcactggactttgttcagcttgtctccagggtcatctggcctgctgtagtagatatggttttcttgggataccagttctctttctactttatcatcagtggccctgggagggttctgaaataacgctgcctgcctccctcgtgtagctccgatttcttcctccctgagtttaacttcattctgtttattcattcattcactaattgccgctcaatgcagagattacacacgggaaccctggattcagacttggttcatttccaagcatcgccatctgctagttagccaatggcttagcctctctgcacctcaatttcttcttctgtgaaatggagataatagtaaattggcttattgtaaggattacgtgaaataacctacgtaaagcagatagagcagtgcctgacacttaagaagcactcagtagaccaggcacggtggctcacatctataatcccagcactttgggagggtgaggcaggaggatcagcttgaacccaggagttcaaggctgcagtgagctgtgagaatgcccactgcactccagactgggtgacagagcaagactctgtctcaaaaaaaaaaaagcactcaataactgttagctgtcattaattttatttgttcaatgtgcattattgaatgccgatctgctgggcgctcggcagaaagctgatctggaggcaccatgtggtcatagctgtgctgggagtctacctgagccttgttcacccactgcgctgagcactgggtctgcccagtgaggaagatgcagtcctggtttttttattttttatttttgagacggagtcttgctctgtccccaggctggagtgcagtggcgtgatctcagctcactgcaagctccacctcccaggttcacaccattctctcgcctcagcctcccgagtagctgggactacaggcgcccgccaccatgcccagctaatgttttgtatatttagtagggacggggtttccccgtgttagccaggatcgtctcgatctcctgacttcgtgatccacccacctcggcctcccagagtactgggattacaggcgtgagcaactgtgcccggctctggcttttttttttttgagagggagtctcactctgttgcccaggctggagtgcagtgacaggatctcggctcactgctgggattacaggcacatgcaccacgcctggctaatttttgtgtttttagtagagacggggtttcaccatgctggccaggatggtctcgaactcccagactcaggctatctgcccatctcggcctcccaaagtgctgggattacaggcatgagccaccgcgcctggccagtcccagcttttaaggacctgatgggccagtgagggtgcaaactctcggttttttggtcatcacagtctatttttggttttggtttttcatttgaatgtagagggccccactccctcccacccactgtgtattcagcctctgcacgcaccggggctccctgcctggcccccgcatgggaacatatttttgtcatcagcggtgacctctgggtgatcaaggaagcagagactcctggggccttcctgtcgtgtgcagtggagctgagctgctaacatgagaagggaggaaatgtggagatacccagttttggttctagggcccgtccccttttttctgtcctggccaagaaccaaggcttctaccttgattggtagaagcaagagttggtcgttggagaggccgtgagtagcacgtgcttgggaattaggagcagggcaaatagccttgaaaatgggatgtaccttcttcccactcagcccctcgtcattaacccagtgctcctggcggtgcacccaaccatgaaatcccctttaagtccagtgatgaggcaggagcaggcaggtcaccctggggttggagagccgcagacagtctgagtgcacaggctggagggagggctgggagggtggagagcactggccccagggactgtctggggaatgcttagaaggggcctggaggaggcagcgtgatagatgggggttcagtgccttggggagcactggctggtccccacccggtccacatttagctgaatcaggaaggtctgtctgccacagctccccgctcctctgacagattggggttgatcgctggggttagagcacttcagggtagcatcacctttggcaaagcccggaggagaaggactctttaactccttccttcccagcgcgtgacgttggatctccccaactcctcagtgccagggatgcggaggtttctgttcccacccaaatcactgtggtgctcaaaggctcacacacttgtctctgtggccaaggttagcatctggccgtggtgttaacatctactggaagccatccaacaaaggcatcaagggaatctcgaagtgactgccctttcctgagacacgttgtctgagacagacgtctggagatggaagagggttgacagggtttcccagagggtggtctctaaccccatggacccgcagagatttctcaggaccttcagcacccggtgatcaccagttagctggccgtggaggcagtatgcgtggtgtttaagagcatgaacaggccgggcgcggtggctcacgcctgtaatcccagcactttgggaggccgaggcgggcggatcacgaggtcaggagatcaagatcatcctggctaacaaggtgaaaccccgtctctactaaaaatacaaaaattagccaggcgtggtggcacgtgcctgtagtcccagctactcgggaggctgaggcaagagaatggcgtgaacccgggaggcggagcttgcagtgagccgagattgtgccactgcactccagcctgggcgacagagcgagactctgtctcaaaaacaaacaaacaaacaaacagaaaaagagcatgaacagagtgccagggttcaagtcccagccctcacttaccctctgagtgggttactcagctgctcagggcctcggttttctgacctggaaaatggagaaaacagagataacagtgacattcacggtgagatcacgctagtgaacgaaacgctaagccgggcacacagtcggtgttctgtgttcgttatcagaagtttcctctgtagagccctcaagatttgtctctccctctaccctctatcgtgttgtggagtggagggtccgagagtgccaggattggacagaatgtagacagaaaaaagcaaactatggcaacgcgaaggaaagcaactgccacattttagcttggaggatgctgaaaatagcttgttcaagcctttgtagataaaaatgtaaaatgtacgcaaatgtatgtgactcacgcagaagcatacatccatagctccctcacagtcagcgccggatgtggccatcaggaaaaccccacagtgtggggagagggcccgagcgttcttgcttgttgttgttttgaggaggggacggtgctgctgcctcctgggctggtggctcctggtggcggcagctcacgcccgtttccacctttcccctgggctgtcttccgagagttccaggtgggaagaagagatgcccttggcccctcatggctcctccggcctcgcggtcctccgagagcctgctcgttcccttcccatgccgaagctctatttctggagcgtctcattggagatgcacgccccctccctgccaagctccaggtgcctgcttggccctcccaatcctgtgtgctagtcagggacggtgggagggtgacagctgcagggaggggcggcaagagacagcgctggtgcctgagccaggaggattggggcggagggagccctggggacgcagggacgggctaataatattgaaaaccacttctgctgcagccacctgtagaggcttccccacccagagcatcatcctgtgcgtctcccaggggctccccagcctgtgatgagtgggtgacccccatctcccctggggcagctgcagaggcctctgcccaagcagcttatggggcttcctctcagcatcctgggggaggagctgcttctccccttaagaactagatgtgtgtgtgtctgtttggagtgatgaggaccgacccccacacccctccagcgttctgcgggtgccgaccacactgcccccggcaaaggccaggctgacttaaccttcctggtaggcctctgtagggctgggctcccagaagttttccccttaagctgcctggggatggggtggggtggagacagctccggtatctgaaatgtcactatctggggtaccgggccccctgggtgggccccactgcttccctttccctgggttcaggaaggggcttcagccccactgccctggacccccctggcctgactcccctcctgtccttccctgctccagggtcgcttggcccaaagaggtctgtggggaagctgccatggctcccacagaatcagcccacaggagacaggcatggggcccccaatctcttcactgcccttgggcgagggggtcttccttagagggaatttcgtctctaaacggtcatttctcaggcctcttgacccgacttcccaccatttctaggtgatgatgcaaacacgatgggctttccaggccgcggctcggggtccccaggaggggtcctggaggggaacgcgtggagcccttggggcttctcctggctccagtttgtcctccgcccaggaggggcacatgtgggactgtcctggccccacagcccccgtgacttcggtcctcccgggtctccacccgcccccctccatgtgtggcgggaacggccgcgctcagaggtcaggggtgtggaaagggacgagcgggggaaggttcgggaggagagaggcgcgtcccgcggcgcgcaggacgttcaccccgtgggtcccgcagcgggtctggctggggaggggcccggccgccgctcccgcccgcgaagccgcgcttggagatcccgggcgggaggtgatgtcacccctgtgggctcccgggccccccacggcacctggtttgcggatcgccaggatcctgctgagcccggcgcgggggggacgagggggacctgggtctgcgccgccgcctggagaccccccgagacccccgcggcccctcctcgcccagcgccggagccccgctgcccccttagcccggccgggggcgtcctgcggagggcggagcctcgagccgattggtccctccccgccccgcccccgcaccaaagccccgcccccgcaccaaagccccgccccaccacgaagccccacccccgccccgccccccgcgaagttgctcatcggttccgggatccgcagctgggctcggcgcggccgctggggccgggagggttcgggagggttttgggggctcccgccccgccctcgcccctgccccggccgccccgcgctcctcccggggacctggttcccggcctcctcgcccctccgcgctcgcaacttcggcctcccccggctcccgcccgctctccctcctttgttgcgcgatgagggtcgggtttcggatctgaccgagccgccgccgcgggatggagccgctcagccaccggggcctgccgcgcctgtcctggatcgacaccctctacagcagtacgtgtgccgggcgggggcgggaccccaggatcgggatcgggaccccaggatggagatcgggaccccaggatcgggatcgggaccccaagatcgggatcgggacccaggcaccgggctggtccggggagcgcgggcgggggcgagatcggggtccggatcggggtcgggttgggaatcgggatcggggtcgggacccaggagccgggctggtctggggggcgcgggcggggggtccccagagaggattcctgcggtccgggggcggggaccgtgggcggaccgagccgagagctgcgtcccccctcccacctgttgtgaacccggcctccgcgagcctcaggggagggaggcccttctgggtgctgcccccgcccctggaccggcagcttctctgtccaggctgaagccgaaaggccgttttgggagcagtcgttggcacccgagtttgccaccccaggggcaccgggtcatgtgtggttcagggcccaggggttcggtgctggggtgggatcgggtgggaggggagacggggggtgcagatatccgcgggggccgtttggatgcgggagctgaaaatcccgggctcagcaatctttcctgccagcctcatcaccacccccaccctcatcatcaccaccaccctcagaagaaaaaaaaaacaaaccttctcgagttctccaccccctcgctcccaaatctctctggatcatgtgattgctcttgcatggccccgggggatgcgtaactgatcacgggtaatggtgtgggggggcttggggcgaaccgagagccgccccccgcccccaccaccgcaccttgctcctgctccgttgctagaaaggcaccgccccttctccccacccttccctgagacacctttcccgaaagctctcagggattaggaagagggtcctcctgggcttacatagtggatttcgcccttcctggcccacgtgagtgggaccctcccactctctcagcacatctcccaggcaggagttgggggaggcacgtggggccacgtggagcctggttcagcctgattctaggcactggatgccatggaacaggagcgttttctttctttttttttttttttgagacggagtctcggctctgtcgcccaggctggagtgcagtggcgcaatctccgctcattgcaacctctgcctcccgggttcaagtgattctcccgcctcagcctcctgagtagctgggattacaggtacccaccaccactctcggctaattttttgtatttttagtagagatggggtttcaccatgaggccaggctggtctcaaactcctgacctcaggtgatccacctgcctcagcctcccaaagtgctgggattacaggcgtgagccaacaagggcatttgtaagggtcatcccagctagagttccttgataagtcatatggggggggtggggggagtagagaagggtgatgccttgagccccaaagccttactctggaggctgtgtggtacccaacattcaacctctgacctcagcatccccttgggtccaggtcattccctgtatcttcttctccacccgcctcctcctccatccatgttccttcctctcctccccccaggagctgtccttgtgatggttcattctgctttggtttctcaacatcaaaggggcaaagccggatcccctgggcataggtcctgtgccaggtgccgccgctccatctgctccttcccctgcagaggccagcgtcgttgggtgaaggtcagggcccatggctgtgtggcatgtgcgtgcacgtgcgtctgcatgaatgggggcacacatctgttcggagcgcagatgcagatcagctcctgacccggaggcaggattagtggccctctcttagctgtgtgcttgcaaacagccgtcataacaatgcctcagattcacgcgtgcttatgttcctgagtgtttctggctctttgcaaaacccagttcttgtttccctatttcccgaagcctggaatcgtatggaaccctgtctctagctttctctgcagcagaagactcctctgagctgatcatttccaagtcttccataccccaccctcttcctcccacgcctggagcaaaaaagcaaaattgcctgaggccaccttgaaaattcctgaccagaggaatgccagaaaagggaattaggccaaggcctcttagggggttctgttgggcagccctgattcaggcagattggcacctgagctgtctaccctcctgctgctgccctggcctctgggcggctcctggggtggcctggatggtgggtgggagggggcactgatgtggccgcagtgtgaggagtccctgcctccctcttcggaacagcttagtggagagctgtagcaggaggcttcccggggaggtgctgtgcagtcatgtttgggctgttagccatcaactttcctcttgacaagagcctaaattaaaacaaatacccgagctgtcatttgcctggcagcaaggttttgtggctcccagaggaagttcctctgcttctcaggaagctgtttgcttacaaggctcacagtcctggggtgacaaatctccacaaatgccagatccatcgggaactgtaaagggggtatacccagggcacagggtggcagtgtgacttagagatgggaatgactcggtgttagaggttccctgccttcctctctctgagcattgttcctggtaacaatgataatagcgtctcctgagcacctactgtatggcaggcactgggatagtcactttctctttctttcttttttcttttttttttttgttttttgttttttgttttgttttgagacggggtctccgtctttgcccaggctggagtgcagtggtgcgatcttggctcactgcaacctccacctcctggattcaagcagttcccctgcctcagcctcctgagtagctgggattatgggcgcctgccaccacaacccagctaagttttgtatttttagtagagatggggtttcaccatattggtcaggctggtctcgaactcctgacctcaggtgatcttcccaccttggcctcccaaagtgctgggattactggcgtgagccactgcgcccggcctgtgctaggcactttctatccattctctccaaatctcacaactctgcaactcttacagagtaggaaagtgaggctcagttagcataaatcatagacctaagatcacataagtaacaaatggctgagctggaattcaggttgtaccctagaataatgaggaggatcccgagtaccacctgggtatgtctgagtttattcaaggtcttgggatgtcacggaatgggggacgccattctctatggtcctctgttgcagagttctccctgaaacggtccagcagggtaaatggcttcaatggctctgaccccaacctggccctgtgcctcttgcaggacctgggggctgggcctggagcccaggcagggacagctgaggctgtctgaacccactgaggctggtggctctctgctcctaaggtgccagcctgccagccagcccctcccctcacacacttcttttttttttttgacacggagtctcgctctttcacccaggctggagctggagtgcagtggcactatctcagctcgctgcaagctccacctcccaggttcacgccattctcctgcctcagcctcccgagtagctgggactgcaggcgcccgccaccacgcccggctaattttttgtgtttttagtagagacggggtttcaccgtgttggccaggatggtctcgatctcctgacctcgtgatccacccgcctcggcctcccaaagtgctgggattacaggcgtgagccaccgcgcccggccctgaacacacttcctgcctttggggttggcagttcattctttctggttttgacaggaggagtgtgcccacttccatcacaggtttggtggtcatttgatgagggttgggcagcaaaccctccatctctcctatggtagaagtcctgaagggctgcggtaagtgtgatttgtctgcctcaaggagaagagttggatcccagctgccaggggccctggggctgatgggagcagagtcctttccctgtggagtgacagatggtttcagacatcccccagttcttgtgtctgcgccactcatttgcctgtattaatgtagcaatgtcagtttcacccctcagtaccttacctttctctccctggggttgctatgatgctctctctgaggctctcttttttttgagacagagtctcgctctctcgcccaggctggagtgcggcggtgcgatctcggctcactgcaacctccgcctccccggttcaagcgattctcctgcctcagcctcctgagtagctgggattacaggtgcccgccaccacacccggctaatttttatatttttagtagagacggggtttcaccatgttggccaggctggcctccaactcctgacctcaggtgatccacccgcctcggcttcccaaagtgctgggatgacaggcgtgagcccctgcgcccggccatgttttcttggtcataatgcctctaggtctttaatcaccctttctgctaaacacgtatcatcttctctttgttatttttttattttatttttttatttttattttcccaatcccatgggattagattggattaaatgggagcggagtagcccaaaatgggggtggaggtgtgctctgacactttcttggtccctgggattctccaagcagatctggatcaagacatacgtgtgccccaggcaggttgatcatctggcacctcttcaactggaaaatctttatatgtgtgtttaggacttacttagaggagaggcagaggctgtatttaaagcctctccctttgccacttcggcctccatttggtcccaagtaatttagtcctggtgtcaaacataccttccctgctgagccaagcaagagcctgcagtggcttggccgtcatggaaggcagaacgtgaccatctgttgttactagagcctgctttttggagctcacttctcttaccccaagcaacatttccaagggcgatttcattctcttgtgatattttcatgccctttatagattcagtgccccatctatgggccaggaaagtatttggagcagtggagatgtaagcctgtctccaggtgagcatgagcctacctcagtttctcatctgagccccacattctctacaccagggaccaagccactggtctgacagcctgtgtgcgtttgatcagagcagttcagttctcggggccgcatcagacccctccgtgtgtgctagtgagcgcctgctggcagatgcttgcttgttttcggaatagcccagtaatttattcctttttgtcaacaccggcccataatcttcatggctgctggagtctcagaggtggggctggcagaagaattaagtcatctactcagagaaacttaggtttctgtggttgtgattgttggctactgttgttcttcgggaaaaggaaggaaatttgtggggaattggctggaagatgctgttaggaggatggaagatggggaatggcggggaggctctgcctcactcttgcgagtaggatggaagacttgttctctgtctgaggtatgatctgctttctgggacaattccggtaccttccttcgtagagggagggcatgatggctctcgtgggtgttgtgtggattaattcatatttataaagtgctttgaaggtgaggagagctattgagcagctcagctgtccagctcattgcgctcctcatccgggaaagcctcgagggactgggagaggccggcacaggacttaggaaggggcagggaatgtggcaggaggaccggcaggaacagggtatcagaccagctctgaggcagcgcctcccacagcggctcccgcacaggccctccataggtgttggttgtctgagtacgggtgggaaaaagaaaactcgagttcttggctccttgagctcctccccgcagcagaaacccctgttagctgaaacctgtcagctggcccgtccatgcgtttccggctgtgtggatttggtcattgtactcgctcgtagtggagtcagagacccccaaagggagtctcgcgcttttgccagggtttatgattggaggacttcactgccagcgttggcggcagctgtttggctgagcttgagccctttgggcgcaaacctagggcaggcggcttcaagacaaccctgcgcccactgcccctgccaggcccttggtggtggcgggtgttggtgatgtgtggggggtgggctgaggtgatgtgttgagtggactgaggtgatgtgttgggtgggctgaggtgatggggggggtggactgaggtgatgtgttgggtgggctgaggtgatgtgttgggtgggctgaggtgatgtgttgggtgggctgaggtgatgtgttgagtggactgaggtgatgtgttgcgttgactgaggtgatgtgttgggtggactgaggtgatgtgtggggggtggactgaggtgatgtgtggggggtggactgaggtgatgtgttgggtgggctgagatgatggggggggtggactgaggtgatgtgttgggtggactgaggtgatgtgttgggtgggctgaggtgatgtgttgggtggactgaggtgatgtgttgggtggactgaggtgatgtgttgggtgggctgaggtgatggggggggtggattacctgctctgttctatattcttggcacttttctccaagtgactgtttgtaccagggggagagttctgcagctcacccatctctggggctgtgataggggaggctgtttgtgacatgtgaccttggcttgtccccacatgtgagaaagtccattgctgctgtggggagtagcttgcttttcttttcttttttttttgagatggagtcttgctctgtcacccaggctggagtgcagtggggcaatctcggctccactgcaacctccacctcctgggttcaagcgattctcctgcctcagcctcctgagtagctgggattacaggcatgtgccaccacacccagctaatttttgtatttttagtagagacggggtttcaccatgttggccaggatggtctcgatctcgtgacctcgtgatccacccatctcggcctcccaaagtgctgggatgacaggtgtgagccaccgtgcccggcccaggagtagcttgcatttcttagggcaagatatggtcagttggggacatgacgctgctgggagcagcgggaatgttccactggtccctgaagcttgaggagaacctgacccagagaccttgtgaagggggaaggagaaagaaatcaggccaataggcaggctacggaaggcacccccgtatggaggctgaagataatgcccaatcccacccctgcctgggcatttggcaaagagccctttgaggcgggaccatctgaggccgtggccacttgtggatggagcagcgggttctctgtccccgggtcgagacctgactggggcctctcgcccagttttttgtccaggctttatcctgtgtcctcctcctgcccttccttcctccccacacacactagaccgaaagatgaatctgggtttactggctgtatggaaaatgtcagagtcagcctgggcttcagtagatagagccagatgtggtcggctctgtggtgacctgattgattaatcgggtgccactcccctctttcttcatttttttgagacagattttcactctcgttgcccaggctggagtgcagtggtgcgatctcggctcactgcaacctccgcctcccgggttcaagcagttctcctgcctcagcctcccgagtagctgggattacaggtgctgccaccacgcccggctaattttgtatttttagtagagaagggatttctccatgttgatcaggctggtctcgaactcctgacctcaggtgatccgcccacctcggcctcccaaagtgctgggattacaggcgtgagccaccgtgcctggcctcactcacctccttcttgtccctgccctcacctctgatgccttggtgtgcctctaggtcacaggtggacatggcacacgtgattgggcatcttgcctaaggctagcagggtctccaggaagtcttgggtggctgggaggcctcaggtaaaccagagccaaggaagctcagagtccttgtcactccgggcagcttggctgctggactccccggggcatcggtggagctggtgctgcctagagaagcctggtattgagcagggatctgtgggcttactcggggctgttggggaaggatgtggccatcattaccttcgtgggattgaagggctgcttctgtgagtgttctgggctaaccccttcctcctgggcagcggctcctggtcagcagcaaaggtttaatggatcgagattacggggaccaaagacgccgtgtaattaagccagttatttctctggctgggaacatctactcctcacagccgcaattgacttcgtcacttgtggttaccccgttcgcgttacctcgggcctaaacagcccatacgtcatctttttgagggagtctctcccttggaggcaaagttttaggagaaagatccctctgggagttgtagagtcggcgtggcagtgtgtgctattgaaggtgaagttttaggagagagacccctctgggagttgtggggtcagcgtggcagtgtgtgctatgcaagagtgccccctgcagttgttctgtgcaatggcgcccacgggagcctctttgggaactgtgtctgggttctgtagagggacatagatagaaacctcatccttgggtctcccaggatcctggggtcccgtgaaaagaaagtccatcagtcctgatggattcatagaaactagtttttaatttggtttagaaagaatggaagagacaggccaggcacggtggctcacgcctgtaatcccagcactttgggaggccgaggtgggtggatcacctgaggtcaggagttggagaccagcctgaccaacatgatgaaaccccgtttctactaaaatacaaaaattagccaggcatggtggcaggcacctagaatcccagctactcgggaggctgaggtaggagaattgcttgaatccgggaggcggaggttgtagtgacctgagatcacgctgttgcactccagcctgggcgacagaatgagactccatctcaaaataaataaataaatacataaacaaactaaattaattaattcaaggtcgcagactacaagccagggactgtgcgctcggttggccctgctgtaaactgtgttctttctcccgcactcttacccttcacagcggtgctggtgggggctccttgacgctggtatttcactgaggttgatggatctgggttcatttctctagctagaaagacagttgtgaagactgcgtcttgcccccaagcccccgtgatatgaggagacagccctctgccccaggcatcctggaagcactgggagcatccaccaactgggctgcctcttcctaggggcatgagcctaaggaggtctcctcatgggcacttggagcccacgtgcctgcattgctgtgttcctggaattattggcaagaagtgctgattgttaacatacacaaacacaccccccccccacacacacacacacaaacacaaacacaaacacacccccccatacaaacacaaacacagagaaagggagagtgagaatagactttggcggttgggatggagcagggccagtgcccagtttctagagcgaggccaggggcgaggacgcggggatttggcagagcccaagcgtgctggccctgctctccagccttttaaaatccacctccacatttcaaaaggaaaataaagagagccctcagccataaatcaggccactgagcatcgaggtcctttgccgaggcccagggcctgctgggctgcagagccagctgctgtgtttgaactctcccgcgcgcagcatgttaatgacggggcagaccctccagacccaggctcacacccacgacggccctcgagcccagagagtcccccacggagaggtcagcccctggggaaggcctgtgtctggggggcttacaccttagcggagccccctttggctgggacttcaaatcaagccagacccttctgtagctctggattctggccagatgaaaggtaacccctgacacagatcttttgagcccatttcccaataggaataaaagtaacaaagcaattgattggacacctcacgggtgcaagagtagagcgagcgttctcacattcgtgatctcatttcatcttcacagtaaacctatgaaaggttgttaccctgattttaaggataagaagggggattggccattgttcttggcctctgctggtgacttctgccatggggggcaccctgagggggacgcaccaggtcttctctgccctcctctgctcaccctcttcctgcgtggcggaagctcaggcatcatctggctttgtgagtgcctctgtctagacaaaacccacgtcctccctccctcctctttcccctgcagggccagctttggtgttaatggagcagaaagccttggtagttactttgcgagtgcgtcacggggagggtcatgagagaccagctggcgtccacccagccgcgtggaacagccaccttgacttggtcgaggccagcaagcgtcttgcagaccccgtggcagctcctgacccacgttcccccttgggaggcctggatgagctggggcaccaagtgccatctttgggtgtagaatcttcagaaaccaaaggcaggagctgattcggtctcctgctccctgggaagaaaggatggaacgcacattggctgtcaggagagctgctgcttctagccggaggaccttgctgcagctggtcagctgccagcacagccaggcccttgttgtgggtgcctgccgtgtctgtcctcaagcccctccctgagtgaaggacactgttccctttccaactgcctgtggctgtgctagaccattttctctcctttgcccagaaaccttcagtgggttcagtggggcattgcctttcccaccacattcagtccagactgggggaacctcttgttatccattccagtttcccagcacactgcccattctctagccagtaaggcctctcaccatcctgcaaagctctgtgctccaaggatctaaccagcttcaagcctcagctcagctaccaccatctccaggaagtcctccaggcctgattcgagcactggccttagtgagatccctggctcagagtccctaatgctgattgctccggctcacatcgcttagcactttcttatctttttttttgagacagagtctcgctcttgtcgcccaggctggagtgcaatggtgcaatctccacaacctctgcagtgctcactgcaacttccacctcccgggttccagtgattctcctgcctcagcctcccgagtagctgggattacaggtgtgcgccaccatgcccggctaattttgtatttttagtagagacgggatttctctatattggtcaggctggtctcgaactcccgacctcaggttatctgcccacctcggcctcccaaagtgctgggattacaggcgtgcgccaccacgcccggctaatttttgtatttttagtagagacggggtttcaccatgttggccaggctgctttgaactcctgacctcaagtgatctgtccgcctcggcctcccaaagtgctgggattacaggcgtgagcgacccgcccggccgatatcgtgttgttttatagtgtttacctgcacagtgtttcatgccagttgtcatttcttctctgccagactctcaactccttagaggcacgagggagaataacaaaggcttccgtgataggatgccagacattgtcctctctgctttgctaacagtatctcatttagcctccggcaacctgctgagttcttagccatttttatcctgtttcatgcttccccaagacttcccagaggtcacacaacacatctgtcttgacgcctcagcctgtgttctttgccagaagcgcccaatgccagggcctggggcatgagacctcaggttggggcccaggcctctgcatgtctgaaaagctcctcggcttactccctccgctcgggggaccagcctttcaccatggtggttctcccttccccgcaacacccagctaggcaccgagcaggtggaaccctgggaaatgctgctttgtgattggttggagtcaggggtggctatgaagatgctgctttgtgattggttggagttgggggtggctatgaagagacgaagtgctctagggctctgggtgtctggatccagcactggggatgccccggagagtcctggagcagggaggatccaagcaggaggtggagctgggtgttaggagggcagaagggccatcagaaggggatactggagacatccaactggtggcctctctctccgcccagccagagctcaaggctttgcctcaccccgagaagataaatcactggggtatcacggggtcccccagcccccgtgccatgatggacatgcacattttgatttggcaggtccggagctcagattctgcatttcctttgtttgcttgtttgttgtttttgagacagagtctggctctgtcacccaggctggagtgcagtggcgcgatctcagctctcactgcagcctctgcctcccagttcaagcgattctcctgcctcagcctcccaagtagctgggactacaggcgcgtgccaccatgcccagctaatgtttctgtatttttagtagagacagggttacaccatgttggccaggctggtctcaaactcctgacctcaggtgatccgcccgcctcggcctcccaaagtgctgggattacaggcgtgagcccctgcgcccggcctggattctgcatttctagcaagtcccaggtgaggcccgcgctgcccacactggatgggaaggaccaggcgcctgcagcatctgccctccaagccttcgtagctccctccttcctgcaggataaactctaaactccttagcacaacgtgggagccttctcagagactgggtccaacccatctccagccgcagcctcccctcctggccccactgccacacccccgggcctccggccacactgagcctctcccggtttcccaggatacaacactcgcccattcatagtgtggtgccttttgcacgtgctgttcctctgcttggggatgctgttggtctttctcagccaggtgaagaggacgctgaatgtcacctgcttgagtatcaggaccggggactgggcactggacctagactcttggccctggagagaagccctgcatggggccgcagcctgcccccgtccctgctcacagaaaagctcagccttgcagccgcgtggagtcagacgacttgcctgtcctgctttgaacgtgtggtgttcctaccacctttgagtaaaaatagagctgagaatgaccgaagtgaaactccaccttgggctctgggagagcagaggtgggaccacgctggggagggtgggtgcggacactccgggggcgggggctgaggccatctgcgtgggctctgggagagcggaggtggggaccgcgctggggagggtgggtgcggacactccggggggtgggagctgaggtcatctgcgtgggctctggggagggggccctgtgagccgggccaagctgccaggcactgggggtctacgccctggactcagagagaccatggcaccctcaaggctgctctcacttgaaaattttcgttttggggctggacatggtggcccacgcctgtaatcccagtactttgggaggctgaggcaggaggatcacctgaggtcatgagttcgagaccagcttgcctaacatggtgaaaccccgtctctactaaaatatacaaaaattagctgggcgtggtggtggatgcctgtaatcccagctactcgggaggctgaggcaggagaatcacttgaacccgggaggcggaggttgcagtgagctgagatcacaccattgcactccagcctgggcaacaagagcacaacttcgtctcagaaaaaagaaaaaaagaaagttttcactctgggctgtggaactatttcaggacttcctgaggggtttcctctggagcttcctgagtttcctcctggacattttgtctccaggtcccagcgccaggcaggggtggctcccggaagggctgtgggtgccaccctggctgactgcagccctctcttgcacctcctcccggccatccacccgcaggaggtcttcccccagcactggcttgtgaggagctccctctgcccgggagaaaatggctcctccgggtcacaggctcccctccagggactgaggggcatttttggattgtgggaaggcgctccagggcccggttctgtggccccaggcctgttgctcggctgggtggaggcacctctgcaggccgggagcttggtctttgaacacctgcttagcctatgacctccagcaagttatttatgctctagtgagctgtgtttttctcacctttagaatgggaacaatcttaccaaccacactgaaagcactgctgagtttttcagcaaataaaaataaggatgccccgttaaattagaattttagatgaacaatgaataatttttaaatataagtatatcccatatggctgggcatattgggaggccaggaggatcacttgaggccaggagctcgagaccagcctgggcaacatagagagaacttgtctgtaataaaaatacaaaaaattagctgggagtggtggcagacacctgtagtcccagctcctacggaggctgaggtgggaggatggcttgagctggggaagtcgaggcttcagtgagctgagatcatgcctctgcactccagcctgggcaacagagtgagaccctgtctcaaaaaaagaaaagtaagtatatcccatacaaaacttaggacatagtagactgaaagctagtctgttgctcacccgacgttcatgttcactgggcgtcttgcattttatctgtagaccgaaagcttgtctgttgctcacctgacgttcatgttcactgggagtcttgcagtttatctggggtccctgagtctggattcagtgctgtgtgtgacactttgccagggtcccacctagatgctccgacatccatgttcactgggcgtcttgcagtttatctggggtccctgcgtctggattcagtgctgtgtgtgacactttgccagggtcccacctagatgctccgacatccatgttcactgggcgtcttgcagtttatctggggtccctgcgtctggattcagtgctgtgtgtgacactttgccagggtccgtcctacctagatcctccgacatccatgttcactgggcgtcttgcagtttatctggggcccctgcgtctggattcagtgctgtgtgtgacactttgccagggtcccacctggatgctccgacatccatgttcactgggcgtcttgcagtttatctggggtccctgcgtctggattcagtgctgtgtgtgacactttgccagggtcccacctagatgctccgacatccatgttcactgggcgtcttgcagtttatctggggcccctgcgtctggattcagtgctgtgtgtgacacttcgccagggtcccacctagatgctccgacatccatgttcactgggcgtcttgcagtttatctggggtccctgcgtctggattcagtgctgtgtgtgacactttgccagggtcccacctagatgctccgacatccatgttcactgggcgtcttgcagtttatctggggcccctgcgtctggattcagtgctgtgtgtgacactttgccagggtcccacctagatgctccgacatccatgttcactgggcgtcttgcagtttatctggggtccctgcgtctggattcagtgctgtgtgtgacactttgccagggtcccacctggatgctccgacatccatgttcactgggcgtcttgcagtttatctggggtccctgcgtctggattcagtgctgtgtgtgacactttgccagggtcccacctggatgctccgacatccatgttcactgggcgtcttgcagtttatctggggcccctgcgtctggattcagtgctgtgtgtgacacttcgccagggtcccacctggatgcgtcttgctcatcttgtgacttgcttctctcttttgtgccaccccctggctcctagaggccaagctgaagaaaagtttctatggaattgtcacagaaacattgagattttgcttttacagggtcgatacagagtcgacacaaaaaatcacgatgcgattgatgcagagtggccagtgataatagctaacgttagcctagcgcttgctgtgtgtcctacactgttgcaggcactttgtctgtattaactcccttattcttcacaaagtctatgaagaagatacttatcatctccagtttacaggagagaacagagaggcacaaattaatggagcaaaagattaatgttcatgttcttttttttgagattgagtctcgctctgtcgcccaggctggagtgcaatggcaggatctcggctcactgcaacctccaccttctgggttcaagggattcttttgcctcagcctcctgagtagctgggactacaggcacccagcaccaagcccagctaatttttgtatttttattagagacggggtttcaccatgttggccaggctggcctcaaactcctgacctcgtgatccacctgcctcagcctcccaaagtgctgggatgacaggtgtgagccactgtgcttggcctagcctttcaaagtgctgggatgacaggtgtgagccggggtgcttggcctagcctttcaaagtgctgggatgacaggtgtgagccactgtgcttggcctagcctttcaaagtgctgggatgagaggtgtgagccacatccattagggcccgtcaggaagcagatgccacactcaggctgaggagtgcggggagagctatgacggaaatgtgggcagggtgagggcagggtctgtgtcctagacctggaggcagaggccatgtggtgagggcttctgggcaggagcgtgcacagcccgggtggcccacagtggggagctgggggtaccacatcccagcctcatgcccttgtcttcctctcatctcctgctggggtggaagagaggatggagaagcagggagaggggatccggaggggcccacgccaggaaaccaggctgtgtctaggtgcagctgttcttgccgagtctctcctgtctgcaaagtgagggtgataaacgcctgtcccacgtatgtcctggggctgttgtaaaaatcagctgagaagctggatgctggcgacgtgtgttcacggcgctgttctctgccagagtaagggataattgttgctgttgataaacactcactgggtcctcaccacgaactgagtcttttcacatcctcagttctgctgggagtctctaacctctggaggatgtgtcggcaaaggaaagagaaattgcaacattgcagagcctggattcgaacccagcgtccccatgtaaagtccgtgcagcactgggagagtcacttaatgagcctccgcagtgaaatgcatctcccgggctggtttggggctcccaggggaatgggtgctatgattaccattagctagtggtgtagcgggtgggagaggacctaacaggtgccttcggcccggctgtaaaaggagtgacttctggccgggcgctgtggctcacacctgtcatcccagcactgtgggaggtcgaggcgggtggatcacctgaggtcaggagtttgagaccagcctggccaacatggtgaaaccctgtctctactaaaaatacaaaaattagctgggtgtggtggtacacgcctgtaatcctagctactagagaagttgaggcaggagaattgtttgaaccctggaggcggagattgcaatgagccaagatcatgccagtgcactccagcctgggctacagagtgagacctcatctcaaaaaaaaaaaaaaaaatagtgactttgaccgggcacggtggctcacacctgttatcctagcactttgggaggcagagatgggaggattgctcgagactaagagttcaagaccagtccgggcaacatatcaagaccctgtctctacaaaaaaaattttaaaaaattagccaggtgtggtggaatgcccctagagtctaagctacttgggaggctgaggtgggaggatcatgtgagcccaggagtttgagcttacagtgagctgtgatcacattctgcactctggcctgggcaaaggaatgagaccttgtcttaaaaaaaaaaaagactggacttgtgggtgacggggatttccaacaaaaccttcccaggataggtgctgggaaggagatgagactcagaaaaaaaaaaaagactggacttgtgggtgacggggatttccgacaaaaccttcccaggataggtgctgggaaggagatgagactcagacaccccagccttgtatccctgagaagggatggtgtccttggaacgggaatccacatagatatttagcaggcagggcggtccagcgacacctgcccgcttccctcagaaggcaccgtctgcagcactcgtacaggtggcggggccagagagcaaggctcgatggagtgacgttgcctccaccgcacgggcgtcccaccttgggagatttccgtatcgctgaagttccctttgtggagcgtggcctctgtgaaaagtgttaataattcacggtagaataggttctcagatgcgccacgtctgtcctcccccacttcttcaacagagaatggcaacacctccattaacctgaatgtgagctcctcgggggtggccctggctgagtcatctgcgccgcctccctccccagagcctcgtacgcgctcggcgtctggctgtcgtgtgaactcagctccacagggcagacatttggtctgtttgctgctccgtcgtacccctggcacctggaacagtgcctgaaccatgagaagtgtttggtgagtgaatgaatgaatgaaaaatgaatgaacggacattcactgggattcagttctccttagagtcagagagacgtaggtgtcaatgctggttgcatgaagctgttacatctttgagcctgtttcctcatctgaatttggggtgtaattcctactgactgtacagttgcagagctgacatttcatgaactttgcttaaataatgtgtgagtgcctggcccataagaggctgtgttagtccttttgtgtgtgtgtgtgtgtgtgtgtgtggtttttttttgttattgttttttgtttttgagacagagtcttgctctgtcgcctaggctggagtgcagtggtgtaatctcagctcactgcagcctccacctcctgggttcaagcaattcttgaaccttgtaccagagaggagaggtacagcggccctagaccccagggctctgctcctattggtgtaagtgtttcctcctgcgccctacctccctgtctccaggcagggcctgctgtgggtccctctcctctcagccccaagggacctgttccctccagaaggcacctccccaagcggcggcagcgtcacgtgtgaggcctgcagttcagggccagcatccctcatccctcgccgagatcaggccctggaggggctcccacaggtctgactcaaaggcacaggtccctgggcctccctcctcagcatcgtggacccacgaccaaggacgtggaagggattctgaagattaatggtcgtaagtgtcactggcttttactgagtgcttcctgtgtgtgagtactgcgttcctacttctcctgtgtgtgagtaccgcatacttcccttgtgcgtgagtaccgcattcctgcttctcctgtgtgtgagtaccgcattcttacttctcctgtgtgtgagtaccgcatacttcccttgtgcgtgagtaccgcattcttacttctcatgtgtgtgagtaccgcattcttacttctcccgtgtgtgagtaccgcattcctacttctcccgtgtgtgagtaccgcattcctacttctcctgtgtgtgagtaccgcatacttcccttgtgcgtgagtactgcattcttacttcccttgtgtgtgagtaccgcattcttacctctcccgtgtgtgagtaccgcattcctacttctcccgtgtgtgagtaccgcattcttacttctcctgtgtgtgagtaccgcatacttcccttgtgcgtgagtactgcattcttacttcccttgtgtgtgagtaccgcattcttacctctcccgtgtgtgagtaccgcattcctacttctcccgtgtgtgagtaccgcattcttacttctcctgtatgtgagtaccgcattcttctcttgtgtatgagtactgcattcctacttctcttggactcctgagagttccatgactaagacagtagtttaatatagttggtttcctttgtcatcctgcatagtttagttttacgcatttcaaaacattcttcagagaaaggtcccttggcttcaccaggctgctgtgggtccaaggcacgaaagcatgaagagtctctgctcatcgccagaggactgtgagtcccaaacaggctccctgtagtctgaacaggcttcagccttctctgggtaatcctaggctgtggttacaacggtggctttggctgcactgggaggcaggagatctgggtttttattctacctccgccactcccatgccagccctctgtgtcctcagctgtgaaatgtaagggttggactagccctacgcacttttgattccttttttttttttaagacagagtcttgctctgtcacccaggctggagtgcagtggcacggtcttggctcattgcaacttccaactcccaggttcaagcaattctcctacctcagcctcccgagtagctgggactacaggtgcccaccatcacgcctggctaatttttgtatttttagtacagacaaggtttcatcatgttggccaagctggtcttgaactcctgacctcaggcgatctgcctgtctcggcctcccaaagtgctgggattacaggtgtgagccaccgcacccagccattttctgtgttatatgtgaaatgtagcaatatgcaaaacagcacatacaatgtctgggtttggtttactaaagactaacgagacggctgggcgcggtggttcacgcctgtaatcccagcagtctgggaggccgaggcggctggattgcctgagtccaggagtttgagaccagcctgggcaacatggcgaaactccatctctactttaaaaaaaataaataaatacaaatttaaaaaaagaataaaaagaagaagaattacattgtaagcatgttcctgtgagctgcccttttctggttaaatttatgtttttaggttcatcttcgctcctgcctgtagctctaaactgtgcaccgtcaaagctgcctggaattccattgcaggaataaatggcggcttactcaggggtggtcacgctccttccacctgttggaagagaatccatagtggaaaatcatttcatgctgcaacgcgacacacatacgtacatctgcacacacacatatacccatgcacgcttgaaatgagcctcataaagtaatacctgcccttattaggcgagataatccttttcaatccattctagaaggtgacctaccaaactgcacgatcccttcctaggctgacctgcagcatgaatgatacggggctgagtgcaccccatcgtgggtctgcctgggtgcgcctgaggttctgtgcctggcaggcaggctcaggtcatggtcctgctgatcccaccaggctgtccgcacgcattggcgtgagagcggtgtgcctgccggttcctttccttcatctgccgggattgttggcttccccctgttccgctgggcgtgttccagcagcggctcttcccttgtagttgctgcttctcatggcctgtggcctgagggaccagccccctaggcatgttagaactgtgtgcactgaggtcgggcgcggtggctcacgcctgtaatcccagcactttgggaggccgaggcaggcagatcacatgaggtcaggagttcgagaccagcctggccaacatggtgagaccctgtctctattaaaaatataaaaattagccgggcgtggtggcgcacacctgtaatcccagctatttgggaggctgaggcaggagaattacttgaacccgggaggtggaggttgcagtgagctaaggttgcacctttgcactccagcctgggcgacagagtgagacttcatctcaaaaaaaaaaaaaaaaaaagtaatgtgcgctgtagcacgactgacttagtagcaagagagggtagtgtctgagaccagactgcccgggttccaagctttgccactcagcagctgtgtgaccttgggccagtcatctgacctatctgagcttcggtttcctcatccgtaaaattgagataatattagtgcctgcctcctggcgcggtgtgaggctgcggtgagttaacttatcgtatgtgtgtgtggactgttgttattactgagcctgcctgtgcgtcagagcctgacattgatctaattctttgctggtatccctggacacagtggctgtgttgaaatgagctcaaaaccctcggctaaaaggaggttggaggtggacggaagagccacttctcaggctgcctgtattcagatcccagcctcaccattaagtaactacgtgactatgagcaagttagtccatctccctgtgcctcagtttactcctctatgaaatggggatagtagtggaactcactattcaccaagtaattgttaagaggattacataagataatgcacataaagctttttttttttctttttgagacagagtctctctctgtcacccaggctggagtgcagtggcacgatctccactcactgcaacctccgcctcccgggttcaggtgattctcctgcctcaacctcccaagtagctgggattgtaggtgtgcgccaccacgtctggctaatttttgtatttttagtagagacgagttttcaccacgttggccaggctggtcttgaactcctggcgtcaggtgatccttccacctcggcctcccgaagtgctggcattgcaggcgtgagccaccacagcatttagctctgccgtctacccggctacccagccaggaactcaggagaggccttttttttttcttcacatgaaaagaggtttattttctcactggacactgtcgcccatgtgaagggagcagccacctggccccaggttccctctcaacaaaggctcagtcctcagaatggctcctcatgagccccctgcagccggaggcctaggctcttccccacagcatgtgccccttagatacccgtctgccctctggtgtaggctggtgggcatgggtgtctgaatttgggtccccacagcacccccattgaggatcacagtgttggagttgaacctggggccacctgggtaccaggacactgtgctccacggtgagcacctctcctgtccctcgatggccagcaggatctggtcacccacctacctgccaccctatccttttttttttttttttttttgagacggaatttcgctcttttgcccaggctggagtgcaatggcgcaatctcggctcactgcaacctccgcctcctggattttcctgcctcagcctcccgagtagctgggattacaggcacctgccaccatgcctggctaatttttgtagttttagtagagacagggttttactatgttggttaggctggtctcaaactcctgaccttgtgatctgcccgcctcggcctcccaaagtgctgggattgcaggtgtgagccactgcggccggcctagatgtctttttatcgttgagttgtaagatttttaaaatatagtctagatatgttttcttcccctctgcacattgtcttttcactttcttgatggggtcctttgaagcaaagaagtgttcattgatgacgtgcggttcccccgtgctctctgttgcttgtgcttctggtgtcgtatgtaagaatcctttgccaagtccaagaccatgaagatctacccccaggttttcttctacatgttgtttagctttagctgttacatttaggtctttgatccatttagagttattttttgaatatggtagaaagtaaaagttcaacttttacatgtggcaatctggttgtcccagcaccatttggtgaaaagattcttctttccccatgaagggtcttggtgcccttgttgacaatccgtcgaccatagatatgtgggttcctttctggactcactcaacgtgactccgtggatctgtgtgtctggaaagatgcccccagcctgacagtttaccttctttgcccatctgctccagtcatcctggaggctcccatagtacacattgctgggacatcccagagctgaacaccatctctcaagtggcctcagagctaatcacttcccacaggcatcgaggcgaccacagagagggcccagtgtgactggctggcccccagggcgcccgggaagggatctgcagatccctcctcctggcacagcgtcctggcaggaggcacggtcccagagcaggccctgtttgtgctgaggccccgccaggattgggtggatgccttggtgagggccaggtaggagggaacaaatgcagggtgggaagtggctgctggaatggggaagggagcggggcctgcaggagggaagcattcttggcactagtggcatcgtcaccaggacaccggccttgggagggcgagcactacatccatgggtaggcgccggagccctgaggacacggcattgccaagctcttgtcctgtggcttccttccctgtgtccgcagtgtgtggggggtgggcgggcaggcaggacgaggtgacccccatcctttctgtgtgctcgttccatgaaattgggggatgtggatgcttgaacgggctctcagctagtgtgccttccgtgcagaggaggtaacactccccagggcagccagacacccttgtggagtgggatggaaagctgggaggaaggggctggccggcaccatggagatattttggtttgcaggaggattctgggctttatgagcactttaatgcaaccagggcaggcagcaccacgggacgggaactgtaagctgcacctgttgaattctgaaggtccgggctgcccgtgggccccgggaagtgggggtgcccagcttgtggggtgcaggcggggaggggaccgtgtggtggtggagacgccatggtacagcctgtctcccgatcccccaggtcccctgaggccttagagatgaatctcccagaagtggcagccgcggcagggacaccaggatcatgaaggacctgggaggtgaacccgctgctcagttcctggccctcgtcccttagacccagtcctcggagcagaactgggggaagctgagatttctgtgggctgcgtgcccacctcctccctcttcgttggtcctcccacgcgcccgcccccgagtgggagcagagccatgtgagctgagttggagctgctcgctgccgagaattgcatcagccccgcctggcaggctggagcgggagcctgttgctatggtgaccaccaggcttcaaaccagtgagaaggatgagatggttgccgggcgaggttttctcaccatgtgatgcgtgtgacaggctgacaggttcggtagacctggacccagccctcccgtaggtgtgcctggacccccagccctcccgcaggtgtgcctggacccccagccctcccgcaggtgtgcctggacccccagccctcccgtaggtgtgcctggacccccagccctcccgcaggtgtgcctggacccccagccctcccgcaggtgtgcctgggtccccagccctcccgtaggtgtgcctggacccccagccctcccgcaggtgtgcctgggtccccagccctcccgcaggtgtgcctggacccccagccctcccgcaggtgtgcctgggtccccagccctccccgcaggtgtgcctggacccccagccctcccgtaggtgtgcctggacccccagccctcccgcaggtgtgcctggacccccagccctcccgcaggtgtgcctggacccccagccctcccgcaggtgtgcctggatccccagccctcccgcaggtgtgccatctgctggggggcatgatgggcactgtcccaaaagccatctgggcattggccaggctggggggtatgactgagggacacagggggccacgccaggcccatgtagtgtcagggggccttccttggtccttctgcctagttgtgggggaaggggtatggtggggatttgaccaagtgcacctgatgatggggcaagaaaggggtccagactggtccccatctcccagaacagagggcggctctggatcacagctgattaaacctgcccaggctgtgtcaaaaattttttttttaacggagtttcactcttgttgctcaggctggagtgcaatggtgcaatctcggctcattggttcaggcgattctcctgcctcagcccaagtagctgggactacaggcgtgcaccaccatgcctggctaattttgtattgtcagtagagacaggtttcactgtgttggccaggctggtctcaaactcctgacctcatgtgatccacccaccttggcctcccaaagtgctgggattacaggcatgacccaccgcgcccggcctgtgtcagaattttttttgttaaccacgtgacaaagctcatcatcttgctaaagataacagagcgcttggccaagccagtgcaatgcctgggttcagatctcctctctcatcttttgcctacaacgggaaaggaggtaaaaagtctgtgttccaggtgtgctgagcacttgttgtgtgccgggagttgtagtagacactgtcctgtctttttttttttttgagacagagtttcactcttgttctccaggctggagtgcagtggcgcgatctcggctcactgtaacttccacctcctggactcaagtgattcttctgcttcagcctcccgagtagctgagattacaggcacgcaccaccacgcccggctaattttttgtatttttagtagagatggggtttccccatgttgaccaggctggtctcaaactcctgacctcaggtgatccacccacctcagcctcccaaagtgctgggattacaggcatcagccaccagcccagcctgtcctgtctttttttttttttttttgagacagagtctcgctctgtagcccaggctggagcgcagtggcgcgatctcggctcactgcaagctctaggttcacgccattctcctgcctcagcctcccgagtagatgggactacaggcacctgccaccacacctagctaacttttttgtatttttagtagagacggggtttccccgtgttaaccaggatggtctcgatttcctgacctcgtgatccacctgctttggcctcccaaagtgctgggactacaggtgctcaccaccacgcctggctaacttttttgtatttttagtagaggcggggtttccccgtgttagccaggatggtctcgatctcctgacctcgtgatccacctgcttcggcctctcaaagtgctgggactacaggcgctcatcaccacgcccggctaacttttttgtatttttagtagagacggagtttcctcgtgttagccgggatggatgtcctgtctttctattgtatcctctccctcacttggggaggaggcagtgatgttcctgttttgcagaagagccggatcgggcagccagagagttgaagtgacctgcccaaaaagggttcaacctaaatccttgggcttcctgtccagggctctgtaggatgtcagccatccccagaatcaggcattctcaggatgtcctgtgaagaaacacacttctccatcccctgctggaaaaaccatgacaatctctccgcagggaagaacgcggctttgaggtggggagtggctgaccgaggccctttgtggtttctaaatggcagaatgagagaggtgggggcgttgagggtgtcacgcccaggaagcagttggggagggcagggctggacactgaccaagcctagcctgggtgcaggaactgagcttgggatttttgcttggggccctctagggattaggatgaattgtcagatgagttctcagcagacagggctttagggaactggtccagggaaataagacgtagagccagaggggaaccagggcctctgtgagagcctggcagtcatgagatctgacttgctgagcttctgaggtgtggtaataggaactaatcctctcttcggtgtgctttagatgtttactcgtttcatcctcacagaaaccctgtgaacttgggtgctactgttactccatgttgaaggtaaaacagaggcacagagaggttatgtgacttgcccaaggtcacacagctggtaaggggtggagcctgtgattcagacccagtcagtctggctgcagagcatgagctctgaatcaaatgttctcctgcctccattcttaccttttagaaagatgacagcaagttgcatacgtgacctcctcacccccaggagtgtgtgtgtgcacatgtgtatatatatgcacacatacgcgcaccagtagctcagcaagggagggaggctcaggaatgggctcgtgggcctctgtgtgttgatggctgggtttgcagaacctagggagtccggcgtctgtgtgcgtgatgctcctcccttcgtccctccctgctcgcgtggttcccagtgggtggggtgccctgttgcctctggtttagagccgtgcaggatgttaccacagaccgtgtaccaggagtgttcacccaaacttgtgaagggccctggactcccaggaaggagctcagatctaggactgggagtggacggcggccgccggaggagtgagagggggcagtgcgcttgccatgcccggggcccgtcctcctgggcctctctcggcgcttgggcaacctgtgtattgcccacacgtgtgccgctgcttgcagctcctggccaccaccctcctctttgtgtctggacgaatctgactgctctgagcacctcttcagagtggaatcatacaggacagtgtctaccgcaactcccagcacacagcaagtgctcagcacacccggaacacagacttcttacctcctttcccattgtgggcaaaagatgagagaggagatctgagtgcagacatcgcgctggcttggccaagtgctctgttatctttagcaagatgaagagctttgtcaggtgggtaacaaaaaaaattctgacacaggccgggcgcggtggctcacgtctgtaatctcagcgctttgagaagtgtgtcagcccttgagaagacaccgggcaagctggccttcctctcggtgtctctcccaggccgggactatggggagaaatcataacaacagggacaacagcagtgacaacgtcagtgacgacaataacagccactaacgttataccacgtgccaggccctgttcttagaacttcgcctggactaactcattcaactgtcacaaaagctgcatgggatgatgttgttatgttattatcttcatttgacaaatgaggacactaaagcacagagagatgaagcaacttgccccaggacacacagctaaaactgggagtggaattcggagagcctggctcctggcatttggagctgacaggtgcccggcaacccctacctatggccgagctgagctcgtcttgtgccagggagttggcggcaaaacagaaatgagctctgggccgggcacagtgcctcacgcctgtaaccccagcactttgagaggctaaggtgggtagatcacctgaggtcaggagttcgagaccagctggccaacatggtgaaaccccatctctactaaaaatacaaaaattagctgggtgtggtggtgcatgcctgtaatcccacctactcgggaggctgagacaggagaatctcttgaacccgggaggtggaagttgctgagatcacaccaccgcactccagcctgggtgacagagtgagattctgtctcaaaaaaaaaaaaaaaaactaaaaccagaaatgaattctggaggtgggatcttcctttgtaattcagaaggtgactcccaacccctcttcagaagctgggtgggctccaggcctggttcagccccctggcctcctgtcgatacccatgggggggtctctgtccctggtattactcctttcctgtctactttttttttaaatttagattttattctatttttttaaattatggcaaaataggccgggcgctaggtagctcacgcctgtaatcccagcactttgggaggccgaggtgggtggaccacgaggtcaggagatcgagaccatcccggctaacacggtgaaaccccgtctctactaaaaatacaaaaaaatttagccaggcatggtggcaggcacctgtcgtcccagctacttgggaggctgaggcaggagaatggcgtgaacccaggaggcggagcttgcagtgagccgagatggcgccactgcactccagcctgggtgacagagtgagactctgtctcaaaaaaaacaaaaacaaaaacaaaaaacaaaagaaaatcatggcaaaatacacatgcctaaaattttccatccagtgtacgcatcagtggcccgaggcacgttcacactctggtgcggccatcagcaccgtcatctccggaactctcacctggctaaactgagactccgcatctgtgaaaccagcgcaccagggaccggcttcgtggaagacactttttccacggaccggggaagggtggggagcgctttcgggatggaactgcgatccctcgcacgcgcagatcacgacagggctcacgctcctacgagaacctaatgccgctgctgctcggatgggaagtggggttcagggggtgacgcttgctcacccaccactcacctccggctgtgcatcctggttcccaacaggccacggactggtgccggtccatgcccgggggggctggggacccctgtattgaacaacagctccccgtttctccagcccccagctcctggccaccaccctcctactttctgacttgatgaatctaactgctctaagcacctcatccgagtggaatcatgtggtatttgcctttctgtgaccagcttctttcacgtagcctaatgcccccaaggttcatcgatgtcagaattggcctgtgtcggaatataagccgaataatatccgttttatgtaaaggccgcgttttgtgtatccattcatccacccatagacacttgaggtgtttctgttttttggcaagtgtcaataatgctcttaggaatgcgggtatttccccgacaacctttgggcttacttcactcatcagcagcaagcaggccatccttgaagcttaccgtggggtgggcccattgaccagcctggggagagtgggtgggtcattgaccagcctggggccatcatgctggctgggaaggcgtggccctcaggtgccagcttctacccaacactaagccgttggtgctcctggcacttacttacttgctggaagacattccaccttgctttcccgtctttccccagaagagggtgctgggtttctgcttctctcctgaatgggaaaagggcggctgcagcttgccatgaggctggcgtgggtggggttaggagaaaggactgtcaggtgctgtgttgggaagtgtgtgtggagcttccgtgaggctggggttggccttctgagcatacatggaagggctgagtgggagcagggtgttagggtagccggtcatgccgtagaaccaaattaatgctgaaggccgggcgtggtagctcacactaatcccggcactttgggaggctgaggcgggtgggtcacctgaggtcaggagtttgagaccagcctggccaacattgggaaatcccatctctactaaaaatataaaaattagctgagtgtggtagtgggtgactgtaatcccagctactcaggaggctgaggcaggagactcacttgaactcaggaggcagaggttgcagtgagccaagattgtgccactgcactccaggctgggcgacagagtgagactctgtgtcaaaaaaaaaaaaaacaaccaaaaccccccacaaattactgctgaaatcctcatcacttaacacaagcaagctgctgcttgctcacagtggtcctggtagacggggggctctgctccccgtggtcatgccgggacccagcctgatggagactgcaccatttggaatatgtggcctccaagggtcacagagggaggagaaagggagaaagagctgtgtgtaatttttcactgttcagccgtgaaatgatacttgtcatgtccacttacagtttgttagccaggactgagcacctggccctgcccagggactgccaagtggccagacagtacggccttccatgtgcccagaaagacaggaggatggggatattgctgggcactggtcgtgttgaccacatagtggcaggtggcttatgtgaaggatgaaggcccttgagcctgctctgtggccagggcagtggtgtcatggtggcagtggtggcagtggcggcagtggtgtcatgtagcaatggtggcagtggtggcagtggtggcctggtggcagtggtgtcgtgtggcagtggtggcctggtggcagtggtggcatggtggcagtggtggcctggtggcagtggtgtcatgtggcagtggtggcagtggtgtcgtgtggcaatggtggcagtagtggcagtggtggcatggtggcagtggtgtcgtgtggcagtggtggcctggtggcagtggtggcatgtggcagtggtggcatgtggcagtggtggcagtggtgtcatgtggcagtggtggcatggtggcaggtgtctgggcactgaagggacttgggtgtaactgacttctaggggaagtggcagaatcatggtcatcttcatgtgccccgcactgtgctgagctgtttacagacgtcatctcatggaatccccacaacaatcctatcattccgtttcacctttggggaagccagagctcaggaccacagcctccaagtgatggctgtgcttgctggtaggagggtgcttatggcagcagagaggccgggggctgaatggagtgtgggggccagaggtggtggggccacaaggatgtgatgtgtgtgtgtgtgtgtgtgtgtgtgtgtgtgtgtgtctccatgtgcctgcgtggatagaaacaagcagagacaagctggctgggcttttgcccttccccagctccgcgcacacctagctttgcaccactctggaggaatggtgacgtcgaatgtccaaggaagaggctaacctgggcacgtcctcttacctgccctccttgaatgacacaagacattggaagtggaagtcacagtcaccggtgctctggagctgggagtggggagaaggaggtgacttttgaggcactctgtgacagcccagttcaacagtagaattatgtttaaggcccaggaaggctctgggtggagagccagcattttgagccgaaggccagtgaacgtggccacccagcagcactgggcagaggtgcggctgcttctgcaggtgtatgtgtgaaggggtgcaagtggacgccttgggcgacttctgcggacaggggcaggagcccggagctgcgtggctctgggattgaagggcaccctggggtggaaggcaggggtcgtgcatcctggtcctggctgctgccaccctgcagggctgctttgagagtcttgctggcctctctggacctggcattacttgtctgttctctgaattgcctcttcctacttctcagcactagattgtcatttaatttttcataaataccctaaggacttacaaagccatagatgggaggggggctccgaggaggccatcccaggcaggtggtgagcaccgttggattgaaaggtcctcccaggtcatcgcctcctggccacccgccttctgcagctctggggctgagtggcatttcccacagggaaagacaggaggaagagcagagccttaaatcaaatcagcccaggattattacttgttatcaattcttgaggaggttcggaggggaagcaggaagtaggctgaagctgttaactctaataagggttagaactcctatgggatttgtcagaaggacttcctggcccccagaccctaaataattgaattggttgttatgggaagagatgaggaggattattaggagatcgtatcactcagccagcagttactgagcattggctctgcgtgagtcctgtcctgggcgccacaaataacaggcagtgagcagaagagggccaccacctcgcggggaagacagaatataccgataacccaaacgaactcagacttgctttctttgtagaggatttattttctttctttttttcctttatttttatttatttattttttttgagacagagtctcactctgtcacccaggctggagtgccgtggcaccatctggcctactgcaacctccacctcctgggttcaagtgattctcctgccacagcctcccgagtagctggaattacaggggcccgccacacacccagctaatttttgtatttttagcagagatagggtttcaccatgttggtctcaaactcctgacctcaggtgatctgcccgccccggcctcccaaagtgctgggattacaggcagaagccactgcacccagccctaatttttgtatttttagtagagacggggcttcaccatgttgaccaggctggtctcgaactcctgacctcaggtgatccacccacctcagcctcccaaagtgctgggattgcaggcgtgagccactgagcctggcccctgcccctttttttttttttgcctgattgactgaacgcgttattgtttgtgaaatgctctttttatctggtatctcttgtcactccacaggggcagccctgtgaactgcgcagggcagctgtgtcttgcccattttacagataaggaagtggcggcacctagagattaggtctggacgcgggacccagatctgcctcctggccccatgcccacctcgttgaatcccgttgcctttccatgggcgactcgtaacggagctgggggtgctggagtctgtgcccgcccctgcatctggtgtgtgatagcttaggagatgtttgttgagtggctgttgcttgcgtacacatgccgtcagctttcgtcgtatcatggcaaggttatacggcccgtctgcaatatgattcctctatgttcggtgggcacataactgtctttcctacagagagatgaggaattttagttccctctgccaaggtggggggattttgtcaaatcgcaggaaacaatggccttggtgcaaagagtagctttaatctgtggctcagctgtttctcagccaggtggccttggatgagactcagaagcctcagttttcccccgtgtcaaagggggccattcatagctactttgacaacctccctgggctgtggggatgaaatgagatcctggccgtgggctcaccgtgtaaaacactgcgcagataatactcagcatgtcccatccatccccaagagctggagactggtgaagccacatgcgcttctctgcccagggctgctggccaccctgacaccctgggcctcagcctctgcccttgatgtccaagaactatgattcctttgtctcaggctgtggagccctgagcttctccaggcggccacttctccaggcggctacggtctctgcctccctcttccaaggatcttggaggtggatgattggatttcatctccatggcaaccagagaggccataacacccgcccatggtggggcctcgagtctgttcccagcagtggaggcagagccggagcaaacaactcctgcaacagcagctgtcccccaggaatgagctgtcccccaggagcgagctgtcccccaggagcgagctgccccccaggagcgagctgccccccaggaatgagctgccccccaggagcgagctgtcccccaggaatgagctgtcccccaggagcgagctgccccccaggagcgagctgtcccccaggaatgagctgtcccccaggagcgagctgccccccaggagtgagctgtcccccaggaatgagctgtcccccaggagcgagctgccccccaggagcgagctgtcccccaggagcgagctgtcccccaggaatgagctgtcccccaggagcgagctgccccccaggagcgagctgtcccccaggaatgagctgtcccccaggagcgagctgccccccaggagcgagctgtcccccaggaatgagctgtcccccaggagcgagctgccccccaggagcgagctgtcccccaggaatgagctgtcccccaggagcgagctgccccccaggagcgagctgccccccaggaatgagctgtcccccaggagcgagctgtccccaggaatgagctgtcccccaggagcgagctgtcccccaggagtgagcttcctcccaggagtgagctgccccacagcctctgcccggcctccagttgccgctttgctgggctaatgaggggctccaggcctcggggtgagggtggcgctgtctgtgctcccagtggctgctacaggccaggccgagggtcctgagtgaatgagacaggggccgacccccacccacccctgcctgtctgtggttcacaatcagagcaaagccctttccgtccgtcttgtcttctcttccccagcgaatcccacagtccccaagactgaggacaagccctgcctcttccgggcagccttccctgtgctggctgaattgatcacgcgcctggctgatggcttcataggctgcttcagagtattttttttttttttttgagatggagtttcgctcttatcgcccaggctggagtgcaatggtgtgatctcagctcactgcaacatccgcctcccgggttcaagcgattctcctgcctcagccccccgagtagctgggattacagacatctgtcaccatacccggctaatttttatatttttagtagagacggggtttctctatgttggccaggctggtctcgaactctcgacttcaggtgatccgcctgcctcggcctcccaaagtgctgggatgacaggcgtgagccactgtgcccagcaagagtcttagttccatttggttgtaaagacgctcacttcagtgtccctgtctgaacctggcggctcttggccttcctatacattagagtcacctggggagcttttaacaggcctgatgcccaggccattccataccaattcagtagcaatccctggggtaggagccagagagcttcccaactccccagggattccagtgtgcagtgaagattggaacagttatcttaggattcaagtcatgaactggccgggcgcagtggctcacacctgtaatcccagcactttgggaggccgaggcaggtggatcacctgaggtcaggagtttgagaccatcctggctaacatggtgaaaccctacctctactaaaaatacaaaattatccgggcgtggtggcgggcacctgtaatcccagctactcaggagactgaggcaggagaattgcttgaaccggggaggtggaggttgcagtgagccaagattgtgccattgtactctagcgtgggagacagagcaagactctgtctccaaaaaaaaaaagaatttaagtcgtaactagtccaccagcctgtgctgaatggaggctgactgatgaacagcagagttagctgacaaagcttgctgtagtcttaactcactgcaaattgccaaagccctggtttgttttttaagggctgggaggtccctaagggttcttggtactcaggaaggagagcaggggaataatgataatagctgccgttttgttagcgccagctttgggtgccttgcatagcatatatttcctcattgtaacctcgcaaaagcttcatgaggtatagatcttgtttttatcctcattttagagatgagaaaactgaggctctgaatggctaagtagcttgcccaaggtcacatggctaaggtcacattcccgaagtgctaatctcaggaatggaacccgagtgtgattccaaagcctctgcccttgaccactgagctgtcctggctccccaacctctgctccatcaatcaaagaatggggggccctgagaaggaggtggcttgtcccgtgggaaagatgctggtttccaggattcctccccttggagccaggccctgactgaggggctcccgatggtattaaatatctcctggatcagctggggtcacctggaccctgaaggtgtctactttcccgttgcctacgacacccactcggcttcagctgagctttcccaaggacccttctgccctgatactgtgcccagttctttaacctacatcatgttatttaatgtcattttcacaaccaccctgtgacatggtatcgttatcctcatcttgtttctttgagacagtctcactctgtcacccaggctggagtgctgtggtgcgatctcagctcactgcaacctctgcctcccagtgcaatagaagactggccgggcgcggtggctcacacttgtcatctcagcactttgggaagccgaggtgggcggatcacttgaggtcaggagttcgagaccagcctggccaacatggtgaaaccccatctctactaaaaatacaaaaattagccgggcatggtggcgggtgcctgtgatcccagctacttgggaggctgagacaggagaattgcttgaacctgggaggcggaggttgcagtgagctgagatcccaccactgcactccagcctgggtgacagattgagacttcgtctccaaaaataaataaatcaataaaataaagtgcagtagaagacagtgtccttattgttgtaggtgaggtggtagattttgtatctgagccaccatccctgctgaaattgccccggacaggctgatctggtacaggtggcacctgggaagtggcagcctcgcttccgctggccagttccctggttcagggttgccggcctcccagatccacacctgtggtccagactctgctgtctggctgcccgttggatcttctgacagggatggccatgagtcttctcagtccagacatgtctccacctggacttagggtctgttcccccggaaccagctcccccttcctgtccatcgctcagccctccaagcccagaggaccctgctgtggccgcattttcagtcaactctcccatcgccagactttgcccttggttcccaccatggtcacctttgacaaagcacggaggggcggtttgccccgttccacatcatctcatgcaccacagtcagcttcgttttcctgaagtcacctctgaaatcaccttgccattttggcatccgtggctcccagcgtgcgtgaaatctgactattcaggatagtgttccaggccctctgcagtctgacccctccagagctcggcttcagtggtaccagtctgttcatcagggccaacctcctgcgtcctgcccccattctgcacgctgataccctgccgcaaatggaccttttccttcctcacgctctgtgactggttgtttcttccatatgaacccctcagggcagcccacacacttcgtgtttggtatttgtatgagtcctacatatgataacattttaagagcaaaggttgtggagttggatgacctgtgtccatctggtttcccacctgactgccgtgaaatcttgggcgagtaacttaactccctgcgctttcatttcctccattgtaaatgagtcataatggtacggaggcagaaatttaaaaacaaatatgtatgtatttactccaagaaaagtaacaggcaaggcaagggttaaaaagaaaaaaaaaacaggccgggcacggtggctcacgcctgtaatcccagcattttgggaggccgaggcgggtggatcacgaggtcaggagatggagaccatcttggctaacacggtgaaaccctgtctctactaaaaatacaaaaaaattagccgggcatgatggcaggcacctgtagtcccagctactcgggaggctgaggcaggagaatggcttgaacccgggaggcggagcttgcagtgagccgagatggcgccactgcactccagcctgggcgacagagcgagactccatctcaaaaaacaaaaaacaaaggaacaaaaaaaacctctttttttttctgcctagcaagctcactttaaggagttataagataacgctgtttaagaagccaaggctaaagaaatgggctccacacacccgccttttagagcaaggttgaaggaaaaaagaaagagaaattcctttactgttactcctttccctggcttcctaagcataactgtgtttacaaatgtctggatttagccagtccttgtttttcttttgacacagctacaagccacaagttatgcactatatgattaactgcttttgttttacttttgtgaagtctgcttataaaaaccccattctgtctttattcaatgctaagctttttaaatgcaaatccactgagctagtgcatacctaaaataaacagtccttcccttctccatatcggtctctccggtcctcagtttcctgcaacagtacaacttagattttaaatttttaagaagtttttcaggcagagtgtggtggctcatgcctataatcccagcactttgggaggccaaagtggaggactctttgaggccaggagttcaagaccagcccggcccacatagcaagaccctgtgtctacaaaaactttttcgaatcagccaggcatggttgtgcatgcctgtggtctcagctacttgggaggctgaggcagggggatcatctgagcccaggagtttgaggctgcaatgagctatgtttgtgccactgcactccagcctgggcaacagagcgagactctgtctctaaaaaaaacaaaaaacaaaaatcaaaaaacaaaaaaaagcttttcaagtgcaccagtcttaagcatagagcttggtgaatatttccatatgtctgcttgtgtaactaacacccagatcaagatatggaacatcttcagtgtcctggaaagttgcttcctgccccttcccagccaacactccctgtccccgtcgtccacccccagaaagccactgccatggacttctatcaccatccatttgtttcgcctgttcttgagctttgtatttaggctggtgcaaaagtagttgagagctggacgtggtgggtcacacctgtaatcccagcactttgggaggctgaggcgggtggatcacctgaggtcaggagcttgagaccaacctggccaacatgctgaaaccccatctctactaaaaaaaaaaaaaaattagccgggtgttggtggtgggcacctgtaatcccagctactcaggaggctgaggcaggagaattgcttgaacccaggaggcggaggttgcagtgagccgaaattgtgccactgctctccagcctgggtgacagagtgagaccccgtctcaaaaaaaaaaaaaaagtaattgtggtttttaccattatatattacctttgctccaacctaaagtaaatagcctcctgcggtgcaggcatacctcgctttacggcactcctgtgatgcgggcgtaccttgctttacggcactcatgtgcaggcgtacctcgctttacggcacctccatgcttagttgagcttcaaagatgctgcgttttttttcaccagttggaagtgtgtggccacctcgcattctctctgtgttacgtgttggtggttctcacgatctttcagacttttttattgttatgacacctgttacagtgatctgtgatcagcgatcctccatgttagcattgtcattgttttgggcaccacagaccggacccggcaaccttcatctatgaacgttgtgtgttctggctgttccgcccaccagcctttcccagcctctctcctctccccgctccagcctccctattccctgagacacaaaaatatccaagttagtccagtgagtaaccctacagtggcctcgaggtgtgcgtctgtcactttaaatcaaaagctagaaatggttcagtttagcccgggctcggtggctcacgcctgtaatcccagcactttgggaggccgaggcgggcagatcacgaggtcaggagttcaagaccagcctggccaacatggtgaaaccccatcgctactaaaaatagagaaattagccgggcgtggtggcgggcgcctgtaattccagctactcaggagtctgaggtgggagactcacttgaacctgggaggcagaggttgcagtgagctgagattgtgccgctgcactccagcctgggtgatagagactgtctagaaaagaaagaaagagggagagagagaaggaagagagaaagagagagagagagagaaaaaagaaatgatttagtgtagtgaggaaggcttgttgaaagccaagataggctggaagcggagcctctcctaccagttagccaaattgtgaacacacaggaaaagtgttttaaggaaattcaaagtgcttctccagtgaacacaagaatgataagggaaacagccccactgctgatatggagaaagtttgagtggtcggataaagatcaaaccagccacaacgttcccctgagccggagcccaatccagagcaaggccctcgcactctgcaagtctgtgaaggctgagagaggtgaggaagctgcagaggaaagtttgaagctggcagagatttgttcatgaggggtcaggaaagaagccgctttcataacagaaaaaggcaaagtgaagcagcaagtacggatggagaagctgcggccagttgtgcagaagatgtagcaaagactgtaaaggaaggtcaccgcactaaacatcagatttttggccaggcgcggtggctcacgcctgtaatcccagcactgtgggaggccgaggtgggtggatcacttgaggtcaggagttcaagatcagcctggcctacatggtgaaaccctgtctttactaaaaatacaaaaatcagccaggcctggtggtgcacatctgtaatcccagctactcaggaggctgaggcaagagaatcacttgaacctgggaggtggagcttgcagtgagctgagatcgcgccattgcactccagcctgggcaacagagccagactctatttcaaacaacaacaacaaaaccaaacaaaacaaaaacaaaacagatcagattttcaatgtagacaaaacagccttctattggaagaagacatatgtaggactttcatcctagaaaagggatccgtgcctggcttcgaagtttcaaaggacagaaggacaggctgactctagtgttaggggccagtgcaggggtgactttaaaccagtgctcactgaccattctgaatatcccagggactttaggagtaatgctcaaacaatggtattcttcacagaaatagaaaaaaaaaaatgctaaaatttatatggaaccaaaacaaaaataacaaaactggaagaatcacattacctgactttatttgtttattttttttgagacagagccttgctctgtcacccaggctggagtgcagtggcccaatcttgcctcactgcaacctccgcctcccgggttcaagtgaatctcctgcctcagccccccgaatagctgggattacaggcacctgccaccaagcccagctgatttttgtatttttagtagagacaggctttcaccatgttgaccaggctggtctcaaactcctgacctccggtgatctgcctgctccagcctcccacagtgctgggattacaggtgtgagacaccgcacctggcctctctgaagacttttgatgcagctttggtggaataatggtcagggctgggctccctcagctgctcttccctctctcattcccatcctcaattcttgggcagaaaataagtttatcacttaacagtcagcctctgtatcacccttgcgacaggctggagggtgtcgctccagcctgggcaacaagagtgaaactctgtctcaaaaaaaaaaaaaaaagacaaaaagaaaaagaataaaaaataaagttagcaatattcagcaatgatgtggccggcaagagcctgcagaggatcatgggccaggtcacccatcctcactgagtcctgcacggctctcggctcagctcacgaggctctcaggagcaagtccctgcctcctctccagcacggccctctccccctctgctcactctgtgttctagccctcctggctatttatagtcccctccaggggccctgctgtttcccactgggtgccactgccaagcctcctctcaccgcctgaaactctgctcctgtcccccacccgcctggcaggcacccacacagctttcaagatccaattaataacagtaataatagcagctgagatggattgggtgcttcctatgtgctaagtgccgtatgcgtgtcatccagtttaacccccgcagcggcccgtgcacttgatcctgtgtcgtcccccgtttcacacggatttgctaaacccgtatccatttagtagcagccaccctgtgccaggcactcctcggaggcacagagaggttaggaagtgccagagcgtgggctggaacctccgctgccggaccgcagggtccctgctctcagccacagcgatgaactgtcttccttagcgtggcaccaaagcctccccagccacctcccctccccgagtgttgcccacaccctccggtccgccttgccgggcctttgaggcctctgtcgtagcatctcggagatttgattgctgattggactcgcttcctctctgggctgtgaggatatcatttggaaatgtgttcattgtaagcagcagaaaacccaatatatagggacttgtatttcccatgagcaggaaatgagacaggctcttcctagtgtggctcagctgaacagcatgagggaaatggctctgttcttttatttatttaatttaatttaattaattaatttttatttttttgagagggagtcttgctctgttgccccggctggagtgcagtgctacaatctcagctcactgcaacctctgcctcctgggttcaagtgatctcctgcctcagcctcctgcgtagctgggattacaggtgtgtgcaaccatacctggctaatttttgtatttttagtacagacggggtttcatcatgttgagcaggctggtctcaaacttctgacctcaggtgatccacctgcctcagcctcccaaagtgctgggattacaggcgtgagtcaccacccggctaatttttgtagtttctgtagagatggggtttcaccatcttgcccaggctggtctcgaactcctgacctcaggtgatctgcccgccttggcctcccaaattgctgggatgacaggcatgagccacgcgcccggcctctgttctttcttgacctgttcctggtggcagcagtaaagccaccgtaactccaatcatcacccatgagttcaaggcaaaatgtctctttgtaatcatcaaagtcagggccttgccagaggtcccagcatgcttcacttgggtctcagtggccagaatggtgtagggcagccgttcctggtaatgagagaggcagagaaagcgggtatcttgcctgggactggtctgttgccacttcctagaaaacgagggtagagtaagcaaggaagaagggaagacgggtgtcgggtgtctgccagtgccctagagcgcagagaccgtacattaattttttcaaaatttccagaatcggaaggctctaatgattttgtgttgtagccttccagtcttttttctatgcacgtatgtttttacttttttcagacattgtaacatactttaattattgttattaatctctttttgcacttgataagatgctattcatcatccatatagtttttaatgctatatagcagcccatcttgtagaaaaaccataattgactcaaccagtctcataattcaggttgtttttaatatttcacacttacagacagccctgtgacttacaactttatttttatgttcatttataactagtatcatagatcataatcttattacgctgggtataaactgtaccaaccactaaaccttttgataccagttaccagattgactctagaaaagttgggccaactttttttttttttttcgagacggagttttgctcttgctgccaaggctggagagcaatgttgtgatcttggctcaccgcaacctccacctcccaggttcaagcgattatcctgcctcagccttcccaagtagctgggattataggcatgtgctaccacgcctggctaattttgtattttagtagagatggggtttctccgtgtgggtcagcctggtctcgaactcctgacctcaggtgatccgtccacttcggcctcccaaagacctggggttacaggcgtgagccactgtgcccagccaaagttgtgccagttataggcagcctccaagagtttctgtgagtacctatgccctgacagctctggatattgttattattatcttaaaatccttgccaatttgacacgaacagtgaaaactatatagaactttacattttctttcattacaaatgaggttaacattctttttaatgcattttgaatatttgtagttctcttttaaattttctgttcatttcccttacacatttagaaagttgaggttttcatcttttctcattggcttgtaaaagtgctttattggccaggtgtggtggctcacgcctgtaatcccagcactttgggaggccgaggtgggtggatcacaaggtcaggagttggagaccatcccggctaacacggtgaaaccccgtctttactaaaaatacaacaattagccaggcatggtggtgcatgcctataatcccagctactcgggaggctgagacgggagaatcgcttgaacctggcaggtggaggttgcagtgagctgagatcgtgccaatgcattccagcctgggtgacagagcgagactccatctcaaaaaaaaaaaaaaaaaaagtgctttcggtattcaagtattatcataatatgtagaatacaggaaagttcctgggagagggcacagatgaggcagatttgagggcaaaacaggatttcaccaggtggacaaggggtaaggagaggtatatatatatgtgtatgtgtgtgtgtgcgtgtctttgtgtgtgtgtgtgttcatagagacagagtctccttatgttggccaggctggtctcaaactcctgggctcaagtgatcctcctgccttggaggatgccccacatcatagtgatgggatgacaggcgtgagccaccgcgcccagcaaggagggttttctaggcacgggagcagtgtgtgcaaagaggggggagctgtgtgcgtggcaggcactgcatttggtgtgcaaagaggggggagctgtgcgcgtggcaggcactgcatttggtgtgcaaagaggggggagctgtgcgcgtggcaggcactgcatttggtgtgcaaagaggggggagctgtgcgcgtggcaggcactgcatttggtgtgcaaagggggggagctgtgcgcgtggcaggcactgcatttggtgtgcaaagggggggagctgtgcgcgtggcaggcactgcatttggtgtgcaaagaggggggagctctgcgcgtggcaggcactgcatttggtgtgcaaaggggggagctgtgcgcgtggcaggcactgcatttggtgtgcaaagggggagctgtgtgcgtgtcaggcactgcatttggtgtgcaaaggggggagctgtgtgcgtgtcaggcactgcatttggtgtgcaaaggggggagctgtgtgcgtggcaggcactgcatttggtgtgcaaagagggggagctgtgcgcgtggcaggcactgcatttggtgtgcaaaggggggagctgtgcgcgtggcaggcactgcatttggtgtgcaaagaggggggagctgtgcgcgtggcaggcactgcatttggtgtgcaaaggggggagctgtgtgcgtgtcaggcactgcatttggtgtgcaaaggggggagctgtgtgcgtgtcaggcactgcatttggtgtgcaaaggggggagctgtgtgcgtggcaggcactgcatttggtgtgcaaaggggggagctgtgtgcgtggcaggcactgcatttggtgtgcaaagaggggggagctgtgtgcgtggcaggcactgcatttggtgtgcaaaggggggagctgtgcgcgtggcaggcactgcatttggtgtgcaaagaggggggagctgtgcgcgtggcaggcactgcatttggtgtgcaaaggggcgagctgtgtgcgtggcaggcactgcatttggtgtgcaaaggggagagctgtgtgcgtgtcaggcgctgcatttgtggcttaatgctgccattagagattgccatgaacttgatggcttagaacagcagaaatcgatgctctcgcagtctgaagaccagaagtctgaaatcaaagtcccagcccctccccaggctgccggggcagagttcccacttactcccctctttcagtgtctggtggctccaggcattccttggttggtggcagccccagtccaaaccttgcctctgtcttctcttctgtctgtgttttccccctttctctttccatagggacacagcattggatttaggacccaccggttaatcgacaatgatctcatcttgagacccttcatttattcacatctacaaagaatgttttccaaataaggtcacattcccaggtcccaggaattagaatctggacataccttgtgggggggccactactgaacccaccgcagggagctagaaggagtccgatgtcacagggcaggagaataggaccctggagaggtggagcaggtgcagaccacaaagggccttgagctgaggagcggggctgtgtccctaagtgaatggggggcaacacggtctgatttgtgacccggctgctgtggggagggtgctggaattgtccttgtaagagttggtgagggtggggaggagcggggatgcctcacagtgcaggagatgaggggcgggaatgtggaggcatctagaatggctcccaggttccctacgtgtgtggtctttgggaaaaggctgcgtttgaggctcctaaaggtggagatgcccaggagtctgcagacctgacttcttccgggagcaggaacacaattcgggagaggaaggtgatgcgaggttgatggaagctggcgagtaccagtccctgccaccaccaccattttatcatgaacaattgtaagcacacagaaaagttgaaagaattcacagtgaacacccattcacctgctgtctaacgttcccagtgatgatttttatgcgcttgctttatcacacagctgtccatctttccatccctctgaacatcatcattccatcttggtttttttgttgttggttggttggttgtttcgagacagagtctcactctgtcacccaggctggcgtgcaatggtgcaatctcagctcatcacaacccccacctcccgggttcaagcagttctcctgcctcagcctcccaagttgctgggattacaggcacccgccatcgcacccagctaatttttgtatttttagtagagagggggtttcaccatgttggccaggctgttcttgaactcctaacctcgtgatccacctgcctcggcctcccaaagtgctgggattacaggtgtgagccaccgcgttcagcccatcttattttttatgtatttcggagtaagttgcagagagttgtacacttcactccagcatgtcactcactggagcccaacatttgctgaagtgcatgaatctttttttgttcttgtttttgtttttgtttttttgagacggagtcttgatctgtcgcccagtctggagtgcagtgtcgcgatctcagctcactgcaagccccgcctcctgggtccacaccattcttctgcctcagcctcctaagtagctgggacaacaggcgccaaccaccacgcctggctaatttttttgtagccagtatggcttcaccatattggccagtatggtcttgatctcctgacctcagatgatccgcccgcctcggcctcccacagtgctgggattacaggcgtgagcccctgtgcctggccctgtcatctaggttttaagcccctcgtgcattaggtatttgtcctaatgctctccctccccttgccctccaccctccaacaggccccagtgtgtgacgttcccctccatgggaacagcaatttttaagggatgggtagagaaagaagatttcaccaaggagcctgagaaggacggtgacagtcagaggaaaagcaccgaagcggggacgtcagggaagatcacctgggtcagttaccttaggtttgactgcagataatagaaaaaccaagtaacagaggctcaaattgcatttggcactttttctttcttttatgtaaaaacgccccgaggtagaccttcctggggtgggctccactgtgccctcagtgacctggactcccagcttgtgaaaacgtcccgaggtagaccttcctggggtgggctccactgtgccctcagtgacctggactcccagcttgtgaaaacgtcccgaggtagaccttcctggggtgggctccactgtgccctcagtgacctggactcccagctttctgctcagctgtcttcagtggtggcttctatcctcagctcacctcatggttcaggatggctgctggggctccagccatcccatcaactctccaaaccagcaacagaaggaggaacaagggcagtgtggatagtgtacctttcggctaaatcagtctcttccagcagcttcctgcaagttccacacatatccctgtaacatcttgttgtctagaacgtaatcatatggctcacaccatcaggaaaggtgtctttgaactagctgctgggtgcactgccgctccgaatacagtaggatttctgttagtcggcggggaaatggatattggctgccagcagcctttgccttgtctgccttttcttcttttttgagatctggtgcccaagccgctgtctgctcagcatacccacctgtggccgtcggagactgaagcctgtgctcagtaggtccccatcttcctcccccagggttcctgccttctccgaggattggtttccccatcttttctgtaccccttttcctggttggagtctcctgggctctcatggttttgtgggggcagaaatgaaaggggaaggccctggaaatgttcgcaggccgagccctttcgccgcccctgggcctccgcccaccagcaccctgtcctcaggccccctgcgttcagctccatggtcagccccccttaaccaggagggatatggaaggggacttctttggagtgagattcagagggaaagggagggcatttgagacctgggttctgatcctgtgatcttcggcaattgtatgtaaattgggaaaaataagaactgcctccccgcggaacatccaggctggaaggagcaggggatggcagggcccgtggtcctctgctctgatcaggatgaactgtgcatgtggggagactggcagagaccttccctaccgtcccttcccccccgttgatcttggacgatctcccaagtgtgtggggtccattcctgcgacccctgggaattggtcagtgtacaggagagtctgcttggccggctggaatctaaactgtgggcaaagccgcggtccactattgcttattttccctggactccaggcaccaacagggcagcctggagcctcctggagaggaggagggaggagggaggggccggcgggaggctgccttccatcccctcctgtgcttctccagagtgagggggtgtcaccaaacggccaggcccttcacggacccagactcaggccagctgggtgccgctgtgcctcttcctcctccccctggaaggaccagagtcatttcacatcccttcagccacagacacaagtgtcatggtctccagggcactgggccttatgtcctaggtgcgtggcctacacacatctcagtgggagggcatcctgggtcctgcccaggtacgtggcgtacacgcgtctcagtgatggggcatccctgggtcctgcccgggtgtgtggtgtacactcatctcagtgatggggcatccctgggtcctgtggttcttcatacacaaccctgtctagggaaaaaactagtccatgtcccctggcagctgaatggggcattggctcagggacgaggagaggcagccgacagaagcaggtgcagcgagcctaggggaagcgctcggctgccaaaaggccagattgggcagagtgtggccacggccaggcgtcccggtgacctgttgacaccattctccagctgctggttgcctgtgggctggtgtgttgtgacagaggagggaagagctggggcccccgtggagaacttggctggctgggacttggctgaagcctcagacctgagacagacggtgcgatcctctgctcattcattcgctccacgcactttccccgagagcctgccacaggtggggttgtgggtgctggcgtacagtgatgactcagatgctcacctcctgccccaggggctcaaggacaaaggggcaggattcactaaggtgccagggggccaggtgccatggggagggtgacctggaggaaaggatgtctgggcagatggcagggcaggctcagccagcctcccccatcacactgtgcgagatccgaagatgcctggccagggagtcccgcccggaagatacccggggaggtttaacaagcggacgccgccactgggcagtccagtgcgtaggaggctcctgctggccccaaggctgccggcacggtgatcttcgtgtctccaggacgccctgcggtgccagctcccgctggcccgcacgagtgctgaagcttacccctgctctgcgatgagtgtgagaggggtgtccaccccccgctggcggccccagcccaaggaggtccaccacagccctcgggagcaacactgccacgttctccgttgccagtcgtggtgggtcagagctggggagcaaacaggccaaggggcaggggccggtttgtgggagggtccctcctatagccatgctggtggggctggacgcaggggcctttccgaggccgccctcgtaacccttttggaaaatgtgaagccctgagctgctgacctgcacaccccgctcgctgcactggctcagcctcccctcccaaggtgggtgggctccgtgcctgggctctggagcccaagtggtgctggcagccctggggggttaatgcggctcaacttcccggtcgcctttccttccctcctcctttgaaggaagcccacactggggtgatagaaataagcaccggctccgaggagtctgctgtgagcccctgtccctgccaggcctgggcacagcctcctcgcccacgccctgctgccttgggctccgtcctccgtgcggggccttgttctgagggctgagggctcccctcccacactccagaacctgccctggacccctggagggagtgggctcagtacaaatggtacccaaggaggagggccacaggaagtgacatcgaccggccccccccacctccttattccctataaaaagcaaaatggtgactcagagaggagagttggaagcgtcctgcctcttgctcccactgttaatttttacacttggaattaggcagaaggcaaagaaaacagcagcttgaaatacgcggctgacatgctcttcatcgggtagcaacagcagagccgctcctccccgcctcccagcagccccggagcgggcagggcccggtgcctgctggctctcccccgcccctcaccaggcccaggcccccgcacagcccccgcccgggccaggcgtggatggtgcggccggggccatggctgccgggggccgccgccggcgcccactacgctaccagtccctggcagctctggtggaggattctcagtggcctttcttgttccttgtctcagacttcagctacgggacggacgagtacgacggagaggggaatgaggagcagaaggggcccccggagggctcagagaccatgccgtacatcgatgagtcgcccaccatgtccccgcagctcagcgcccgcagccagggcgggggggatggcgtctccccgactccacctgagggactggctcctggggtaggtacaccggcttttctttctgggtttggggaggggtgacgggaaggcctgggcatcgtgggccaggccctgcttgggttggtctcgagagattgggactggagacgtttggacctggccgttcttggtgcctcgtcatctcgtcctggccctggacccctctcaggctcgggcttccctccccacctgctttgccaacgctgccgcccctgtctctccccgtctactagccgtctgctccccaggcctcccagacccctccgtgcctctttcagctttcccctgttagcctgtctcctccagaggacccaggagaggaccaggctctcctcccctctgcacccaggccaggcagtggctgcatgcgtggcccgtgggctccaggtgttcagatgctgctcccgcaaagccagcctgggcctggtgctccctgtgggtgcaatgagctgcccgctccagccctcctctgttcactctggaagggaacaaactctgatggcatccacctctccttgttgacagagacaagagttctgctccagagagaagcattgtagaaggaatattaagtatgtgctctgagacaggccagggatagaaactgtggagggtttgcggtccttgtcattaacgtgttcctggcgacagggactgacgctgtctgagcgcagctcgtgtgtgcctgtcggagacacatgaacgagcaaaacagaggttctgggggttgtttgcctggagctggtgggggagaagaatccaagccggtcctctgtggggggtgtgtgttgcaggaggcggtgggagtgccccatccttgcttggtcctgctcgtccgggtgtgttttgtagggggtctccgtcctgccttctgacgtccccagaggagcagtcgctgagatgccacgggctgcctcttcttcctccaggggctagtgcccccccaccccagctgaggccgcctgaaccctcccattcttgagaaccccctgctccttccagcccccccggccaccctccaccccccacagagctctcacccctcttcacacaccggggtggctgttatagcctttggcaacaagggccttggcaacgggcttcccacttgggggaagccacattgctgccatggcaacagaggccgaggccgagtttagcggcagtccaggcgtgcacctgtgggaagggctggcggggggcaggtgggaggcaagggggccggcgagggggttggtcagtgtgttgttgacctgccctaagacgggaggcgggttagagacaagcgtctcggacctgcgggggcagggtttttgccctggttctcctggaggcattgggctcagggtacaaatagtaacccaaggaggcagagcaggtgttcagggacctgaacgggggccaaccaggggagagcaaggaggagaagactctcgctcccatctctgccttcagctctcaaaccacagcagggctcagagccccgcccggggggactcagctctcaccccactgtgagcagctgcaggaagatgctgcggaatcccggtgtggggccagggtctttgccgctgcctgtccccgcgccacctccctctttgctccctgtccctgtgccctgtccttgtcgcgtgaccaccatgactggtttccgtgtccgtcgattttccgattcctttggtgctggcaggtgccttctctcgggagacagatcacgggcgtcacgcacagatgcccccgcctggcgctccggggcttcggggcagaacttgacttggtggctgtgcgtcttgcttggtggctcacgagggactcacttggcttgaggaccttgaaatccagagatgctagagtgactgccccctaaagtgcttgtggcccccagggttgatgtttacaccatcgactagaagccacgcaaggcaggagtagggagcacttgtccagcctggggatcgtccgggcaaaggtcccatccgcggcacctgccttccctcctcagggagcgtttctgccctttctgctgggtcaccggccccacctagtggactctgcagggattgctgtttacacggggtgcctggagggagctgacgcctcttcctgagtacttggggatgttttggttaaaaacactattaataaaagaccgaggtttctgcggcttggctgtgcttatttggccaaacaggtcccctcccctaccaggcttcctgctggggccttgggaacaggggggacttctggaccaaatcagacaattgttgtagatattcagatatctggcttctggcaccgccttatcgctgggccttccacgcccaaatatgcagccaacgggaagcccaaggttgagtctttgtgttagtcagtgttctctagagaaacaaaaccaacagggtgtgtgcgttatctgtatctatatctacatacgaagaaaagtattagaaggaattgattcaggtgattatggaggcttagaggtcctaatctctgcagtcaatagctggagacccaggacagccaatattggttccagtccaagtccaaaggcctgagagctaggagagccagggatgtaaattccagctcataagccagtggactcgaggctcaggaagagccagtgtttcagtccgagtctggaggctggaggaggccaacatcccagctcacgctcaggtagtcaggcgagaggagcttcctcttattctgcctttttgttaattcaggtgttcagtggattggatgaggcccacctacactggggaggagtctttttactcagtccaccaatacacatatcaacctcatcccaaatgcctcacaaatatgtccggattaatgtttggacaagtatctggacaccttgtggcctagtcaggttggcctagaaaatgaagtgtcatactattattccttcagccacccaggatggaaagcagataagctttgcgcagatgaaaatctattactctcaggctgggcgcggtggctcacgcctggaatcccagcactctgggagactgaggcagccagattacctgaggtcaggagtttgagactagcctggccaacatggtgaaaccctgtctctactaaaaatacaaaaattagccgggcgtggtggcacatgcctgtaatcccagctactcaggaggctgaggcgggagaatcacttgaacctgggaggtggaagttgcagcgagccgagatcttgccactgcgctccagcctgggtgacaaagcgagactccatctcaagaaaataaaagaaaatctactctttagctgtgagacattgggcaagtgtcctcataccgctgagcctcagtctccttgtctctagatagctctaactcccctgaaaggtagtggggaggaggccccactgtgagcagctctcagaccacagcagggctcagagccctgccttggggactcagctcccatcccactgtgagcagctctcagaccacagcaaggctcagagccctgcctgggggactcagctcccatcccactgtgagcagctctcagaccacagcagggctcagagccctgccttggggactcagctcccatcccactgtgagcagctctcagaccacagcagggctcagagccctgcctggggggactcagctcccatcccactgtgagcagctgcaggaagatgctgcggaatttcagcatgaggggaggcctgcagcattaggcctggctcaccaaagtgcacagcccttggccaccagggcccacaagacttttctcgccaggtttagagggctggggagccaacagcattaccactgcaaagaccaagtctgatcaatatctgctgcaccatgaccgaacctgcttttgcaatcaacctcctttctgccacatggggtggccccgggtgaagccgggtctctgcggtgttggcaggacatgctcctctctccccagcacgcccttccacagccttgcactctgcctttgtcttcttttgtgtccccaagacatggatcccacagaggtattagggtgaaacctgaagccctgccccataaaccctgcccaagtccaggctgagcagggcagcacggcagggccaggcccacagaccacgggtggctccattcagcggagactgcccagtttcactctgagaagaaagggccaggactcatctcagctgacaagtgggggtgtaggttcctaaggcaggaccatggtcttacagaaaacccgcctccccacaggccacagactcctctgtctgcttgcctcttgggaagcttagtaaaaaggggctacaaggcagagagaagaactgggttttgtccccactctaccactgtctcactgtgtggcctgaggggtgtcactcatgactccccaccagagctgcagtttgctcatctgtagtgtgaagacactgagaatttcctccctcctgacctcacagggctcaaacctcacagctgttgtgaggtttctgtgagatggtgtttggcagaatgctttgtcaatgtaaaatcgaaacaggggattagactccagcctgcaggagaacccaaagataagggtggaggcgaattgaaatcctcaccattggccgggtgcggtggctcacgcctgtcatcccagcactttgggaggccgaggtgggtggatcacctgagatcagtagttcaagaccatcctggccagcatggtgaaaccccgtctctactaaaaacatacacaaaaaattagctgggtgtggtggcaggtgcctataatcccagctacttgggagactgaggcaggagaattgctagaacccagtgggggcagaggttgcagtgagctgagatcacgccattgcactccagcagccagggggacagagtgagatgccatctcaaaagaaaaagaaaaaaaggaaaaaaaaaatcatcatcattgtccctatcatcctcttcctcctcctccccctcatcacagctgcttagagaggcttgtgctgaacctttcacgtgttggtttcatttaagagccccaacaactctatgaggtaggtgctataaccatctccacattacaggtgcgaaaactggggctcggagaggtgacgtaatttgcctaagattagctgggcatggtagttcactcccataatcccatctacaaggggaactgaggcaggaggatcgcttgagcccaggagttggaggctgagaggtgctaggatcacgcctgcgaataggcattgtaccccgcctgggtgacagagcaagactccatctcttaataatagctattaatattattgtttgtccaagaccatgcagccagtggggcagcgtgttattgaaacttgggtttctatgatgccagagcctgcacagcgctgtcaggtcccgctcacacgccctcccttgtgaagctttcacacccaccccgccgctgatcctactgcagtttgggaggtgtgcacggtcacttgtggggtgcatccgccctgtgagatcaggaccttaatccctgatcatctctgtggaccccagtggaagcttcttggcacctaggggttctcaactggtatttgtggaatggaaccaagtagttctgggatgttcagtcaggaggaagggaggagcaaggaaggctcaggcaataacgctgggaagaactcaggctcagggataacgctgggaggaactcaggctcagggataacgctgggaagaactcaggctcagggataacgctgggaggaactcaggctcagggataacgctgggaggaactcaggctcagggataacgctgggaggaactcaggctcagggataacgctgggaggaactcaggctcagggataacgctggggaggaactcaggctcagggataaagctggggaggaactcaggctcagggataacgctgggaggaactcaggctcagggataacgctgggaggaactcaggctcagggataacgctgggaggaactcaggctcagggataacgctgggagaactcaggctcagggataacgctgggagaactcaggctcagggataacgctgggaggaactcaggctcagggataacgctgggaggactcaggctcagggataacgctgggaggaactcaggctcagggataacgctgggaggaactcaggctcagggataacgctggggggaactcaggctcagggataacgctggggaggactcaggctcagggataacgctggggaggactcaggctcagggataacgctgggaagaactcaggctcagggataacgctgggaggaactcaggctcagggataacgctgggagaactcaggctcagggataacgctgggagaactcaggctcagggataacgctgggaggaactcaggctcagggataacgctgggaggactcaggctcagggataacgctgggaggaactcaggctcagggataacgctgggaggaactcaggctcagggataacgctggggggaactcaggctcagggataacgctggggaggactcaggctcagggataacgctggggaggactcaggctcagggataacgctgggaagaactcaggctcagggataacgctgggaggaactcaggctcagcgataacgctggggagaactcaggctcagggataacgctgggaggaactcaggctcagggataacgctgggaggaactcaggctcagggataacgctgggaggaactcaggctcagggttaacgctgggaggactcaggctcagggataacgctgggaggaactcaggctcagggataacgctgggaggaactcaggctcagggataatgctgggaggactcaggctcagggataacgctggggagaactcaggctcagggataacgctggggaggactcaggctcagggataacgctgggaggaactcaggctcagggttaacgctggggagaactcaggctcagggataacgctggggaggaactcaggctcagggataacgctgggaggaactcaggctcagggataacgctggggggaactcaggctcagggataacgctggggaggactcaggctcagggataacgctgggaaggactcaggctcagggataacgctgggaggaactcaggctcagcgataacgctggggagaactcaggctcagggataacgctgggaggaactcaggctcagggataacgctggggagaactcaggctcagggataacgctgggaggaactcaggctcagggataacgctgggaggaactcaggctcagggttaacgctgggagggactcaggctcaggcaataacgctgggagggactcaggctcagggataacgctgggaggactcaggctcagggataacgctggggagaactcaggctcagggataacgctgggaggaactcaggctcagggttaacgctggggagaactcaggctcagggataacgctggggaggaactcgggctcagggataacgctgggaggaactcgggctcagggataacgctgggaggaactcgggctcagggataacgctgggaggaactcgggctcagggataatgctgggaggaactcgggctcagggataacgctgggaggaactcgggttcagggataatgctgggaggaactccggctcagggataacgctggggaggactcaggctcagggataacgctgggaggaactcaggctcagggataacgctgggaggaactcaggctcagggataacgctgggaggaactcaggctcagggataacgctgggaggaactcaggctcagggataacgctgggaggaactcaggctcagggataacgctggggaggactcaggctcagggataacgctgggaggaactcaggctcagggataacgctggggaggaactcaggctcagggataacgctgggaggaactcaggctcagggataacgctgggaggaactcaggctcagggataacgctgggaggaactcaggctcagggataacgctgggaggaactcaggctcagggataacgctgggaggaactcaggctcagggataacgctgggaggaactgcagcctcttcttccctttcttggtctcttcagaaggcttagggcttgggattcgaggttgctggtaggtgcgtgaagaggcggcatggcagccaggaactcctgagatggtgcctgctccactccctcctgactgctccggacctgggttgtgtggttcagggactcctcgagtttcagcctccgccccccagcagccggcccctgcatttctccccttcctggatcttgggtccctgctgcaaagagaaggacacgagctggaccctcccgtgtgccaggtgctgtgctaggagcccaggggctgccctgccacccaagtcctccagccatggggctgcccccgtttagtagatgaagacactgaggctcagggtggctcctgggcttgtcccagttgggaaggaggtaagtcggaagtaggtagactagtgccttggttgtgaccctgggtcccgtcatcgctggctcccgtcctctctggccctcctacattcacacctggctgggatcttgctcacctctgcatactgttaatcttccctgatgaaccacacctggctggcctggctcatcccacagctctcacgccctgtctgggatctccgtcttctggctagctagcagccctagagttgatgccgtaattacccccattctatagatgaggaaacggaggcacagggagactagatgacatgcccaggtcacacagttggcaagaggcagagctggggctcacatccagagtgcaggggagttttctttctgttttagtttatttgtttcactgtataaacagtgttgtgtaccggcttctcctcaacattagctttattttattttatgtaatttatttatttgagatggcgtctccctctgtcacccaggctggagtccagtggcgcaatctcggctcattgcagcctccgcctcctgggttcaagtgattctcctgcctcagcctcccaagtagctgggattacaggccaccacatccggctaattttgtatttttagtagagatggggtttcatcatgttggccaggctggtcttgaactcccaacctcaggtgatccgcccgcctcggcctcccaaagtgctgggattacaggcgtgagccacctcgcccagcctatgtattttatttttttgagacagagtctccttctgtcacccaggctggagtgcagtggtgtgatctcggctcactgcagcttccgcctcccggggttcaagtgattcttctgcctcagcctccctagtagcggggattacaggcacccgccagtacgcctggctaattttttgtatttttagtagagacggggtttcaccacgttggccaggctggtcttgatctcctgacctcaggtgatctgcccgcctcggcctcccaaagtgctgggattacaggcgtgagccactgcatctggccaacattagctttatgtagttgaactatgtatatgattttggagtgacctgtactagaacagagaggaggcagagggaggagcaaggtgatctggaaggtgacgaatccagtcccatctgtggctgcagttagtggctgcaactgccctggcacttgccctttggtgtcagttcccattggctgaagagctactgagcttcatacagtctggaggtggggcttgagtttctgccaggaaagctgggagagccagggagaagccaagaggcgggagaaagtgcttcaagccgaggacctgccgttgttaaaggcctggaagtgagaacgtgccaggccctttgagaggttactgtcaacagtgagatgggtgagtcatcagctggggccccacggctcttgtttgggctggcttggtggcttcctgctgggcatagagtgagcagtgttttagaaagagtcatctgatgtcagcaggagggatgcaggatgaatgtcctgtcacacctgtcctgaaatcctccagcaccttcccttcgcctatggggccccccttccctttgcacagctgtcaaggccttgtgtgacctgacccctggaccccctgcctacctctgtggcctcaggaccaactccgtgctagaattgtgaactctcacgagagagagattttgtcggttttgtaacaaaacttgctcattgcagtctctggtgccgagaactgtgcctggcacacagtaggtgctcagtaaatattagctgaatgaatgcatgaaccagccagactaaactcatgtcattgtgcctcacatagtctctctcctgtctgttccccagccccaccagcatctctaaccactgctttttttttttgagacggagtctctctctgtcacccaggctggagtgcagtggcgcgatctcggctcactgcaacctccgcctcctgggttcaagcgattctcctgcctcagcctcctgagtagctgggactacaggcgtccaccaccacgcctagctaatttttgtatttttagtagagacggggtttcaccgtgttagccaggatggtctcaaactcctgacctcaggtgatctgcctgcctcagcctcccaaagtgctgggattacaggtgtgagccactgcgcccggccataatttttttttttttttttgagacagagtcttgctctgtcgcccagactagagtgcagtggtgtgatctcagctcactgcaaccactgcctcccggattcaaggaattcttgtgcctcatcctccagagtagctgggattacaggcctgtgccacccctcctggttaatttttgtatttttagtagagacagggttttaccacgtagaccaggctggtcacgaactcctgaactcaagtgatctacctgcctcggcctcccaaagtgcgggattaaaggcgtgagccactgcgcccagcctaattttttttttttttttgagacagggtctttctctgtggcccagtctggaacacagtagcacaaacacagttcattgcagcctcaatatcctgacccaagcaatcctcctgcctcagcctcccaagaagccgggaccacaagagcatgccaccacactcagctaattattttttaaaatttttatagagatgaggtcttgccatgttgcccagctggtctcaaactcctgggcttgagtgatcctcctgcctcggcctcccgaactgttgggatttcaggcgtaagccactgcacccggcctatatgtatagtttattcgtggacacaaataaggaaaaatgtataactaactcttagaggctccctctgtcagagggaaccagaggagactttctctttctttattatgtgtgtctacagagttagaattgttagtgatgtaacaggaaaataaagaagttaaaatagaagtgccacgattgggaacgtagagtgggctctgagggcaccagcgggcacatctgacgcagccaacggggagtcacgggaggctccctggaggaggtgacgtttaaagtcgaatctaaaaataagcagtgggccaggtgccgtgtctcacacctgtaatcccagccctttgggaggccgaggcgggtggatcacctgaggtcaggggttcgagaccagcctggccaacatgatgaaaccccatctctactaaaaatacaaaaattagccgggcctggtggcgggttcctgtaatcccagctacttgggaggctgaggcgaaagaatgggttgaaccgaggaggcggaggttgcagtgagctgagatcatgccactgcactccagcctgggtgacagagcgagactccgtctcaaaaaaaaaaaaaaaaaaaaaaaaaatcgcaataggtgtttccatgttatcccttccagaaaagtggcacctcagctgcagagttctgacactgctcccctccccagtacggccttgcccctcccttgacactgccttgggagtcagtcaccaggtcaatctgtccctgagactgtcagctccgcgagggtaggcacggggttccctgtccatggctgcattccgatgctagcacactgcctggtgcacagcaggcggctaacaaatgcttgctgattgggtcaggcggttaacaactgcttgctgattgggtcaggcgttaacaaatgcttgctgattgggtcaggtggttaacaaatgcttgctgattgggtcaggcgttaacaaatgcttgctgattgggtcaggcgttaacaaatgcttgctgattgggtcagggaaggagggaatggagggtgggtgtgggggaagactgtggggagtcaaccattggagactgagatttagacttgatggtgtcagaaatctcagtggctgcgaaagatttcaaacagtagctaggtgtggtgtgtgcttatgcccctcaccctccatgatgctgttcagcccacttctccaagttcatcttctgtcctctagcaagcagcgcttcttaacctgccttccttcctctcttccttccttccttcctccctccctccctccctcaagacagagtctggctctgttgcccaggctggagtgcagtggtgcgatcatagctcattgcagcctccaactcttgagctcaaacgatcctcccacctcagcctcctgagtacctgagatttcaggtgcgccactgcaaccgggttgctgaagctgcttaaccctttcctttcgggccttctcttctttgcctggaaacccttccctatttccagatgctactcagaagccactgtcctgtgaagctttcactctcaggcagcgttagtgccactgtcctccatccccagggtggctggtaaacgagaacactgcctcgtgtgttcacacgtcctcaccccagacggatcgagagcctgagaacggcaagggccccgtctcccagcctcgtatgtgtgccatgccaggccttttctgggtatgaatgaatgaatgaacagacagatggacagacaagatcaggagccaaagtggggaagtacgtgtggtcgtgtgggtgtaagaggctctaaagcttggtggggtggtggctttggcaaaggaaaagaagaaccgaaggacttggtaaaagggatgtgggggttgagggaaggaagactcgtaagatggcggccgcactaacagaagtggaaacccggaaggggaagctgtttcagaaggaggaagggtcctttggtccagatgtgtggagtggaagggccgtggctgggcttccaagtgaggagacccagtggccggggcaggtgctagacctagagcccagcaagacaccagggctgcagctggcagcgggccaccactggcctggaagggagaagggctgcttctctgggggaagggagcagagggctgaggctgggcccaagcaagtgactccacatttacaggaggcgggagaatgaagggccagcctacaccagagagtggtcggggcagtgcctgcatcaacagggcagctgagggcttggagaaactctagactgcagaggccaaagagtcggagagggaggcctctggctttggaataaaccgtttgggggggcctttgaagcaggctgcttctatggagaacattaggagccaggccgaggcagatggagtgtggagctcaggtccagggctggctcagggcatttgtcagggaaggggagggaagctgtggggactggtgagtcacttcccctccaggggggcaccgagggcctgtgagtggagtctgtgtctgatggaggggcactctcattactcactggaatttccagccaccggggacagggtggagtagagaggccctggatactcagggagtcacttgtgtggggttcagggattttgggaagaagtgggcgtcagtctcaccatgccgtgtagaggtgtggggaacggggacgaggatatcctggcagacttccaagggcacctcatgtcctcttgagtggaggaaggaacacagcaggggcctgtggggttttaggcccttcttcgtgtcacctgcaggtctgactcatgtgggcagcccatgccatgcacttggagcccgccgggcgggagacagaagaacccgtggtaccaggccctgagctggcatacttgtgccctggggaatgccaggcctggtcgttcccaagccctcgccacagcctcacccgcccgcaccaaatgaggaattgtggctgaaagggcccttcagatgcgccctggctatttataacccacccaggcagggacaggggaaaaccaggggctggaaggagatgggtggggtgggggtgtgcctctgttgaaccctggtggcacagttccctgatcaaaggctgttagccctggggcccctcaagggctcaccccgcaatcccctgctctgtatttcagctctgcaacaggatggagcctctctccagggagggcagcttctctgctgccaatggaattgcatgagccccacctagagcccagagcttctgaagaattctggggggagtggggggctgtggcctgaactcgggccacaggtgtggttcatttagacggcaccatgttgttttaaaatgttaattatttgccatcgttttaaaatcaggagcattcctgttaataagccagattttagcttattttgaacagagatcaggcagccatgagcttgcgtttcctccagcagccatcggctggagtgagtggtggtttcaccctgccctacctggctcgcttcaccggctggcctcacccgcaggcctcacccgcaccctcatgggtgccgtttgcaacctttgctccatcgttgggttgtaaaagagcttttcccagggcctcctctggactcctcctcccatggaaggaggtgtatgtgcatctgggaactagggccagggggaccagaatgtggcctcactccctgcacagttgggggttctgcaaccattggagaagccaggggaagctggctgggagtgggcagggccggagatggtgcctgtcctgggttctgtgtgcactccccttgcaggatggctccctgcggtggggtggctgggggggctgcttggaggaggtgggggtgctggtctcagcagtgcctgtgagtaggtgggaggctgctcagaggaggtgggggtcctggtctctgcagcgcctgtgagtaggggggctggtctgtgagtgggggggctgctcagaggaggtgggggtgctggtgtcagtagcgtccgtgagtggggggactgctcggaggaggggggctgcttggaggagggggatcctggtccctgtgagtgggacgcccaccgctcctgtgcaggacagtggtggcgccgcgctcctgcctgggggcaggtcaggcctgtctgttgcaaagcctgactcctccagcggcggcgggacgcggctgtggcttctgggcgggccggggcctcccctccggaagggggctccggcgcatggggactccggggtggctctgggggtcgcccctgctcgccgggctcctggctcggccgcgcgcggggaatgaagatgcgtctgggaagcggcctccccgctccaccccaccccggcccggccgcggcctcctcgctcctcctccgccgcagaagcctccgccagccgcggccccgcaaccccagaggacgggcggctccacctcgcgacgcgcgtttcctgtgtgttcggagcgagcgcgagcccgagccccggagcccgggaagggcgggccctgcggggccgggcgggacacggaggagggcgctgggctgctgtgcggcgggttcgcctccgccacgggccgggcacggcgtcaggggctgcccgggccttgctccccctttcgccgggcgaggacgcgcgaggcggcggcggcggcggcggagcgggctggactaggtccgggatgcagtcccgggtcgggagccccaggccgggcgcgcgggtgtagacctgccccccctcccgcccgcctcctccctcctccctcctcccgccgccgctgcgtggaccccgcttcctgtctgccctccgcgggctccggctgccatggaggaggaagaggaggcgataggcttgctggacaaggttctggaggacgaagatgtgtttctcctggaggagtgcgagctgggaaccccgaccagccccggctcagggtcccccttcctggtggctgtgaaggtgggagcgtgacacgccctgggcgctggggggggccgggccggcgctgccgaaggtgcgcgggagaaatggctgatgcgggcgcagagcgcgcggccgggtggaagccctcggcggagggtcccggccccggcagctgttcccgggggagaggggcgggcctgcctccccgaccggtgtcctcggggcagtggtggccgccccctccaggccagcccagctcagggctccggcggctgtgccaggagtcacctggcgcgcctgtcagcccgagcctcgccgcctccctggagcgggtgggcaggaatcccccgtttccacggcaaccgcaagagaggggccaccctcttcccagccaggagacagggacttggtgtctccgagctgaggcaagagggtgtttgcaaagggcaagagccagaggtcactgagcttccttgaaggaaaagcactgggtcagctgaaggggggagggaacagctggcttggaggctgcagccaggtgggcaggtgcccttcccgaggcgggacaggcagggagcatctgctgggccctggcccacccgctctggggctgacggcgttctctgcagcagtgacccgtcctgtaggagaggttggctcccggtggaactggagggcagtggtggccagaatcccttgaggagcggggcggccccggaaccacgccggctctgtgagtctggcccggcacaccacagcggtcttcctttttctctcctggacacacctctcagagcttccacctcagccttttgctcagctgctctctggttctgtgtcgagaagggaggcccagtgaggatgcgtttcggggagtttgcagactgctaggcgaggctgcctaaccgagtgcccatcggcggggcctagaaggcatgtgcagccagcattgctggggacgggaggctgtccctgaacctctctgggcctccctgcccctcacagaagatggggatcacagtcctgccccacccactctacagtgtggctctgaggaggagccaatggaggtaaaaatagatgcagaaccacgggagatggctgatgtgtgagtatgggtggagcggtggctgcaggcctgggtggggagtggagctgtagggaggctggcagtggctggcaccccaccctgtcttctctgatctggtgctggcgtagggccgtgggggtaagtcacgtctccccgtgggctcagggaggcctctgcacttagggtctgaccagcctccccactaggaacagggtgggaaagtctgctcctgagccaggagtcaggctgggagtagcaatgctgggatgggaggtgtgtggccctcatgggcctcctctgggaagcccccagcacagatgtgggcccactcagaggctgcctcctggacctccccttctgctggaccccggcgtatgcctcagctaagcccgtatttcattctgctcagatgctcagaactctagacatttgcctccgcaattatatcccattctcctggaggaccaggaccatgtcatattcattgctgaacactgcacagtgcttggtgtggggctggtgcctgtgagagtctgcacaatgtgtgaggcccgctggggcccacgaagggtgcaccaggttcccagcctcgctccatctcagaggtgtcctgctgtgtacggcggtggcccacggatgccaagagagcctgagcacgtgtcacacctgaaaacgctgctcctcctgggtccccgtgagcaccgggatggtgtcttcccctctactttgctgccagcatgggggaaggagacctttctcgaatgccggggagttccaggctccctgctccatcctgaacacctctagaattcctccctcctctaccggcattggcctcagagggagaagacaagcaggtggccacagagcggtgggaagaaagctcctggattcattcaacaaacactctcaggttaggtgctcttcagagcaccctgcctggcactgtagagatgacaagaggaacaaggcgtgatcttccctcacaaggcgttcagagcaaggggcaggtacagggagtaggaatagagtacggaagtaggcagggtgggccagatgcggtggcacacgcctgtattcccagcactttgggaggctgaggtgggcggatcacctgaggtcaggagttcgagatcagcctgaccaatatagtgaaaccacatctctactaaaaatacaaaaattagccgggcgtagtggtgggcgtctgtaatcccagctactcaggaggctgaggcaggagaatcgcttgaacctgggaggcagaggttgcagcgagccaagatcatgccactgcattccagcctgggcgacagggtgagactcagtctcaaaaaaaaaaaaaaaaaaaagactgtgagaagagtactgataaaagggcaccaaattcaggggagaagggaccacttctagtggagttggggatggcctggatgcgtgcatgtgtgtgtgtgtgcaggccaagggtcatttctggatgatacactcctgtcctgggctgcagaggttcttggcacacccttccctggcagctagtaggaatccaaggcaattctctttgctattactttactttaggggtacttaccttaagcagcagttgcgttgtgagcatgtgcccaagtgccaggcccataaatcaatcctgtttccagtgtcatttccaagacgcttcatcttcctggggggcagaggtaaagttggctgcagttttctccaaagctatagctggagtttgctgcatatctcagcccagacttacctttgaagagttattgatctgtaaaactggtaatgcaaataaaatactgatagcagcgtcatgttgcatttgtaaaatggcttacacttgccaaaaatgtttcatgccattctatttaaagataggtagggttgtgacgggggcgttgtagaaggtgctattttaaggaacttatttgtcaggaataaaaacccttttgtaatgcagattaaccctttaggtatcattctgtgccatttttttttttcttttgagacagagtctcactctgtcacccaggctggagtgcgatggcacaatcatggctctctgtggcctccacctcccagactcaatcagtcctcccacctcagcctccccctcactacaggcacatgccaccacgttgggctaatttttatatttttgtagagacagggtttcaccatgttgcccatgctagtctgtaactcctgggctcaagcaatctgcccctcttggcctcccaaagtgctgggattacaggagtgagccactgagcccagcccaattctgtgccagtttttaatggatcatctgaaacatctctatttctgtttcacctgcccaggtctcttgtgcctgcacatcatgcctgtatcccccatttggatgtttttctaagtgcgggccccacgtggtgatttgagaaatgatcggtggcacctcgatctatattttgcattttaatggttaagtatatattttaatatatattagaaaaaatatgacctgtacatttttcttacgatttcaaatacgtgtagggtaagactgctttttacaagtcagttcttgggcgcagtggctcatgcctgtaatcccagcactttgggagactgggcgcggtggatcatgaggtcaggagttcaagaccagcctggccaacatggtgaaaccctgtctctactaaaaacacaaaaagtatctgggcgtggtggcgtgcacctgtaatcccaactactcaggaggctgaagcaggagaatcacttgaacccgggagatggaggttgcagtgagccaagatcctgccactgcactccagcctgggtgacacagtgagactctgtctcaaaaaaaaaaaaaaaaaaaaaaagttactgtaaagaacaatattgagtaaagaatagtgcaggtggtggtatgtgagtatggcaaaattttaagggtgggatatgaacaaccaaagtttcaaaacattgcctgtgccctatggtgcctgcctaagacctcagacagcaatagggagcccagaatacggggatccacccttcaggagagaggggccactggaatttggtctttgtcccccagcagttgacccgtcttctctgttctaaattctgccaaggaagcagctgaaagagacttcctcagcgcctagcgctgggagaggagagggtctctcgatgcctctacactgcctcagctgtcctgagactgagatgggccagttgtcctgaggttgatgcttggtgtgggtataagccccaggcacggccacccccacccccaggcccagtggcatctactctgagcagatcctgctgggtactcctggcagccagctgtggcccgtgaactgacttctaccgtctgtgaagcctcagaccctcgctgcatgccctatagccttgagtcgcagccagagagccagccctgcttgttgtcttggaggccagtgctactggagagattgtgtctttgcttggcctggaaccagatgtttggaggctttatttagcctctcaactctgtggaggaccaggcctgagctggccacgccttatctctagacattgttcctaccagagtgacctgacgtctttggtttggcggcttcaagctgccacactgtcagcctagcagattgtgcaggatgctgaggataaacgaacccaccaggactgcatttcacaagttctggctgggaggaagtgaggacaggcagcttcccggtgctggagacaggtaggcagcgtggcagaggctgtgggacctggaactctttagagaactcgctccggagcattctaggcacgtgggcacctctccttcaccttcgtattcccagtgcctggctcccggtgggaatgggtgagtgagtggtgagcctggtttttgatgagacaagagacgccctgcaaagactgaagaaacaatgtgaatttcctcatggctctaaactgggaattgtggagtctgaggaaagctggaaaagatgggagatggaacaggccttcctttggtggtgactgagcaacgggtctcctgttagccaagtgcaccgaggctaatttcccatccgtacgctctccaacgcctttgctccaatctcagccaaaactgcagcgtgaacggggcccagagcaggactcttggggctgactgttgcctcttgagggagggtcttcctgagttgtcttcccatcagaaccagcctttcaagagtggactatgaatggaagtcttgaggggaggatcttgcagaaatgggcgattacagggcttccagggtctatgctcgtgccaggggggatgaagcttgtttgtggctggggctgcaaatccctttcttccccccatcctagtccaaccagctctacagttacagctcacggtgtggcatttgctaaaccctcaggcaaaaccttggttggcagggaacaggagggagtgctagcccccagcacaggggatgagttcccatttgtcaaggctgggaagcagcaggaagacccctgagggtctgacctggaggggctggagctgggggctgttccaggctctgatcttgtcccccggggctacgtgtgctggaggctgtgcaggcctctggcagtcccgactctcggtgcctcaggaagatgataacacctgccaggttttgagactccggtgaattgaaccacaaagatagctaagctcagttcctggaatttgtgaagccgccaataagtaactattgcccttgcctgaagcgtggggtctgtcttgcttttctaatgctgctgaaacaaatcgccacaaacttaagggcttaaaaccacacaaatttattctcttatacagaaatctaaaaaggatctcggcccggctccatggctcacacctgtaatcccagcactttgggaggccgaggcgggcgcatcacctgaggtcaggagtttgagacgagcctggccaacatggtgaaaccccatctctactaaaaatacaaaaattagtgggtgtgatggtggacgcctgtaatcccaggtactcgggaggctgaggcaggagaatcgcttgaacctgggaggcagaggttgcagtgagctgagatcatgccattgcactccagccctgggcgacagagggagactttgtctcaataagtaaatacataaataaatagattaattaaaataaaaaggatctccagggctgcattgcttctggaagctctagggcaagcttttccagcctgcggccatacggcccaggactgctttgaatgtggcccgacacaaatttgtaaactcttaaaacattatatatttttcttttagttcatctgctgtcgttagtgttattgtattttatgtgtggcccaagacagtcgtcttcttccagtgtggctcaggggagccaaaagatcggaagcccctgctctaggggagtgagttcattttattgccatttccagcttccaaaggctctctgcattccttagctcgtggccccatcctctgtcttcaaacctaccagtgtagcatcttccaagcagtccctcaccactaccctgtctccccggccctctcactccccttctgtggccacgatgcctcagggaaagatggcattttaggcagcaggtaaagaacgaaccgaaagctagagacctttgaagatgaggaggctggttctcctgcgtgtgggggagactgagcgatgtcctggctgtgggaaagactggaagggtagggacgggcatccgggccactgcaggtggctcataaaggatatggtgggccccatgtcccagtctagggccgaatctttacttgttttttaaatgtctttccggcagggtgcggtggctcacacctgtaatcccagcactttgggaggccaaggcgggcggatcacgaggtcaggagatcgagaccatcctggctaacacggtgaaatcccggctctactaaaaatacaaaaagttagctgggcgtggtggcgggagcctgtagtcccagctactcgggaggctgaggcaggagaatggcgtgaacccgggaggcggagcttgcagtgagccgagatcgcgccactgcactctagcctgggcgacagagcgagactccgtctctaaaaaaaaaaaaaaaagaaaaaataaatgtctttcccactagagtctaagccacttgagaacaggggccactgtctgtttcccatggtatctatagggcctggtggacattcagtaaatatttattgaatgaataaataaatggacacatagcccagtggaatccccaagtactcgcgttttgcggtattcatactcggtccttggcaagcatcgggcaaggtggcactcttaggagttgaatccagctctggtgtgtgggacaggcaggaggagaggaagagagggaggaaaagtcggttcgagaacccaggtggaaaatagattgagggaagcaaaacgagatgttacaggaggaatatgggtgattgtcttttccttttatatttctgcatgttttgtatattttttataataatatctgacttttatcccctatgaaagtgtcgcttaaaataaaaggaaaggggaaaggggggccgggcgcggtggctcacgcctgtaatcccagcactttgggaggctgaggcggacggatcacctgaggtcaggagttctataccagcctggccaacatggtgaaaccccatctctactaaaaatacaaaaaaaattagtctggcataatggctgggcatggtggctcacacctgtaatcccagcactttgggaggctgaggtgggtggatcacctgaggtcaggagttctatatcagcctggccaacatggtgaaaccccatctctactaaaaatacaaaaattatctgggcatggtggcaggtgcctgtaatcccagctactcgggaggctgaggcaggggaatcactggaacccgggaggcggaggttgcagtgagccgagattgtgccactttacttcagcctaggtgacagagcgagacttcgtctcaaaaaaaaaataaaggtcgggggggaagggcagggaagcagaccgtccacgcagggttttggcctccttgctcatgagctgttggctgtgctttgcgtttgtgcaggtggaagcagggaaaggcctggagatgaggaagctggttctctcggggttcttggccagcgaagagatctacattaaccagctggaagccctgttgctggtgagtacagtccctgctctggggccttccggtccccccgcccgtgttgggtgatgtcatgctctgaagctgcttttggagttggagaggaaaggggaccgtacccgtccctccctgtggacagagtctgcagctggtctgcttctggctgggcatcgggcagcccgggtcattgccagaaagggcctgtgcctctcagctccagctctcaaaaggcaggagaagcacacccggcttagagatggcaaacacacctgtcacccacgaccctggcatagggcatcgtgaacccatcatggtgctctgcctgcctgggcgggggccgagcgccttctccacgctgtgctctgggcagtcattcccaatcaatccagttaagaagtctctgccgtcttgtgtccaagtccttctacctccctgggtgagggaaccgttagtgccatcctgaggccccgtgtcaggaaatatgaggtgggaggctgtgttctttttttttttttttttttttttaagacggagctttgctcttgtcacccaggctggagtgcagtggtgcgatctcggctcactgcaacctctgcctcccgggttcaagtgattctcctgcctcagcctcccgagtggctggaattgcacgtgcacgccaccagtcctggctaatttttgtatttagtagagacaggattttatcatgttggccaggctggtttccaactcctgacctcaggtgatctgcccgccttggcctcccaaagtgctgggattacaggcatgagccactgcgcccggcctgtctgtgttcttttgagaagcggcacagctctgaggcatcaggccaagctcagccctcggtaacatgcctcagttcccctcccagatggaggcatcgttgtgagagtctgattgggaggggaatatgaaaatgttttcggaagataaaagtactacacagatgtgaggtggttttgccttggaagaaagtgctccttagatgtgtctggatgttatgcagagtgatcgtggcgtgtcaatctttcttttgggtattttgcagcctgagacataaggtaattgtcagaaaagggagacgcagaagtgtggatctgtggaagctcattcttaacaagaattctaagatgcacatttaagtacttgccatgacgtgaggtgttgtcacacgtcaaccctgagatgctgtcagtgtcccaggggacttgacatttatgttacccaggaatgactgtgtaaatgtgcaggtgcaggccgggcgccgtggctcagtgcctgtaatcccagcactttgggagccccaggtgggcagatcacttgaggacaggagttcgagaccagcctggccaatgtggtgaaaccttgtctctgctagaaatgcaaaaaaaagccaggcgtggtggtgcatacctgtaatcccagttactcaggaggctgaggcatgagaattgcttgaatctgggggcgaaggtcgtagtgagctgagagtgcgccactgtactccagactggacgacggaagtgaaattcctcaaaaaaaaaggctgggtgcagtggctgacacctgtaatcccagcactttgggaggccgaggtgggtggatcacctgaggtcaggagttcgagaccagcctggccaacatggtgaagccccatctctactaaaaatacaaaaaattagctgggcgtggtggcgggcccctgtaatcccagctactcaggaggctgaggcaggagaatcgcttgaacccgggaggtggaggttgcagtgagccgagtttgcaccattgcactccagccggggcaacaagagtgaaactctgaatgtgcagctgttttgccacacgccaggctgagtacgtcccatctctccaggagtttatctgtgtgtacggagctgttttccaagtgaggggcagtgtggcaggtagctgagggtcctggtctggggccagagctagggcaagacttggccctgccattaagagcaggcgtattgcactgtttctcaaactgtgcctctcagcccatcagtgctttgggttgtgaaatcagtacagtgggttgtgaaaccagtacagtgggttgaaccagcatttttaaaccaatgaaaaaatgtcagcatgcatcatacacgggaaagataagtgagggaactttcggtttgttgtctgtctgtgtgcctgtatatatatgtaattgccgggcccatggtgtcttacacctgttgtgggtttgaaaactgctggctttggccgggcgccgtgtctcaagcctgtaatcccagcactttgggaggctgaggtgggcggatcacaaggtcaggagatccagaccatccttggccaacacggtgaaaccccgtctctactaaaaaagtacaaaaaaaattagccgggcgtggtggcgagcacctgtagtcccagccactcgggaggctgaggcaggagaatggcgtcaacctgggaggcggagcttgcagtgagcagagattgcgccactgcactccagcctgggcgacacagtgagactccatcacaaaaaaaaaaaaaaagaaaagaaaactgctggctttgggcaagccctacataaattccttgagcctccatttctggatctgaagatgagagggatgccattctttctctctctttccatggggttgagaagatcgggagatgctttcgggacctcatacagcgttgagttacttaagacactcaactgttagtggaagaaaggaggacaggcaaagagacaacccgtcagacattcgtgaaacacgtcttccaaaccgtgaattgctgtccaaaaaggaacatagttgtcattactaacagggtgtgtatttgaaaggagttcagacagaggatctagactgcctggccgtactggctccaggctttcagcaggtgaatgagctatcgtgcctcagtttttccatctgcaaactgggtatacaaatagtatgcttttcatggggtcgttgtgaggattaaaggaatttatacacagagttctttttttttttttttttttgagacggagtcttgctctgttgcccaggctggagtgcagtggcacaatctcggctcattataacctccgcctcctgggttcaagccattctcctgtgtcagcttcccaagtagctgagattacaggcacccaccaccacgcccagctaatttttgtatttttagtagagatgagatttcaccatgttggccaggctggtcttgaactcctgacctcaagtgatccgcccgcctcggcctcccaaagtgctgggattacagatgtgagccactgtgtccggcacataaagctcttagaacacagcctgagtgttcgttgacactgttaatttctctattgctgggagaggagacaggttagggcttcgtggtttctgccacaacacacccgttccctgaaggagggagtggcgcctgtccccatcagacacggagcccttagatcccacctgccacccacgagcctcttcctctgggccaagaccaagagcccctccctgctctgcctttctaacagctcatgccccaaaggcagaatctgtggggcaggggcccccttcctgatatgcctggcgcaggttccccccttccccagctgtctcctcccggggcaggttccccccttccccggctctctcctccccgggcaggttccccccttccccagctctctcccggggcaggtttccccccttccccagctgtctcctcctggggcaggttcccccattccccagctctctcctggggcaggtttccccccttccccagctctctcctcccggggcaggttcccccacttcccccagctctctccacccggggcaggttccccccttccccagctctctcctcccggggcaggttcccccccttccccagctctctcctcccggggcgggttccccaccttcccccagctctctcctcctgggcccctgcttggctctttcttgagcagagaccagagggagcaaaggaagaactcgctgggaggccaggtctgtggtaggagggctcaggaagaggagtaggaccctccacagccacagcctcagaagaaaacctcagagtgaaagaatcacacccttcctcctctcctccctgagctgggaacccctgcaccctccccacccctcagctaggaggaagctaaaccttctgctcttcggggtggcctcgcaaaggtgccagcttgaaggagaagaaattcgttccctccatgctcgctttcccactcctgaccccattcccaccgctctgccccagcctgtttgctttcatctgaacacttcctgatatgcaaagggctgggtgtgtgtacctaaaaccatgtgcacacacggggcagacgagcctccacacagaagcctccgtcctggcctctggggtgcttgtgggggtcatcttctggggccctcctgcttcctggtgggctctgattacaggaaaagcctgggagcctgggccgaagtagggggtgaaggaaaaaagatgaagccaactgcattgaaattctggatctccttgacactgggaactgagcttgggaactgtgtcttgctacgctggggccacagggtgaggccactccccagagcccctcccaccgctggccacgactggccctcctggggtggactcctggccacgctgcatcgcaggctctttatctataaaacaggtgaatgaggccttcctccctgggctccagtgacgagtgactcgggtggcatggcagcaagcatgccaggccttctggggcaggaggtggaggaagtgggtacatttctttcccttatttcgaaaggccggtcgctgggggacagagctgacaaacggctatgtgaagtcccactggcaagtgagaaccggcccaggcccgtcttcctgagaagcagctggtatgggagccagggttgaagtcactcacgggtcctctccgagaactcgagtggtgaaatggagagccggggcctgcccttgtccctgcagcaggactggggaggagggggtgcctgagtggtgtgctagcgctttggcagaatggctgtgccgtgccgaagctcagtgtgggtcaccttgcctttcagtccaccctcctgcccctgagcccatacgcaggacttcaccagagacaaataacggcctcgagggtcctggccagccaagggcacacacccagccctgtcccctccccgcgagtgaaatcaggagtaacagccaaggtccccatcgtgtcatgagaaccatctgatgccccaagcgcaggccccgtccttgtgactggctgtgggtgagcgtccatttcttccccttttgcagacggggtgggaagttgaggaggaagcataaccattgtgttttgtcttcgtgtgggtggcagatgagcgcgtcgcggcttctgagaaatcccgtctccttggccttcctgggactgctgaccttcctgcttcccttatttccccctcagtggggactgcgccaaggcggggacaagaattcttgggtatggggattctgtggcgactctgcgggctcctccgtggggtcctgcgttgaggtgaaaaggataaactcttacgacgatgtcaatcctgaagctagttccatgtccctcatggagggtggggagtccccaaagctttcagctcacccacctgggcttggggggacactcttcccttgctcctgcctcccggtgccttctgtttccctgtctggcatgcctctctacgcccccactcctccacctgctcagctctccaaggacctggtatgtgtgcctcctccatgcagccctccaggctactccagcacaaccttggaaccatgtggttggtgcttacagtcagtcgcatcgtccatagtcatttcatctgtgttggcccattttgcccaactggattataaaggtctcagccaggcatggtggctcaacacctgtcatcccagcacttcaagaggccgaggcacgtggatcacttgaagtcaggagtttgagaccagcctgaccaatatggtgaaaccccatatctacaaaaactacaaaaactagctgggcggggtggtggacacctgtaattccagctactcaggaggctgaggcaggagaatcgcttgaacctgggaggcggaggttgcagtgagccgagattgcactattgcactccagcctgggtgacagagtgagactctgtctcaaaaaaaaaaaaaaaaaattgcagtctgggaccatgatcgtgtacgcactgacgggaatgccagtaggtagcgcatggctgtattatcccagtttcacacatgaggctgctggtgacacgaagcccagggatgctgagtgatgtgcgcacagcagagctgcgactcaagcccaccctgcctggcctgcaccaggtggaaccccatgcgcttgcctagcaaggaccagacaccgaggggccgttggttctaggacggcgagggtcagaaggagaggcctgaccggacgcagaggggccgttggttctaggacggtgagggtcagaaggaggggcctgaccggacaccgaggggccattgattctagcacagcgagggtcagaaggagagtcctgactggacactgaggggccgttgtttctagcgcggcgagggtcagaaggagggtcctgctttgtcctgcatggattgttggatctgggctttttagagctcggaggatgaaggagccagaaggcagagcaccatctgggtgtctgagtagatgagacgacttcttccagtgaacatgggttctgtctccatcagagtgaggcgatatatctgagtagatgagacttcatcagaatgaggtgatgtgaggctggagtgaggctgggctgggagtttgccgtggttggctggagctggtggtcgtcgttcagagggagctggcgctggctttggtgttcccttcagtgcagcattttcagcagtggagtcacccattctctgctagaatgcttctcttgtcggaaagctcactacttaatcctatgggggacagctctagtgagcccgaatctgaccccataacttttccccactgttcctgggtctgcagagcaacgtagattaagtctaagcctcgtttttgtttttggagacagagtctggctctgtcacccaggctggagtgcagtggcgcaatcttggctcactgcaacctctgcctcctgagttcaagagattctcctgcctcagcctcctgagtagctgggattacaggtgtgcaccaccacgcccagctaatttttgtagttttagtagagacggggtttcaccatgttggtcagacttgtctcgaactcctggcctcaggtgatctacctgcctcggcctcccaaagtgctaggatgacaggtgtgagccaccgtgaccagccaagtctaagcctctttccacgtggccttcaggtaggtgaagaacatcaacagaatccgacatggctggccgggcgcggtggctcacgcccgtaatcccagcactttgggaggccgaggtgggtggatcacgaggtcaggagatcaagaccatcctggctaacacagtgaaaccccgtctctactaaaaatacaaaaaaaattagccaggcgtggtggcgggcgcctgtagtccctgttacttgggaggctgaggcaggagaatggcgtgaacccgggaggcggagccgagatcgcaccactgcactccagcctgggcgacagagcgagactccgtctccaaaaaaaaaagaattcgacgtggctgctctccctctggccaccctgcccttccctgccacaccttccctgtatggcaggttatcaggccctgtgtcctgcagggcctttgcagtacagcctggtcatctttggtttttttttttctgattattcatattcattcattgtaggtgatttataaaatgcagagaaccacactgaggaaatgcctgcacgtcccgttatcccacggtcccactgctaggctggaaggtgatggcatcagctcccggccagtgctgggggttggtctgtgttatctgccacctcaccgtctacactggcaggccctggagcatcttggtatagacaggcaggcattgagaaagagtctgagactggagacccctgccatgcgcagtgggaaggaccatcacggtcgcttagcaatgtctgccacgggggtgggctgcagtgggggacacgtgaacgcccatgcctctccctgtgccaagtgacgggaacttggaacatcagtgaggccaagactggtcttgagtaacttcgggtccctaccttctgagtcctagaaccacattctgtttcttggaaggaaacagctataggcttgagttccctgtcaaccctcccttccactgaagtgtgacaaggagcttatgactcggggcacaggctatcgtggaagaaagacgcggatcctgttaacccagtacaggctgctgctgagctcagctgcgtggtaggggagtgagcccaggcaccacccctcgggcctggcacagctgccaggccaggttcctgctgtcgagtgtgcggcttgttggggcctgtggcagtggctccttgatacaaagctcgtttcagtgccctgcctttggcagccttgtctgggcaggacttgggcagcgggaagggctaacgatcggccccggggcctgccgacactctggtttgtttacccccgacctctgctctttcttcctctgtttctcccagcccatgaaacccctgaaggccaccgccaccacctcccagcccgtgctcaccatccagcagatcgagaccatcttctacaagatccaggacatctatgagatccacaaggagttctatgacaacctgtgccccaaggtgcaacagtgggacagccaggtcaccatgggccacctcttccagaagctggtgagtctgccagggatggagggtcctcacgcagggcctcagtggagcccatagtgttgcaggagcctcaggagaggaccgggcagccctctcggactccttgaaggcctgagacctctccgagtccgggaggaaggcctgggcctgtgtgttatggggtgcctggggccggggccttgactctaggcctcccctggtgcagccctgggagcttctggggtggtggagacaggctgtgtggataggtccttccaggggtggtggagatgggctgtgtggatgggcacttctgtgggagcaccatctctctcccggagggtgctccttctccctcccggagggtgctccgtctttcccggacggtgctccctctctctcccggagggtgctctgaggaaccagccctggaatgaaggcttcttgctgggcttcagtctcctgtccctcagtgaacagaggggcacatgccgggttaggggcatgaggactgctcccctgagacctcgggtctgtaaaaggaagcagttgggcacactggccgatgatcctctcctgaggtcccaagagcaggaagcactgaagcccagccctgctcaccactgcagggtcgggagcggcaggagtgggtgggttaacatgcagacctcgtgttgggaaacgttcacagaagtcttctggttccctgtgcttctgtgacaccctctcccccagctctgccccatctctggctgtgtcccctggaggacccccaggtcagactcatggagctccctccccacctctgctacgtaacgtctgaccgcccagcaggcaagagggagactgggagtccaggccgcggttcttctctgggtgtgagtggccagaggaccttctcctccttcctgccctgttctctgggtgtgagaggctggaggcctcctcccctcccctgccgtgttctggctgaatggacagggctctgcctttctcacgctggagaagactctccctctcctgcctggacactcctaggacctctagctgagtgtgttcagagctgagctccctgcctccggcgtcacctgctccgcttcctgtctttacctcaccgagtgcttcagactctttctggctgcaccccctcccccacctgtcctgtggactccactttttggccgttgctcacagccgccttttcctcttcttggccacccatggccctcacctggacagctgcgtatcctcctgtgtggctcctgcctccaggcccactcacctcccacccccacctctccttagaggggagagagtcactgaaacctcgacggccccttcagcggatccccacggccctcggatgaaggtcaggctccgaggaatggctcgagagaccctttgcacactgacccgtgtccagccccagccttggcagcttcctccccgcacctctgtgctcctgacactggactttctgttctcagttcccagggcaggcactttcttaactcttggtacttgaggccccgtgtgcctgaaacgtccttccccctctcgtctggcctcccctggtcagttcccagcttagaagggacctcctccaagaaggctttccaagtcgccaaatgcaggccttgtgccagtcctcgtagtgagcactagtaactgcctgactcccccaaaccacaagttccaggaggacggactgcatttcctttttttgttgagacggagtctcactcctgtcgcccaggctggagtgcagtggcgtgatctcggctcactgcaacctcctcctcgcgggttcaagtgattctcctgcctcagcatcccgagtagctgggattacaggcgcccaccatcacacccggctaatttttgtatttttagtagagacggggtttcgccatgtcggccaggctggtctcgaactcctgacctcaggtgatccgcccgcctcggcctcccgaagtgctgggattacaggcgtgagccaccgcgcccggcctgcatttccttcttcttagactcccagaaccagcccagtggtcactgcttgaatgagtgaatgcaccgtgaccttgaccactgggcctcgggagaactcggaagggcatggagggagacgttgcagggcctgagatttctgtcctgagagtcctgtttctccagcacagcttctagagccgtgtcacaaagtgggcttgaatcccagcgctgccagattaaacctgcaactgggcaacttacccaaccgctctgaatcagcttcctcatctgtaaaaaacaggatagtaacagtatttacctcattgggtgattttgaggagttaatatctgaaaactgcatggggctgagtgtggtggctgacgcctgtaatcccagcactttgggaggctgaggctggaagatcacttgaggcttagagttcaagaccagcctgggcaacatagcaagaccctatctctacaaagaaatagaataggcctgactgagcgtggtggctcacgcctgtaatcccagcactttgggaggccggggtgggtggatcgtgaggtcaggagttcgagaccagcctggcctacatggtggaaccccatctctactaaaaatacaaaaaaattagcagggtgtggtggaatgcacctgtagtcccagctactcagggggctgaggcgggagaatcgcttgaacctgggaggcagaggttgcagtgagccaaaaccacaccattgcactccagcctggatgacagactgagactctgtctcaaaaaaaaaaaaaaaaaaaaatggctgggcacagtggctcacgcttataatcccagcaacactttgggaggccaaggtgggcggatcacctgaggtcaggagttcaagaccagcttggccaacatggtgaaaccccgtttctactaaaaatacaaaaattagccgggcatgataacacgcacctgtgatcccagctactactcgggaggctgaggtgggagaatcgcttgaactcgggaggcagaggttgtagtgagccgagatcgtgccactccactccagcctgggcgacaagagcaagactctgtctcaaaaaaagaaatagaatacaataaagtaaaagaaaaagtgcttggaacagggcctggaacatcataaattaataagtactcaataactggtcattatcatcagtgccattattattattattattattattattattattattattattaaattgggaagaggcaccctggaaggtatccttccaagggaatgccacactctggttctagcatacccccccctgctccctccggttcagggatggtgaacacctgtcatcactgcctgctcacctgagctgagtggcctggggggcatcctctcctcatccctcaggagggtagaggagagcaaacctagggttgctggaaacgctgtcacagtttatctttgtcacttggacctggctgtccccggttctggtcttggctccacaggcctggccgtgaatctgctacccaccactttccctccccagcatcgtgaaccgatgcctgaggcccctggggctgcagatttgggagggcccggggggagccgggtcaggtctggcatccggaggtggtttattttcagccgaagactctgggtatttgattattcgttactgagagaagggaattagcgtctctgctgtttgttttatgagatcactccagtgccaggctgctgtttccaggcaacctgcacttcccagttaatgaacctgccaagccaggcctcgggccctaccgcctggggtgactgtggcagcggcagtccctgagattaccgtgaccctggacgcaggcctccgcacggctggctcctgcccctggctcctgggagggtggtgtgccaacccgggcctccaggctttctccttcttgtgggaaagggggcaagaggagccttttcctggaagaatatcggtgatctgactttggcttaggcagcgactgtctagtatgcctcgtgtagcgtgggcattgatgggccgggcctcagtactccctggaaaaggaaataaactccctcccgtccggccccgcccccttttaaggtcaggccccaccccctttaaaactcaggccccgccctcttttaaaagtccggccctgcccccttttaaagtcctgcccttctgcagctgagacctgaatgcctctggccttggcgtcacgccgggcgtccccactcgcgctcccctctggcttttccagatgccccccgctcccctgccccaccagcttcctcaaagggctctgcctctgtactgggaggctccaggctcagccgatgctgcggccagcctgcccccacccctacccccaccccagcctctctgggtccttggggagcatgaggatcctgcagaaagcagagtggtccggggtgggggtccacagcagcccacttcccccagcaccttggtgggaagcagaggcccctgaggaagccaggcagcagctgtatcccccttgctgctgtattgaaaaacatttaaaccagaaactccaaagaataacagcagaaccttctaatgaagaaaatacagcgtcacacatgaaggtggagtctcccctccctcctccctcttgaagcagctactggcatgaatttggtggatagccttccagactgcagtttgtgtgtttactacatatctgtatctattttgggttggcctgtactttaaaaaaaaaaaaaggtcttgctatgttgtccaggctggacttgaactcgggctcaagtgatcctcccacctcagtctcccaagtagcgagggctataggtgtgtgtaccacagctcccagctgcatgtactttaaaaatgtgtctaagccaggcgtggtggctcacgcccgtaatcccagcactttgggaggcggaggcgggtggatcacctgaggtcaggagttcaagaccagcctgaccaatatgacgaaaccctgtctctactaaaaatacaaaaactagccgggtgtggtggtgcgtgcctgtagtcccagttagtcaggaggctgaggcaggagaatcacttgaacccaggaggcggagtttgcagtgagccaagatcgtgccagtgcactccggcctggttgacagagcgagactccatctcaaaaaaaaaaaaaaaagtgtataagtatacacatatatcatattttacagttcaacccatgttcgttttggagcttgtcagcaatcgtattttacagttcaacccatgttcgttttggagcttgtcagcaatgctatgtgtaaatcgggtgcatccatgttcatggctgtgtgcgcggcttcccccgtttgtgagcatttgttaccagtccctccactatgaggaggaaaagtgagatggtgaacacccttgagtcccctggggcacacacataggccatttgctccagagcactgctgtctaatggaaatagcttatgagccacgtacatcatttcacattttctaatacccaccttttttttgtttttttgagacggggtcttgctcttgtcacccaggctggagtgcagtgatgcaatctgggctcactgcaacctccacctcctgggttcaagcgattctcctgccttgtcctcccaagtagctgggactacagatgcgtgccaccacgcccggataattttgtatctttagtggagacagggtttcaccattttggccaggctggtctcgaactgccaaccttaggtgatctgcccgcctcggcctcccaaagtgctgggattacagttgtgagccaccgcgcctggcccctaatacccacatttttaaaagtaaaaataggcaggtgaaattaattttgagaatatcttttatttattcccgcagatccaaatattatttgaacatgtaatcagtatttaaaaattaacgaggtaatttacattctcttttacatactaaggctttggaacccactgtgtattttacatgtccggcacgtctcagtttgaaccggccgtatctcaggtgcttggtagcctcaggtagctggtggcgactgcactgaacgatacggctctgcagtttgtatgtaaaagtggatttgctaagcaatcgatgggctgtgcctatccacactgttattagttcaactgaaaataggccatgcctattctcagctttattagttattaacaaattgctctccaaataattgtactaatttacacttccccgagtagtctaagagtttaaattggccgggcgcggtggctcacgcctgtaatcccagcactttgggaggccgaggcgggtggatcacgaggtcaggagatcgacaccatcctggctaacatggtgaaaccccgtctctactaaaaaaaaatacaaaaaattagcctggcgtggtggcgggcgcctgtagtcccaaccactcaggaggctgaggcaggagaatggcgcgaacctgggaggtggagcttgtagtgagccgagatggcatcactgcattccagcctgggtgacagagcgagactccatctcaaaaaaaaaaaaaaaaaaaagttttaattggccgggcgcagtggctcacacctgtaatcccagcactttgggaggccgaggcaggtggatcacctgaggttgggagtttgagaccagcctgaccaatatggagaaacgccgtctctactaaaaatacaagattagccaggcgtggtggcgggcgcctgtaacgccagctactcgggaggctgaggcaggagaatcccttgaatccgggaggttgcggtgagccgagatcgcaccactgtactgcagcctgggcaacaagagcgaaactccatctcaaaacaaaaacaaaaacagggagtttaaatttccccatatgcttgccagccgttgctgtcaattagacttttaaattttgacccttctgatgagtataaaatatctcgtgatggctttaatttgaatttctaccctttggtcccttaagaggaagtgcttatatacagcgcagcgaagcctttccataaatatttggggaattgacttatggagcctcggtttccccttttgcagaaaggggcgatggggtctgccctgcctctcagaagaggcgaggctctgtgtggttgtgactcaggttgtgactgtgtgagtgacaggcaaacgtgtagtgaggctggggctttggctccttggaggtagaggaggtggaagaggtgaggacggggcctcaaggccaagggaaatggaaagacagcatcttcatttgttgttttgttttctttttgagacggagtcttactctgtcacccaggctggagtgcagtgacacgatcttggttcactgcagcctccacctcttgggttcaagcgattctcctgcctcattctcctgagtacctgggattacaggcacgcgccaccatgcccagctaatttttgtatttttagtagagacggggtttcgccatgttggccaggctggtctggaactcctgacctcaggcctcccaaagtgctggggttacaggcgtgagccgccacgcccggccaagacagcacctttaaatgtcgttccccacgctgcacgtggggagggaggcctgagcaggccacacgtgccagctccccccagcacacacacccccctctctccctgctccggctaattccaggatgtgaaggaagtatgagacattaagggatttcaaaccctgggagaccttcaccgtgctgaggaaagctggatgctgtgaagagttgaatttctagcaggccaacaaaggccctagcctggtctccccaaccccagaccccctcattaaccttattggctgagctggtttccatggaaactgtccagttcaaagggacactgtaatatgttcatccctgcgtttccccaagttcccaacgagctgagtgagaggttttcagtgcaggggagctcccggtgctccgtgaagctttcatccattcattaatcctctcccctcccaccctcctctccctctgttccctgactcctccctgcaggccagccagctcggtgtgtacaaagcgtttgtcgataactataaagtcgctctggagacagctgagaagtgcagccagtccaacaaccagttccagaagatctcag

SEQ ID NO: 15351 - DNA, 33497 bp, Homo sapiens
actataaagtcgctctggagacagctgagaagtgcagccagtccaacaaccagttccagaagatctcagaggtaggccgctccccacatagccaccctgagggacaaggagctttgggggctgctcagagcccttggtctcccctccctcgcttgccagtcggtgaagtggttactctaatgggtaacacttagcctgatatttgctttcttgcacctgacattttccctcttaatagaaaacgatctattttatttatttttttattattctctttcagattagagagaggaacaggggaggcaaaaaaaaaaaaaaaaaaaaaaaatccaaggcagtgttctcccacaccacactatggtgaccttgagcaagtcacgtcccccctcttggcttttatgtcctgtccggtagaatgaggggtttagaaatggccagataatccttttttttttttttttttttttgagacagagtcttgctctgtcgcccaggctggagtgcagtggcgcggtctcggctcactgcaacctctaccccctgggttcaagtgattctcctgcctcagcctcccaagtagctgggattacaggcgcacaccaccacgcctggctaaggtttgtatttttagtagagatgaggttttgccgtgttggccaggctggtctcgaactcgggtgatgtgcccgtctcagcctcccaaagtgctgacattacaggtgcgagccactgagtccagcttggccagctaatcctgaccttgcttgataagaatcactggggcattgtttaaaacacagatttcctggcaccttccccggagcttctgattcagaaggctttgcgtggggcccaagattctatatttgaacaagcttctgggtaatatttatgacagggaagtcttgaggaaatttggactataggtcgtcttttaaggttcttgccaactctaagactgccatcccataaacacaaaaagggtaagagccacttatgtggagaaggagccttagaatccctggccgggaacacgcgtgcttctgctcctgaggcccagccttcctggccaggaacacgcgtgcttctgctcctgaggcccagcctacctggccgggagcacacgtgcttctgctcctgaggcccagccttcctggctgggaacacgcgtgcttctgctcctgaggcccagccttcctcccgcactcctccacagggcagaggtgcagtcctatctgccatcaacatttctacctaagaggtggcatggagggacagttgcttaggatccttcaggacagagcccagttcatccctttgtccaaaaagacctcagtggcacccctgaagcactggcctgagaggaacagcccccagctcagggcaagagaacctccatcctagaaaaggggagaagcttctgcagttttgggagtcctgccgtaaaggcccctcttggccctttgtgttcccgtctcagctctaacgctagaagagttggggaaacgcagggtagttttcctgaaacttcaggggtgacggtcgatgcccacgtttagaatccaccgagaggcagcagagaagctgacagttggagatgaacatgtcaccttcattactgttaaaaaaatgcagcttggaaaatgtggatttggatctgtagccacagtgggcttgctgacacttcgcctctggaatgaaacgtacctatagaagccgggcgtggcggctcacacctgtcatcccagcactttgggaggccgaggcgggcggatcacctgaggtcaggagtttgagaccagcctggccaacgtggcgaaacgccgtctctactaaagatacaaaaattagccgggcgtggtggtgcacacttgtaatcccagctatttgggaggctgagacaggagaatctcttgaacccgggaggtggaggttgcagtgagctgcgatcacgccactgcactccagtctggtgacagagcgagaccctgtctggaaaaaaaaaagtatctattgagtcccttgcaggaataggaaaacacaggcccctctccacaatgaggacagagcccacgcctcttacccagtgtgcagagagaggatggctgaccatagtttcttctcccagacccatggagcagatgtgtcaccctctgcctgggaggacgaagtgcagggtggggaagtccctctccatggagtcaagtggctggagaggccaggtgcagtggctcacgcctgtaatcccagcactttgggaggccgaggcgggagattggcttgagcccaggagttcaagaccggcctgggaaacatggtgaaaccccgtctctattaaaaatacaaataaaaggggctggagaaatggtgctttccctgcggtttccagcccaacccaggaactacctggactcccctggtctgtgttcagatcagccctgccaaggccgcccaagatcccggggtcagacatggtgcagagagtgtggggtcttctcttggcctgggctgattgcctgttctctgtgcctaggcagaaacccccacacccaaccataagcccctcacagcctgcccaccctggagggcagagccaggcccctggctttctgccaggtggcttctcatcctgactcactcgatgacgtgcttgcttcctgctgaggctgccacttaattactgcaattaggctcctctctgcagcaggagtgatttcataccctagacttcactggagggggcgtgaggaaacattcccgaaatctgggagtccaggcaccagccagagacacaggctggggacgctgagtatcccccacccccccgccccccaaaatatacacacacccaagctccatctccaggagttttctctgtctagaaacagcttgagacagaagtaggaagttcctgctgtctgagcgcttcctcccctgcagaccaagcaggtggcatcacctcggcagctgaccttggcctcatcacctgggcagctgaccttggcctcatcacctgggcacctgaccctggcctcatcacctgggcacctgaccgtggcctcaccttgcctcctgccttccctcccacacccctctttgaggctccgtgtgctccgtctgccaagtggggatggtattacagctccagttgcaggctgcactgtcctgttagcaaaagctggggctggaacgtctctaaaggaggataaagaggcttggagcagatgagtcatcccgggggtctttccagtactcactacctgctgcctggcttgggatccaggaggggcattggctgttcctccctcgaagcttcctctcggacccccagcatgggcagtggtgggtggggagtgtcgggggtgctgggggctgagtaagtgctctctgatgggggtaggatgcagctcactgtcctggggagctcagcatctctgccgaaggtccaccacttccctgctggcgtgtgggacccttccttcctacctcatgggttcctcatgccctaaagattggctggagtacctggcgctggtcaactcaaaccctgtctgcccttggccgacgtgtagggttcctgagtcggggttcctgtaatcacagggctccctgccagcctctctcatctctgggacctggagtcccttccttcttgcccacgccccagccactggactccacgaggctccaggagttcacaggtgtggtgcaggggattggggtggcagaggcagcccatggccatggggctcctttgtctttctttttttttttttttttttttttttttttttttttttttgagacagagtctcgccctgttgcccaggctggagtgcaatggtgtgatcttggctcactgcaacctccgcctcccaggttcaagcgattctcctgccccagcctcccaagtagctgggattacaggcacctgacaccacacctggctaacttttgtatttttagtagagatggggtttcaccgtgttgaccaggctggtctcgaacttccgacctcaggtgatccgcccaccacggcctctcaaagtgctgggatgactggcgtgagccgccacacccggcctctgttctcatatgtacaccctgagtttcagaactccccttcttgccaggctcacagtgggggctgggagaggtgagggacagaacaggccatgactcctctcctccctttggcaggaactcaaagtgaaaggtcccaaggactccaaggacagccacacgtctgtcaccatggaaggtacctcggggagcgggctggattacaggcacctacctttgtctggctgtgcaggcaacaggctgcgtgaacgcggcgcccttccccttgtgtgtgcgtgtgtgtgagcgcgtgtgagcgtgagcgtgtgtgagcgcgtgtgagtgtgagctgagtgcgcgtgtgcgcgcacgcgaggactctagcctcgtgcccaggcagccagccagctacaaacgtgctcctctttaggatgccagcaggctgctggctccctccctccctacccctcctccccttccccttccctcctctcctcgccacgcgcctccctcccctcccccttgctggaagagcactccggagcggctgcccgatgctggagtccgtgcggcagcatcagcaaggtggctgagtggccgggctgctggtgggcgccggggagcctggagcgatggctgcacgctcccgccgcggggacagaggctgccatggagattctcctcattattcgcttctgctgtaactgcacctatggtaacccaggtgctcgctgtgggaggtggcggaccctcccacctctgggggccggctggagtgggcttagatgtggccggggaggttagagggccgcagggaaggagggtgggcgagcggctggacctgaattcccccttcgttttggcggcatccagcctagagttgaaacctgggggctgctcagagcagggccgcttgcaaatggaaggaccaggctggaggggtccaggtggccccgaggatcggtggggaattggtgggctagtgtgagagaacttcctggaggggctgttagggagagacggcgacgagctgtgcccgcagacgtagtagccctgaggccagggagagggtctgcgggggccaggcacagcgtggcgatgggtggcgatggtccggacggcggcgttgccagccgagagggtgccagcgcgagccagagggagaagttgggagtttctttgtttctggagagaggcgcggaggctgggcggcacggtattgtgtgctccgcgcacatgcagcagtaggcggaggacacggaggggctgtgggagcaggaaggagaggtttgtttccagccgtgagagacccccagccgaggtctgggccctcaactgtggaaggcaggtcggcagggccagcgggagaggggtgtggcaagctactctgtgaaggtcacacacacacacacacacacacacaccacctttcggtggaagggacccggaccatcctccttgcagctcccgcagctggctgggggctggggggaagtcccgggacaggtgcatgtcatcaacacgactgtcggtcgtaggaggatgaagccggcccaggtagggaggtgtccagaagcccgtggaccctgcctcaagaggcaagacgtgccaaggggtgccctgcctgcctgtggcagggagtggggtgggcacgtgtggctcccaggccggctgctctgggcctgagtctgtgggagcagcaggcggctggttttaggaccttcctcttccttcccaccaggtgtttcggctctgcacccttctcagtcactttgctttcctatctccctggtaacctggagctccttggagctccttgtcgaaggctgacttgagggggatggtggcttgccggaagagagatggcaggtttcctgggctccttcccaggggcggctgtgctggaggggctgtgtggggccagtgccccctgaccttctcaggaccctcttgatggaagcaagctctgaggcagcctctctcctgcggcccagcagggcggctgcaggaaccctgttctcacttgaaattggcctggtcagcgatcagaggagaaatggtctttttggtctggcctaggagttggtcaggtcttgactctgcctccctgaaaaggaaacgtacccttggcttcctctcccttccccaaaaggaagcttcgactcagtgaaacggacctgggacctggagttcacgttgcttcggtctccgtgatactgttgttgaagtcggcttcaaagtggggaatgaggagtgaaagggccagctcgtgaggagggggctcaccccatcctggtcactctttccaagaacgctcctgtggttcattgaggttttacaggtgctgcctttccctgaagaaggtgcagctcaaagcaaggagtgcgggtggatctacccagctcccaccacttgtagccacaagtctctggcctcagttgccttgtctgtaaaatggggctagtgagaattgcttcccgttttaatcacaggaaataatgagagcaaagcagttaactcagtacccttgggcacagagcgagtacccagcaaactagagagagaccagcttgctgcccaagtcagtgtcagtggagagggagagtgggtgaggccgggcaggaagcaggccagcctgcaggagcccagggacaggggaagggccagagcgagtgcctcaccctgagttctcaggggaccccagcgtgcaggggccgtggggagcacaaacttcagggccgctcttattcccccggttccctccgtatctgatgtggtcccagtgccgccaccccccccacccccaccccccccgtgcacctgccctcctggccgcccttccagggctcattccacagccttactcaggtggactctggaggtgaccacagacatgttaataacccctctgaaacccaacctgccatgtgttcagacctctgagcttagtcagaaacctcttcctcttgggacccaagagagggctgcggggagccgataatgcagtgtcagctttctgtggagccgccactccggagcccaccctggcaggtgtctgctgagcttgtgctttcttttgggtctctggggttctccagtgtgattttttccccctgaagatgggctgagccacaggtgggtgccttaaacagcctcagaaatggatcccacctgagctaggacctgggctgcaccctcagtgccgaggataccccaagactggcctcattccttcaagcttccatggcccatggggagggtctctggaaactgctagataagaaagggctacagatatgtcatatgaagtgtatttacgtaaaccagtggttggccgggtactcatgcctgtaatcccaacttttggcagactgaggcaggaggattgcttgaggccaggagttcgagaccagcttgtatttggcttgaggccaggagttcgagaccagcaacatagtgagaccttgtctctatatttatttttatttaaacgaagactcactgtgtcgcccaggctggagtgcaatggcgcaatctcagctcactgcaacctctgcctcctggattcaagagattcccctgcctcagcctcccaagtagttgggattataggcgcctgccaccacacctggctaatttttgtatttttagtagagatggggtttcaccatgttggccaggctgttcttgaactcctgacctcaaatgatccacccgcttcggcctcccaaagtgctgggattacaggcgtgagccaccctgcccggcccctcgtctctatatttttaaaaaaattaaaataaatacataaataaaacataaagcagtggttttcaaccattattatacattcaaatcagtaaagaagctttatagaaatgctgatggcccttgtggtcttgcagagatttgggttgagttgacggggctggggagcagcatctgtatcttttaaccgctcccccagtgattccgacaggcagccaagctcggactgcgggtaaggctggtggccctgctgaggctgcattttcttcacagccagcagattgctccctgaagtgtctgcttagccgcgcacggggtatttatatctcaggctttggagaactatcaggtttggggcccggctagggcgtgcgtgttcacgctgggacctgtcacaacctggtcttatgggacacccagtctgggatccttcttcccagatgaccaacctgcctctgtcactgcccctgcggcaggaggcccaaggtcatgaccccagggacagagcatccaggtgcaggactgaagctgagcctcctgttgggagggtgggcgcagccgcgtacaggaagggtgttgggaagtgttgatccaccagctgccacctccacctgtccctgctgaatcccagccatcctcacttggtgtccgggttgtggagggtgtggctcttgggggcctgggctggccttgcctgcgtcctcccagcctctttggggctctcatatgtgaggcctaacctgagttgcttcaggaaacctttgcccctcaggctgccacgtgtttgagagcacagccttttttctttttttttgagatggagttttgctcttgttacccaggctggagtgcagtggcatgatcttggctcgctacaacttccgcctcccgggttcaagtgatttccctgcctcagcctcccaaatagctgggattacaggcatgtgccaccacgcctggctaatttttgtatttttaatagagatggggtttcactggttggccaggctggcctcggggagcagagcctttctgtggagatcaggccagcctcctggcctccagcctccctgcctccagccttcctgtgctttgctatctggggtttgaggatgtggggaggggtctttcctctgagagatgaggccagtcctgtggatcacagtgaggcatgccaatcccagctggctgtgcctggccttcagctccaggagcctgagaatgataaggtctggagagctgcccttcctggaaacacagcatgtctccttcccccattctggggtcctgcatgtggcaggtgtgctagactctgcagggcatggctgggtggagctgtgtgattctggggttctgcgtgtggcaggtatgctggactctgcggggcgtggctgggtggagctgtgtgattctggggtcctgcatgtggcaggtgtgctagactctgcagggcatggctgggtggagctgtgtgattctggggttctgcgtgtggcaggtgtgctggactctacggggcgtggctgggtggagctgtgtgattctggggtcctgcgtgtggcaggtgtgctagactctgcggggcgtggctgggtggagctgtgtgattctggggtcctgcgtgtggcaggtgtgctggactcttcggggcgtggctgggtggagctgtgtgattctggggtcctgcgtgtggcaggtgtgctggactcttcggggcgtggctgggtggagctgtgtgattcagggctgggggtccaggagagcatctgccttgagccaggtgaggccaggacaggcctggggaggggggcggggcggctctcgatgaagccatgtctgatgggagaggaggcagggctgcggagggagcaggggctgccagggctgtgtgtcacctgtgtctgctgtttggtcggcccggggagtgagaacagaggtgggggctgccgtgggctcactctggtgtccctcgaggggtgttcacgtgggaagcatgcgggtggggggacgaagctggtctctggggtgttgggttgccctcgtccatcatcctcttcctccttctccctgtctcccccgacagctctgctctacaagcccattgaccgggtcactcggagcaccctagtcctacacgtgagtgtcaagcctccgaatggccagagagggcttaggagttcagtggaagactgagcctgggtgagagggtgctggagtcaccgagaacagtccacctggggaatcaggggttcctaggctccaaggatgcctgtctggcccgcggtatccatgccgccaggctagggcctgaatacagcttggctactaagcttgacgtggccaggtgctcccggggaggcaggcattcctgcttccccacccgctgcctcctggtctccagtgtccttggagcagctgcagggcagacacagggtttctctcccagctgctcggggggatgagcctccacctggtctccacactggggagagagtatgactgtggccaggagaagagggggcagccagggccctctcccctgctgtgctggctctgattttttttttttttttttttttttgaggcggagtctcactctgtcacccaggctggagtgcagtggtgcgatctcggctcactgcaacctctgcctcctgggttcaagcaattctcctgcctcagcctcccgagtagctgggactacaggcgcccgccaccacgcccagctaatttttatatttttactagagatggggtttcaccacgttgcccaggctggtctcgaacttctgacctcaagagatcccccgcctcggcctcccaaagtgctgggatttcaggcatgagccgccgtgcccggcctgactctgatttgtagttcagattttgcgggaattaggcaggtccctgagtgcccaccctttggatggggactgagcactccccggtggccacacatcaggccccagagccgctcccctcaactcaccgcctcacccttcccaggacctgctgaagcacacacctgtggaccaccccgactacccgctgctgcaggatgccctccgcatctcccagaacttcctgtccagcatcaacgaggacatcgacccccgccggactgcagtgacaacgcccaagggggaggtgagctcagagcccggcacggcccctcacccaggctgagaagtatcaggtccctcgtccccttctctcacacacgggcggcaggtccctcgtccccttctctcacacacgggcggcaggtccctcgtccccttctctcacacacgggcggcaggtccctcgtccccttctctcacacacgggcggcaggtccctcgtccccttctctcacacacgggcggcaggtccctcgtccccttctctcacacacgggcggcaccgggtgcctcctgcctctccaatcctgatcccccattcccagccaaggagaggttttcagcccttggtcaccctgatgacctgcagctttccaggccctaggctgagaagtttaagtccagtgtctcattaatcctcataataatctagggaggccgggcacggtggctcacacctgtaatcccagcactttgggaggctgaggcaggtggatcacttgagttagaagtttgagaccagcctggccaacatggtgaagccccgtctttactaaaaatacaaaaattagctgggcgtggtggcggatgcctgtagtgccagctactcaggaggctgaggcaggagaattgcttgaacccaggaggcggaggttacagtgagccgagatcgcaccactgcactccagcctgggtgacagagtgagactccatctcagaaataataataacaatccagtgagccagaagaacctgaggctggggagtctctccaggtccaccacgcagtctttcagccactggtgtcagagctggattcctcacctgggactgtctggaggcccacgccggggaagtggcctccgggtgcctcattcttgaatgcagacacctgcctctggccagtgtgatgccgtcagggtctcctaggaagcgaagggagcaggagcttggagctgcttcagctcggcctgcacacgcagtggcttgcggggagcccacagcaggaaaggctggcgttggaggtggtggaggccgtccaggttgccggaatgtccagtgggcacctgcatgtgggacagccgttccctgggggcccttcttgatgcaagggtggggacagcccagcaaggggagtaccaggaagcatgagagggacagttgccttcgtggattggcagccgggcccgggtgaaaggcttcctgtccaggggaggccattaggcggccgttacgagtgaggctgacagggtgtctgctcctgtggtctgtttacgagcccccagggtctcctggggagaaagtggtgagggacaggcctggacagtgtccactgggcagagagagccgattccgtgcggctcctggtgctgatgtgcagcgtctggggatcccgtcgtctgttttactctggggatatctgaaaaatctccagagggcttagcgtaccctccgttttcagtcatcctttttttgagactgaatctcattccatcgtccaggctggagtgcaatggcgtgacctcagctccactgcagcctccaccctctgggttcaagcaattctcctgcctcatcctcccaagtagctgagattacaggcaggcgtcaccatgtctggctagtttttgtatttttagtagagacggggtttcgccacgttggccaggctggtctcaaactcctgacctcaggtgatccacccgcctcagcctcccaaattgctgggatgacaggtgtgaaccactgcgcccggcctcggtcatcttaattgtatactttgaatacgctcacctacgtattacagcagatgtaggtcacaccgtgtatcatacaggaaaggctggcacagatggggacgaccccccggctctgagcgggggttggaaactctggaactcccacgtggagcagaaaccacccagagcccaggttagagttggctgcaggtcccctctgggcactgctgcagtcccaggctggagggcccaggtctcatccccagggggctggagaagccagggaggagtagcacagacaggcctgagtgggtctcgggtctcgggtctcggttgagccggggctagatgaagttcgccgccgcggtcgggagggattgcaaacggggatgttcgtgccccagggtggagaaaccaggtcgtcccgggcagggggctccagggttagccgcggagagccccgtgcgttgcacacacttaatgtgccaggcactgtgctgtttcacatgcaccatctcgatgagtcaccttatgaggcagacctcactgtccgcacttaacagaaggtgaatctgggattcagagaggtcagggagcctgtctgagatcacagctgagaagcctgttggcattcaaacccatgcccatgtgactccaaaggcagtgcttgaaccacctttggttaagggatgacaggctatgccgcctctcggtccagtcctccctggctggccgtgcccccgtgtgcaggctctgccctcggccgcattcccctctgagcaggctggggggtctgccatctccctcagacgcgacagctggtgaaggacggcttcctggtggaagtgtcagagagctcccggaagctgcggcacgtcttcctctttacagatgtcctactgtgtgccaagctgaagaagacctctgcagggtgagtgtgtgagtccaggggcacggggcgggggagggggtccggacctctgcggggtgagtgtgcgagtccggggcgggggagggggtcctgacctctgcggggtgagtgtgcgagtccaggggcgggggagggggtccggacctctgcgaggtgagtgtgtgagtccaggggcgggggagggggtcctgacctctgcggggtgagtgtgtgagtccagtggcacagggcgggggagggaggccggaccctgccacccatggagccttcagcaactttgttggttttttttcttttgagacagggtcttgctctgttgcccaggctggagtgcagtggtgcgatctcggctcactgcaacctctgcctcccgggttcaagcgattttcctgcctcagcctcctgagtagctgggattacaggtgcacgccaccatgccaccatgtctggctaatttttgtatttttagtagagacggggttttgccatgttggccaggctgatctcaaactcccaacctcaggtgatctgcccgcctcggcctcccaaagtgctgggattacaggcatgagccaccgcgcctggccggttttttccttttaaaaactatattaattaacttaatttcactacatagccttttttcctgaaagtaagtcatgtttttaattataaagataatataaggccattggaggaaaccccgtcccccactgaagcatgaggtccgactcctgccgcgctgcttccttccctgtttttaaatgttctcatgtttcttcacacagtcgtaatcactgtgaatgcccaatttggggctctgctgtttctgtttcgtgtcataagcattttccctgttgctgcctcatcttcataatcatccttttactttcctgcacgatgttacccgtagatgtgccatcgtctacttaagcattctccttttattagacatctctgaatttctgctaactgcagtgctgtgaatattcaccacgtctcctgctactatttattgagggtttatgccatgccaggtgccgtgacacatgctttgaatacatgatttctagtcctcccaacacctccacaaagtagcgactgttgttccctaatcatagatgagagaggagtcttggagaaggtaaataagcagcccaagctcgcacagctagaggcacaggtgggactggaaccccaagctgacgtgcaaactcctttgagcctccttctctctacccgggagggtgggactggaaccccaagctgatgtgcaagctcctttgagcctccttctctctacccgggagtgtgggtctgctctgtgccttgagcagaggctcattctgcgttcattcacacattcttccacccacacttagtgatcaactgcagtgtgccaagcacaccccttctcacggctgagaagcggcagtctggattcaaacccgtgtctgtgggactcgtttaccatcaggctatcttgcctctcccttcagccctccctggttggctgtgcccccaagtacagcacaggggactccacagccagtgtgttacaccaccaggctatcctacctctcccttcagccctccctggctggctgtgcccccaagtatagctcagggggagcaagccccacgcccacctcaacactcaagggtcagaatgagaagtgcaaatctaagtcctaggggaaggatcgatgattatgaacgtcaataaagggatgactgggcgggcacggtggcttatgcctgtaatcccagcactttgggaggccaaggcgggtggatcacctgaggtcaggagtttgagaccagcctggccaacatggcaaaactccgtctctactgaaagtacaaaaattagctgggtgtgatggcaggcacctataatcccagctacttgggagaatgaggtgggagaatcgcttgaaccctggaggcagaggttggagtgagtggagatcgcgccattgcactccagcctgggaacaagagcaaaactccatctcacaaaataaaaataatttaaaaaataataataataaaggacatgactccctggaactagatcatgtttgagatagttctgaggcagagatggcaataataagcacacatgcttctgcctgtcgtcctttgcgatggcagacattactaatcacatatgcctctgcctgctgtcctttgccatggcagacatcactaatcaactagggcacactttcttgctagacttggatgtggctttgtaatcctccacccagtgttgacccatgtgaccactcttgataagaggtggcatttggaataacacctgtattccattgctagcctgaaggatattgaacacggatagtctagaagggagggaggggattgtggtggggaataggaaaatgtgagcccagccaggaaggcttcgctcttcttgatacctaagtggtttgggatgtttgacaacatgagtcatctgggccagaagcctggtaaggtgaaggggcggagttgctccctgcgggcggggcggaccccagaacccagctttcatcactccagtgtgtgtttcccaatcaggctcctcaggagcagggatcgttcttgcttctggcgagttctcagtcaacccctgtcagtggttctgtggttctggacccaagagttgaggctggaagagccaggctccctctggctcatggctccctctggctcgtttgcaggaagcaccagcagtatgactgtaagtggtacatccccctggccgacctggtgtttccatcccccgaggagtctgaggccagcccccaggtgcaccccttcccagaccatgagctggaggacatgaagatgaagatctctgccctcaagagtgaaatccagaaggaggtgagcagagcttggtatctgagcctggggccctttgagccagctgtgttgggggaggtggaggcaggaagttgtaaggtttgagactttgagagggagccttgagtgtgtagttactaagggaaagaccccgactacagtagctccaagcagatcgagggggtcagtgctcaggatttcatagggctaacatgggaagtgccctggaaagcagtgcatgttgaacacgatagaaaggggaagcaagtagccaggcgcagtggctcacacctgtaatcccagcactttggaaggccgaggcaggtggatcacctgaggccaggagttcgagaccagcctggccaacatggcaaaaccctgtctctactaaaagtacaaaaattagcagagtgtggtggtgggcacctgtaatcccagctactcgggaggctgaggcagtagaatggcttgaacccgggaggtggaggttgcagtgagccaagaacatgccaatgcactccagtctaggcaatagagtgagattctgtcaaaaacaaaaaaaaaaagtggaggtagagggaagcaagagaagaaaaagcaggcttttgtaaggaaaagcaggacctgtgcaaggaaaaggacctgggaggcctctcagaaactgacagatcaagtaggcaaataaataaggagagagaggacctgaatgccacaattaacatgcttgacttaaaaatgcagagaagcttgtgccctgacagaaaactgagattcttgtcacacacgtttgggaccttcacatttatcctataataggccactaaggaaatctcaaaatttttctgcaagttgatagcatacaagtcatgttcacagaccacagtggagtaaaattagaagtgaacaagaatattggtcagcctgggtgcagtggctcacacctttaatcccagaactttgggaggctgaggatggtggatcgcctgaggtcaggaattcaagatcagcctggccaacatggtaaaaatccatctctactaaaaatacaaaattatccaggcgtggtggatcatgcctgtaatcccagcactttaggaggcccaggcaggcaggtcacctgaggtcaggagtttgagaccagcctggccaacatggtgaaaccccatttctactgaaaatacaaaattagcctggcgtggtggcttccgcctgtaatcccagctactcaggaggctgagacaggagaattgcttgaacctgggaggcagaggttgcattgagctgagattccgctgctgcactccagcctgagcaacagagtgagactgtctcaaaaaaaaaaaaaaaaaaaaaaagcattggtttggaaagttcaaactgacaaggtaaagaggaaatcaaaattcaaaatgagaactgcaaactgtttagtgctgtctggaaatgagtgtactacataccagtacccatggatgcagccaaagtgctgtttagaggaacatgaatagccctcagttcacataacaacagtgtctagaggaacatgcatagccctcagttcacataacaacagcgtctagaggaacatgcatagccctcagttcacataacaacagcgtctagaggaacatgcatagccctcagttcacataacaacagcgtctagaggaacatgcatagccctcagttcacgtaacagcagcgtctagaggaacatgcatagccctcagttcacgtaacagcagcatctagaggaacatgcatagccctcagttcacgtaacaacagtgtctagaggaacatgcatagccctcagttcacgtaacagcagtgtctagaggaacatgcatagccctcagttcacgtaacagcagtgtctagaggaacatgcatagccctcagttcacataacaacagcgtctagaggaacatgcatagccctcagttcacgtaacagcagcgtctagaggaacatgcatagccctcagttcacgtaacagcagcgtctagaggaacatgcatagccctcagttcacgtaacaacagtgtctagaggaacatgcatagccctcagttcacgtaacagcagtgtctagaggaacatgcatagccctcagttcacgtaacagcagtgtctagaggaacatgcatagccctcagttcacataacagcagtgtctagaggaacatgcatagccctcagttcacataacaacagtgtctagaggaacatgcatagccctcagttcatgtaacaacagtgtctagaggaacatgcatagccctcagttcacataacaacagtgtctagaggaacatgcatagccctcagttcacataacaacagtgtctagaggaacatgcatagccctcagttcacgtaacagcagtgtctagaggaacatgtatagccctcagttcacgtaacaacagtgtctagaggaacatgcatagccctcagttcacataacaacagtgtctagaggaacatacatagccctcagttcacataacagcagtgtctagaggaacatgcatagccctcagttcacataacaacagtgtctagaggaacatgcatagccctcagttcacataacaacagtgtctagaggaacatgcatagccctcagttcacgtaacagcagtgctagaggaacatgcatagccctcagttcacataacaacagtgtctagaggaacatgcatagccctcagttcacataacagcagtgtctagaggaacatgcatagccctcagttcacataacaacagcgtctggaggaacatgcatagccctcagttcacataacaacagtgtctggaggaacatgcatagccctcagtttacataacagcagcgtctagaggaacatgcatagccctcagttcacgtaacaacagtgtctagaggaacatgcatagccctcagttcacataacagtgtctagaggaacatgcatagccctcagttcacataacaacagtgtctagaggaacatgtatagccctcagttcacgtaacaacagtgtctagaggaacatgcatagccctcagttcacataacaacagtgtctagaggaacatgcataaccctcagttcacataacagtgtctagaggaacatgcatagccctcagttcacataacaacagtgtctagaggaacatgcatagccctcagttcacataacaacagtgtctggaggaacatgcatagccctcagttcacgtaacagcagtgctagaggaacatgcatagccctcagttcacgtaacaacagtgtctagaggaacatgcatagccctcagttcacataacagcagtgtctagaggaacatgcatagccctcagttcacataacaacagtgtctggaggaacatgcatagccctcagttcacataacaacagtgtctagaggaacatgcatagccctcagttcacataacagcagcgtctagaggaacatgcatagccctcagttcacgtaacaacagtgtctagagcaacatgcatagccctcagttcacataacagtgtctagaggaacatgcatagccctcagttcacataacaacagtgtctagaggaacatgcatagccctcagttcacataacaacagcgtctagaggaacatgcatagccctcagttcacgtaacaacagtgtctagaggaacatgcatagccctcagttcacgtaacagcagtgtctagaggaacatgtatagccctcagttcacgtaacaacagtgtctagaggaacatgcatagccctcagttcacgtaacagcagtgtctagaggaacatgcatagccctcagttcacgtaacagcagtgtctagaggaacatgtatagccctcagttcacgtaacaacagtgtctagaggaacatgcatagccctcagttcacgtaacagcagtgctagaggaacatgcatagccctcagttcacataacaacagtgtctagaggaacatgcatagccctcagttcacataacagcagtgtctagaggaacatgcatagccctcagttcacataacaacagcgtctagaggaacatgcatagccctcagttcacataacaacagtgtctagaggaacatgcatagccctcagttcacataacagcagcatctagaggaacatgcatagccctcagttcacgtaacaacagcatctagaggaacatgcatagccctcagttcacataacagtgtctagaggaacatgcatagccctcagttcacataacaacagtgtctagaggaacatgcatagccctcagttcacataacaacagcgtctagaggaacatgcatagccctcagttcacgtaacaacagtgtctagaggaacatgcatagccctcagttcacataatagcagtgtctagaggaacatgtatagccctcagttcacataacaacagtgtctagaggaacatgcatagccctcagttcacataacaacagtgtctagaggaacatgcataaccctcagttcacataacagtgtctagaggaacatgcatagccctcagttcacataacaacagtgtctagaggaacatgcatatccctcagttcacataacaacagtgtctggaggaacatgcatagccctcagttcacgtaacagcagtgctagaggaacatgcatagccctcagttcacgtaacaacagtgtctagaggaacatgcatagccctcagttcacataacagcagcgtctagaggaacatgcatagccctcagttcacataacaacagtgtctggaggaacatgcatagccctcagttcacataacaacagtgtctagaggaacatgcatagccctcagttcacataacagcagcgtctagaggaacatgcatagccctcagttcacgtaacaacagtgtctagaggaaggcaccacgggaggagcatccctgtgagtggaggaagggcctggagcggtttggtcagcttggtctgttttcctcacctctcaggttcagcttaggcctcaccacccctgggaagcttctctgacacccacgcccaccacagtcttggttgggtgccctgtccccagatcctgtggctttttgttcacctgtggctttgcttaaatggtactgaattgtaattgcattgtcagactcctctcttccccactggaatttgaactccagggacagcgctattttcttctgttccatgttcctcatattcgacacgtagaaaacaggtggttagggcccagcatggtggtttacaccggtaatcccagtactttgggaggctgagacgggtgggtcacttgaggccaggagttcaagaccagcctggccaacatcatgaagccccgtctctatgaaaaatacaaaagttagccgggtgtggtggtgggtgcctgtaatcccagccacatgggaggctgaggcaaaagaattgtgtgaacccgggaggtggaggttgcagtgagccgagatcacgccactgcactccagcctgggcaacagagtgagtgggactccatctcaaaaaaaaaaaggcacttagtaaacaaacaattattgaagaaaacataaccagatggcctctctgaggatcctttcaactcaagcatctccctttgaacaggggaaagcaagatcaccattacagccccaggagtgttcagggctgggggatgtcctaggacagagggtccaactggtggtacatctgcccagagggcttcctcgccagcacagctgtccccctcctgaacggctgggccctgcccacagtgcccgcccaggagcatcctgcgtgcctgtttcccacccgcccctgggaggcttgctgcctccccgttgccccagctgtgcagacgtggccttgtgcccagtcgagtcaacagtcaacactcagtgagccccactggctgtgctgcctggggtgtgccgggtgcctcatgtatatccctgtccagtggaggaagcagacacgccccttgctgaccacagagtgtggtacatgtgagtcactggagaggcacaggtgccgtcctctgagtcacagaagaagcagtgatttgttttttgttttttgtttttttttgagatggagtctcactttgtcactgtcgcccaggctggagtgcagtggcacaatctcggctcactgcaacctccacctcccgggttcaagcaattcttctacctcagcctcctgagtagctgggaataaaggcgtccgccaccacgcctggctaattttttgtatttttagtagagacggggtttcaccgtgttagccaggctggtctcaaactcctgacctcatgatccacccgccccggcctcccaaagtgctgggatgacaggtgtgagccaccgtgctcagccttgttctcttgataataattttttaaattttcatgttttttctaatccccaatataatactggctggttttaatgagaaatgctcgtagtaccagcatgtacagggtaaagctggtcgccactcacctcccactgctgacagtttgaggtgtattcttctgaactcttctttgcttatgctggtgtgcgcccgcgtgtccaatgagactagactacacgtgctgttttgcaacttcagcattttactccacagtgggtctttgagccctttggatgtatcagattctttttctttctttttgaggtagagtctcgctctgtcacccaggctggagtgcactggtgagatttgggctcactggaacttccacctcccgggttcaagcgattctcgtgcctcagcctcccgagtagctgggattacaggcgcccgccaccacgcccggtagtttttgcatttttagtagagacggagtttcaccacgttggccagggtggtctcgaactcctgacctcaaacgatccgcccacctcggcctcccaaagtgctgggattacaggcgtgagccaccgcgcctggcagtatcagattctttttaacaactgcctcctgctctgtcgcttggctgcatacaaatgtttttgggtgtttggattgtctctgattcttcgctcttagcaggcaagtcaacagtaaacatcactgcgcaggtgcctctgcagtaggttccctccaggtgggatgggcagggcagggtgagtgtgcgcttaattgacaggcttttacctctgaaaaagctgtgactggtggcattccccctgcggtgtgtgagggtgactgtcccccacagtgtcacaacactggctgtgaacattctttacaattttgccagtccagtgggttaaaaagaacaaaacaccatagaggtgaattctaactgaggagcttgaggatggccttgggagctgagacttgaagcataatggtggttaataaaagggagggggtcctttacgaaacagacagaaacttggaacattgagggagcaggctctgcccgcagaggatgaatgtctggtgagagggggaggctgagccgacgggacctggtgggttgtctgccgggcagggaggctggaaccctgccatgggggccttggtgccaggctagcaggtggggcttcaggctgaaaggtgtctgaggtttctttaagcaggtgtctctgttgtacccaggatttaatgtgtagaggcagcagagtgacagtacagagaggttaatactactgtaatatttgtattatttagggttctcaagagaaggaggcatagcaccccgcccagggccacgtggagaggtgccagctttgaacaggaggcaggaatggaaagaaagtgtggccacagcttttctgtggagaaacagggcagggaaagggcttggcaccagctggcttccgttatgtcggcagccctgggctagaggagtggtctctggtgacctggtccctggccctgggtgacgtggggcagaggagatgctggcttggcgagtgagcgtcaggtagagaaggtggttggggacatgggctctggatcagtgggtgtgtgtatgaaagctgtgctcatagggcatcactgacaggcttaggaattagtgagccctgtgggggagcagtttctcacccagctacccgcctctcctgccacaagatgtcaaaacatcacgaaatacggaaaatgtaaagagcatgttaacacacagtggagtgtcgtgcttagtgctgctcgtgagaaaggcccgagtgtgaggggaaccctctgtgtccccatctcctgcagaaagccaacaaaggccagagccgggccatcgagcgcctgaagaagaagatgtttgagaatgagttcctgctgctgctcaactcccccacaatcccgttcaggatccacaatcggaatggaaaggtcaggatgggtgggggtgggaccaagacagccccttccttagtccagagcagcccactctgtggctcctggccctgacctgtacgaaccggaaactcaggccccctcttcctgaggaggctgccatggctccagctgttgactcgctctcccctctcgtgtggaatgagtgccctctgctggccgtccctggcacagccgctcctgtcaccttggcttcccaggaaggagctcccccttcacccacccacccccagctgcctcctcctgcaaggtcagctgtgcctggataaggaggagctttgggccgggcacagtggctcatgcctgtcatcccagcactttgggaggctgaggcaggcgaatcacctgaggtcaagagtttgagaccagcctggccaacatggcaaaactctgtctctactaaaaacacaaaaattagccgggcgtggtggtgggcacctgtaatcccagctactcaggaggctgaggcaggagattggcgtgaacccgggaggtggaggttgcagtgagccgagattttgccattgcactagagcctgggcaacaagagcgagactctgtctcaaaaaaaaaaaaaaaaaaaagataaaaggagctttgttggggtccccaggatctgggagtacgctttgcctgactgtggtcacccactttatgcttatctcctctcttcagagttacctgttcctactgtcctcggactacgagaggtcagagtggagagaagcaattcagaaactacagaagaagggtaaattcctgcctcttccacgctccccaatgatgtccgtggcattgatgggccttttgtatttctaagcgtttcatgtccagtatcacgtctttggccctcgcagtcaccctcagaggtgccagggtgagcgtttaaggatgttacggattaattgagacccaaagaatctaactgattggctgaaagacatgatgatttagtcctgggactggacccagagcccagcctgggctttctctctctctctacctctctctctctctcacacacacacacacagagacacacacacacacacacacacacacatacacacatacacagaggctgggtacggtggcttacgcctgtaatcccagtcaggagtttgagatcagcctgggcaacgtggtgaaaccccgtctctactaaaaacacaaaaattagccaggtgtggtggtgggcacctgtaatcccagctactcaggaggctgaagcaggagaatcccttgaacctgagaggcggaggttgcagtgagctgagatcacagcactgcactccagcctgggcgacagagtgagactccgtttaaaaaaaaaacgaaaacaaaacgcatacaccacacacacacacacacacacacacacacacacacacacacacacacacacacacacaaacctcttcagttagattctcctactctgacccctctcgcagcatctacaccagtcctgctgtgtccacaaatccttccccctccctcgcaaggaccaagtctgccccagggattaagccgtcttcctgcagcagcccccagggaagagcagccggtcctggtggaccagtgcccacgctcccttctctctcggctctccctccagatctccaggcctttgtcctgagctcagtggagctccaggtgctcacaggatcctgtttcaagcttaggactgtacacaacattcctgtcaccagcaataaagacggtaagctcgggaaccagaggtggcccaaccggcaggtcccagccctcagagcgtggccggcttcccgtaaggactcagacagacatgtggctgtaaatggctgatccctgctcggctgtgctgagactgttgagtggccaggacacagcttgggtaggggtgactgtctactgagttcccagatgaccccagcttttccttgggcccctctgtctggcttgggagaactggcaccctggtgcactgagattgtgctgttaatatattcatgagagagcagacccggtagataaaatggtgtatgggaaatgaggctggaagtttccagggaccagctcttgaaaggccttgaatcccaagcaagggagtttggaattcatgctgtaagcccgggagtctgggggggttttgagcagtggggagctgtgatcagggctgggaactgaccggagtgggtgtattctagctgcctgtgtgctgggaaagggtccactttgtgaacggggtcctgaaggcaagctttcctcgacataaatcattagcagaatgatttatcatattggtcagttttcagtgccaggataggcaggatttggagggagagacagtacccatggggaatggtactaagtccctgggccaggatggtgggtgtgctggacccccccaggctgagtggaggagagaaggaccccctagccctaccccgggcagctcacatataaggccgccgtggccttcggaaactttttcatctggccaccaggtggtgatgttggaccaagactcagctgagtctcataccccgtctgcctcccgccggcctggggtggaggctgaggggatccgctgaccaccctctgccctgggggcttttctctcttgcagacgatgagtctccaggactctatggcttccttcatgtcatcgtccactctgccaagggatttaagcaatcagccagtaagtgccctggccaggacgaggttgggtgggccattgtggattctgcactgctctgcccaggatggggccctgccagcacgcctttagacatggggcattcccctggaggccagaaaccagctcctcttggcagggaggtcacccctggcctttgtctccaaagtcctctttctcaagccctccctgaagctgtctgaaacctaggggccgggcgcggtggctcacccctgtaatcccagcactttgggaggcccaggcgggcggatcacgaggtcaggagttcgagaccatccgggccaacatggtgaaaccccgtctctactaaaaatactaaaattagcgtgggcatggcggtggacgcctgtagtcccagctacttgggaggctgaggccagagaatcccttgaacccgggaggcggaggttgctgtgagctgagatcatggcattgcactccaccctgggcgacagagcgagaatccgtctcaaaaaaaaaaaaaagaaaccgagtgcgacaaacacgtggactccaacttcatatctgagggcgacaaacacgtggactccaacttcatatctgcccatgacaagctgtgtgaccttgggcaagtttcttaacctctctgggcctccactaaaaggcagtcacgcttgtgaattttgacccgagagcaggctgggatatgatcgtgtgtgtgcaacgctggtgtgctgccacgctcatcgctttttctccccttcccccttgtgggttcctcatactaaatctgtttttagtgtctcacaaagtaggattgcactttttaatttttaaaaaatttttttttagagacaggttctccccatgttggccaggctggtcttgaactcctgggctcaagccatcctcccacctcagcctcccaaagtgctgagattacaggcgtgagctgctgcgcccggcctggttgcgctttttatctacctgttatccacacgggaatctgtgagtcagttagacagctaatagtttctacccatttgccagaggaggtaaccgagtcacagagaggagaaaagacttaacatcacagaggatcagaaaccctgactctctccctctccacctgcccctcccactccctgctcttcactggcaggtggggtctgccctcacccctccctgcagcgccccacacagaggtgactccccgggccgttagagcagcctttcccaggaagcctccctgagttcctgggggcaaactggcctcccttctttgtcccttctttgtgcccacatcccctcaggttccttgtgcccccatcccctcaggttccttgtgcccccatcccctgaggttccttgtgcccccatcccctcaggttccttgtgcccccatcccctgaggttccttgtgcccacatcccctgaggttccttgtgcccccatcccctcaggttccttgtgcccccatcccctcaggttctttgtgcccccgtcccctcaggttctttgtgcccccatcccctgaggttccttgtatccccatccctttgaggttccttgtgcccccatcccctgaggttccttgtgcccccatcctgctcagggcaagctggttatggcacctgtcatgctgttttgtcacttaacaatttgcgtctcccactgtgagttctctgagggcgggaaccaggtctcctttaccctgggatgcatgggagctcagaaatgtggaatgaagtcgttaatttacacagcacctaccgtgcacctggagaaggtgagaacatggctggcgtgtggacgtactcacatgtgcaaagcctgtggcgtgttcagagcctctcagtctcacggtccgctctgagcctccggcatcccgccgaggtcacggaaaccatccctgttttacacacgaggacgccgaggctcggaggggctcaaggttccttcctggagtcacacagtagcaggtggtgcagcagaatccacgtcttccggcaccagagccggagctctaaccttttgggcacttctcgatgtctggccgggaacaccacacggtccctcaggctgcttgttaccgtggaagcttcctgaactctctccagacccacagacctcccttcttgggggctgccgctgaggagcttctggctagtgagctctgaagcactgtcccacccatgtctggaccaggcgccaccactccatgtccccagatgccgcccctccctctcctgcttcccgttggccgggaggtcctcgcctcagggagccgacccgtggcctcccagcctgggcgggtgtcagagccggctgagctgctccaaaatctctctttacccccagattatcctcactcccttcgccgccgccacccctgacccactcatatgtctgttctcactcagaggtgaggccctgtgtcttcagccgtggtaaactcaggacctctggacaggcaggcccagggtgtaggcaccatgacttttcctgctgtgcagacaggaacctggggagagaagggaggtgatctgtgcagagctggggtgtggacccagatggtctgactccggaaccctcgctctgaccctgtgagccgtccccagctccttccggaaccctccctctgaccctgtgaaccctcccccagcccgttccggaaccctccctctgaccctgtgagccctcccccagccccttctcgaaccctccctctgaccctgtgaaccctcccccagccccttccggaaccctccctctgaccctgtgaaccctcccccagccccttccggaaccctccctctgaccctgtgagccctcccccagccccttccggaaccctccctctgaccctgtgacccctcccccagccccttccggaaccctccctctgaccctgtgacccctcccccagccccttccggaaccctccctctgaccctgtgacccctcccccagccccttccggaaccctccctctgaccctgtgaaccctcccccagccccttccggaaccctccctctgaccctgtgagccctcccccagccccttccggaaccctcgctctgaccctgtgacccctcccccagccccttccggaaccctccctctgaccctgtgagccctcccccagccccttcctgaaccctccctctgaccctgtgacccctcccccagccccttccggaaccctccctctgaccctgtgaaccctcccccagccccttccggaaccctccctctgaccctgtgaaccctcccccagccccttccggaaccctccctctgaccctgtgagccgtcccccagccccttccggaaccctccctctgaccctgtgaaccctcccccagccccttccggaaccctccctctgaccctgtgacccctcccccagccccttccggaaccctccctctgaccctgtgacccctcccccagccccttccggaaccctccctctgaccctgtgacccctcccccagccccttccggcaccctccctctgaccctgtgaaccctcccccagccccttccggaaccctccctctgaccctgtgagccctcccccagccccttccggaaccctccctctgaccctgtgaaccctcccccagccccttccggaaccctccctctgaccctgtgagccctcccccagccccttccggaaccctccctctgaccctgtgagccctccccagcccctcgaggaggggctcacaccgagatcaatccatgatgacagcacttcatggcccgtctcaaacacacaggcccactccctggtctggcccaggctggggtgctcagggcctctgtgttgttcacctgcaaatccccagccccgttctgtgtgttctgaggcccacctgggtcttctttctgttgctccagctggaggcttcttggggtagctgcactgtcctttctgcaggaaagctggtttttttggtttttttttttttgagaaagagtcacttggtcgcccaggctggagtgcagtggtgccatctcagctcactgcaacttccacaccccaggttcaagcgattgtcctgcctcagcctcccgagtagctgggactacaggcatgtgccaccacgccgggctcacttttgtatttttagtagagatggggtttcaccatgttggtcaggctggtctcaaactcctgacctcaggtgatctgcccaccttggcctcccaaagtgctgggatttacaggcgtgagccaccttgcccggccaggaaagctgttctgatggagaatggcccagctgggcagctgcaggggctaagtggagtaagccacctgcactgtatgcccgcactgtgacctctgacgttgtttcacgctgcagagggttggccatagtgtcccaaaggcacctcccacaccacctctggtaccctgggaacaacctcggcatctccctggaggtgggaggactgctggggtccgagcccagggcgggtgtgggtttgcagagggcctggggtccgtgccggtgctgtggcctcagcagttgggtcccaaggtagattttcagcctgaaggccagggtggaagatggaaatgccggggaaagcccccggccctgccctcccgccccagccctccactgccttgttacctggagcgcttggtggtggtgggagcctcgttcaccgtgtgccagctgggttcccagccctgttcttggtactgcgggtacaccggcaggcaggaaaacccaggcttctctccacatggtgtttacgtcgtggggggagagagactagggacgcacgagtagagaagatccctttggtttatgttaagtgcagcggaggaaaccacagcaccctgggcttggggatgtgggcgttgttggtcgtcaccgcggcaggggatgctccgagcattcaggacccagaggcagggctgctaaacgcctcccaccccaaatgccgctgttgaggcctgggcacccatgttacggggagaggtggctccagggcggtcagtgaagagtttgtggtgtcgtctccatggtgaggaagatgtggagacggaacagtcaagggccctttagagggaggaggaggccagagtgtggggagggccgaggtgggaagggcagagtgtggggagggccgaggtgggaagggcagagtgtggggagggctgaggtaggaagggcagagtgtggggtgagccgaggtggggagggctgagcccctaagaagggggcaggggagaagccagatggtcccgggcttcagggaggagagagccaagatgccatccgtggggacgttggaaaggacagatgcgatgtccccctccatcctgagtgccgccccagctgccccaccctggccccactcactcagtatctccgtctgtccttcccccacagacctgtactgtaccctggaggtggattccttcggctattttgtcagcaaagccaaaaccagggtgttccgggacacagcggagcccaagtgggatgaggtgagtggcaggggctggcatctctgtggggaccccaccaccccgtgctcgtggcttgtctgctggggacggccagcccattggttggaccagctatgtctgcacccccctttctgctccctgctcctctggcttctgatcgcggtgtgtgtctgggtgtcagaccctgtggtgtcagctcaggcccccagactccaggggtgatgggaggcctctgggagctccagaaaatctgacgtgtccttcgtgggccgtgcttactccctcctccttgcaaagctgaggcacgcacctgccggaaagccaggcctcccagcttcggaggttcagggccctttgtcccatctttccccaggagtttgagatcgagctggagggctcccagtccctgaggatcctgtgctatgagaagtgctatgacaagaccaaggtcaacaaggaca

SEQ ID NO: 15352 - DNA, 33495 bp, Homo sapiens
atcagacgtgtgtgtgtccctgcggcgctaagaaggggagactgaggctgaggctggggaacatcgggcagcatgagcggctgcgggctcttcctgcgcaccacggctgcggctcgtgcctgccggggtctggtggtctctaccgcgaaccggcggctactgcgcaccagcccgcctgtacgagctttcgccaaagagcttttcctaggcaaaatcaagaaggtaacgcgagccctgggcgaacccttgctgtctggctcccgcttttcaccctcagctgcaagactggtgttgaactttgtgagattccccaaacctgccagagagatacaccctgcggccgaggcgtgttaacactccggattcctgagttccaggaaaaccttcccagagaaagggtgagacatttccaagacgggggacccttggaaatgtggtggtgacgtgttccagctaaattttgtcaggggaattcggaaaactctaggctaggtaattaacaaagcagccttcatctcagctggtctggtctggaaatgtgcggggcttcctctctgattcctaaacagcttacaccatgtccctcctcagtcaccttccagcgccctggggcttccttccccaggtgagcccagcgcctctccctgccattgaggttcctcagaaatctggctccaagatgcttcccaagggtggcacaacccagccaatagtaacagtttggttataaaacactcattgtcttcttagagttggaagacttgggtttggtcttggctcgttgactttgaaactcagttgttttttttgagacagagtcgcgctcttgtcgcccaggctggagtgctcactgcaacctccctcctgggttcaagcgattctcctgcctcagcctccggagtagctgggattacaggcgcctgcccggctttttttttttttgtatttttagcagagacggggtttcaccatgttggccaagctggtctagaactgacctcgggtgatccgcccacctcggcctcccacagtgctgggattacaggggtgagccaccgcgcccggccaagactcagttctttcagccttaaaatggagatagtgttgtgtctccttcacagatgtgttgtagagccccagtgagataaacggtgcatggagagtcttcttaaactgtagagtactgtgcagcagaagagagagctggcttcaacacttagtcttgtgaccttggagctgacggctgcacctccctgtgcctcagtgcattcatctacaaaataggaataaacacatttcttgctctttcctttgtatttcattttatcttctaaggaaaccaacagtatacttgctatttcgtcgaggtgccctactttgaacttggctgaatgttggctgatcctgtatcacagaagttattccctggcttctctttggaacgttcctctgaggttgtcaggctgatacctttatagcaagcaactttacagatgaagaagctaagactcagactaaaagcagtttgcccagctagaaagtgcggagctatgtcttgaacatattggaaaaccttttacccaggacctggggcagtgtggtgctctatcctgggacttcctgctatccagcagcatggtgaagaaagaacacagatctttcagatctgtttccatctttaaacctctggcactacctgccctgccctgcctttactctcagctgtcagctttgcttcccattccactgggaaaatccatgcagtcggatgagaagttcacaggcacagttaccccctcccgctgcatatgtgccggtattatctacattctgttactgtgaactgtctgctcctggcaaaaccaacctctcattagactccaggtcttctcacctactcaagggtaattctttcctttctctgcatcattaactgttctctctactggatcttgagcccttaccattcaggcatttgtccctaatggccatagaagtcagtaatgacctctctgttatcaaattgtgtgatctgttctcagacctcatcctacttgacccatcattggcatctgacaccgttcatccttccaccctgttgacgcactttcgtctctggtttctgaatcactgttctcgccattctctgaatgttctaaatacttcactggctgatacttctctgtgtccattgctggttcttattcagctccttgaccgctaaacagtgaccagtgtttccaactagccaagttggaatttactaaggctgggtctcgtttcatctacagccatctgctgggtgaccttatttagtgtcctggctttaaatatcatcaatatcctgatgcctcaagtttctttcttcagttcagatttctccctgaactccagattccttttgctttttcagagttgggggctttctctgtcacctgtgctggagtgcagtggtgccatcatagctcactgcaaccttgaactcctaaggctcaatagatcctcccacttcagcatccccagtagctgggactacaggcacgccctgccacacccagccaagattctttttttaatctacctttgtactcaaaagctgtactaagaggtctaacaggcatttgagattaatagatcccaaactgagttcctggttcccacccaatcctgctccttccaccagccttctttatcatagataatggtggctctgttgttccacctgttcaaacagaacacctggagtcaccttgtactcttattctcctagtccacttctaattccacagaagatctggttttctctacttttaggttcttagaatctgaccacttttaggcccttctgctgctactttggatcaggccagtgtcatctctcacagccttactgggattagagcagaaacatgggacatgatgcttagaatctcagattgtgtaggccagtggttgtcaccctgccctaagctggacccaagctattcatggagtgtcctggaactgctgcagggatgggtgggaagttgagtgggtgggatttgggtgcctgttttccctatcagcagtctcagtcagagccgcctgcttctgtctgttttacatatttggtttctgcactagatttctttgaataacaggttccacttttttagataatttacaaactgtttattgcaattgaactctcctcccctaaggcattgacctgatttgataacatcaggatctttctcccacgcccctgcaatctctcctgtgtggcaggttttctgtggttgtacctgaaggccaattagttgccaggcagtcttatctggcctgcccactggtaccagaatgatctctaacacagcccattgcacaagacccaagtgtcagtgagcctctgtgttcagtgaaggagactgagctttgatataaaaggctgcagagtgatggagccatcagcttgtttttttttttttttcttgttttttttttccttgagacagtgtcttactctgttgcccaccctggagtgcagtggtgcaatcacagctcactgcagcctcaacctccccaggctcaggggatcctcccacctcagcctcctgagtagctggaactacaggcgtgtgcaaccacgcccaggctggttttgaactcctgggctttaagcaatccccctgcgtcagcttcccaaaggactaggattacaggcagtagccactgcaaccagctaagcttgtttttttctttttcttttcttttttttttatggagtctcactctgtcacctaggctggagtgcaatggcgcaatctcggctcactgcaacctccacctcccgggttcaagcaattctcctgcctcagcctcctgagtagctgggattacaggcgcgtgctaccaagcccgtgtaatttttgtatttttagtagaaacggggtttcaccatgttggtcaggctggtctcaaactcctgacctcgtgatccgcccgcctcggcctcccaaagtgctgggattacaggcgtgagccaccgtgcctggcctccaacctttttttttttctataccaccttcagggtggttttggaatggatggaggcagggattcctttaagttggctgtcacttttagttagggactcacctataagcctgtggtcctgggcccagagaggagaaagcagtgcgagcatattgatagagtagagaaatctgttggctgattagctgtacaaggtctgaggagaaggttgaggtctccccaagacttctctagaacacttggtgagaggcgccatgaggacaggtgatgcttgggcttatagctctgactcaggacatcactgctcaacagcctgaagcccacatccaaagctcatgtcatgctggcaattgaaggggtagcagagcccaaaagtccagaggggctcagcacagggagcagatgtctgtgagcaggagagacagcggctgtagggatcgatgagacttggtaagcatgatgtgctcttgtcagcatagcatctttgagctcacacaataattgatgtagaattgtccatttcagtaaggagtttccacatccactatcttccacgattctcacaagggccttgagtaaatattacctgcatgttatgggtgagaaaggggtagtttagagagctgaagggatttggtgaaggccacataatgagtaagcctgaaatcaaggaccagacccccaggcttctaaatgttagtcttgggctccttgtttcatgggactattatcatcccttgtactgagaaggaaaactgatgaaaatcgggaagaacctatttgaacaggggagggagatggatgtgggtggtggagcctgcacatagtttctgtatctcaggaaccttgtgaggtttgctttccagttccttcagtacgtcatgtcccgctggccagggtggagtggagcacatgtttttccttcccttttaactgatatttccgtgatgggagtgtgctaaaaattaaattttttagaaaatatttactatttttagaaagaagttttcccatttccagaagttagccaagatgaacttaatgaaatcaatcagttcttgggacccgtggaaaaattcttcactgaagagggtatgtatggttttctttaccattgccgatttccattgtaagggctatttggttgatatttatattagaagtgacatacataggagaagtcttcttgagggagaaatggtttccactcataatattttgctttaggtttcatccctattgccatttaattaaaaaacatccagttaaatgcttctcattgtatttgtggttcaggagcactttaaacatttccatactgttccaggtcaacacttccataaagctataataaaaatgaataactaaaaaaattagatggcaaaaagccaaggccacacaccatacaagcccatggagcatgtgttggttgttgtggcagtgtacagttgctcttagtgtttctaaaggttgagtttcaatttctgtactttggtaattgtaaacaaagagtgatttgtggaccagccacagtttggcacctgcatggtgaggcagcatttgacctcaggtccctctctcagagctgttggccggtcctccagccagggccttggtggagagttcagtgatggtggatggacagcaggtcttccctaatagtaggatcctggagagcttttgtttatatgaattttatctatcaatatttgccatcttaggggttattttatttttattttactttatttttttgagaaagggcctagctctgttgctcagactggagtgtggtggtaccatctcatctcaccaccacctccatctttcaggctcaaacagtcccccaacttcagcctcctgagttgctggaactacaggtgcgcacccccatgcccagctaatttttttgtatttttcatagagacaggttctcactatattgcccaggctggtctctactcctaggctcaagtgatcctcccaccttggcctcccaaagggctgggattacaggtgtgagccaccatgcctagcccctcttagaaattaaaactgagaaatttaaaatatactgtggggctgggtgcagtggctcacgcctgtaatcccagcactttgggaggccaacggggacagatcacctgaggtctggagttcaagaccagcgtagccaacatggtgaaaccctgtctctactaaaaatacaaaaattggccgggcatggtggcgggtgcctgtaatcccggctattcaggaggctgaagcaggcgaattgcttgaacccaggaggcagagattgtagtgagccaacattgcaccactgcactccagcctgggtgacagagtgtgactttgtctaaaaaaaaaaaataaaatatactgtgttcatttgtttaaaaataataaatccattacatgttaacataatatttttaatgaaaaatattttgtttttgtttttccgagacagagtctcactctgtcacccaggctggagtgcagtggtgcaatctcgactcactgcaacctctacctcccaggttcaagtgattctcctgcctcagcctcccaagtatctgggactgcaggcatgcaccaccacgcccgggtaatttttgtatttttagtagagatggggtttcactatgttggccaggttggtcttgaactcctgacctcatgatctgccttcctcagcctccccaagtgctgggattacaggcgtgagccaccgcgccagctaatgaaaaatattttgaaaaataatcaggccaggcgcggtggctcacacctgtaatcccagcacttacggagactgaggtgggtggatcacctgaggtcgggagttcgataccagcctgaccaacatggagaaacctcatctctactaaaaatacaaaattagctgggcgtggtggtacatgcctgtaatcccagctactcaggaggctgaggcaggagaatcgctggaacctgggaggcggaggttgcggtgagccgagatcgcgccactgcactccagcatgggcaataagagtgaaactctgtctcaaaaagaaaaaaaaaagaaaagtaagttaaaaaaaaaaaaagaaaaaaattgatggaaagagtgacattggttgaaagttatgcaagtccttttaatgtttggcttattagaagacagctggattctcatacctgtttgtgcacgtaacctctggaaaagtccactgtgcagtctttttttttttttaactgtctttttttataatcttcagacatgctttttgtttgtttgtttctgagacagtcttgctcttgctttgtcacccaggctggagtgcagtggtacgacctcagctcactgcaacctctgcagttgaagtgattctcatgcctcagcttcctgagtagctggaattatagcacgcaccgccacgcctggctaatttttgtattttcagtagagatggggtttcaccatgttggccaggctggtcttgaactcctgacctcaaatgatctgcctgtaatccaaagtgctgggattacaggtgtcagccaccgcacctgtcctgacacgtgcatttaaagcaagaaacacacacttccaggacatagggctctgtcagcaataactgtcatctttgtatttgcagagatgtaaatatataagaaaccggctgggcacggtggctcacactggtaatcttagcactgtggaagactgaggggggcagattgcttgagtcccagagtttgagaccagcctaggcaatggagcgaaaccctgtctctactaaaaatttaaaatattagccgggcatggtggtgcgcgcccatagtcccagctacttgggagtctgaggtgggagaaggtacccaagcctgggaagtcaaggctgtagtcagctgtgttcatgccattgagctccagcctgggcgacaggagtgagaccctgtctcaaaaaaaaataaaaataaaaataaaaaaataaataaatatatatatatatatatatatatgcaagaaaccactgcaaaccaaacccactccctctcacaggaacaaaggtctcttggaataaatagcaaatgctggaataaaaactatgttcattcagctgccatgatgtgaattcaaaaaggaagttaaatccaagggcaaagcagagaaaagaacatacaaaaatacacctatttcatgtacattcaaagaggaggctaatcactgtggacaaagggccctctggaatgacagctgtaggcagccagcagtgccacggaaatagaggcactgtcatctggagacacagaaaaatcacatcctcccacaactggcctctatgaaaaccaaccaggacagacaacccttccccaaaagtaatggccaagaataaaagcacaaatattgctggaaatccaagtagcctgttttactgctttgagtgacttatatgcaaacctaagacttttttctgaatccttgatcaagatttattcatataaaggccgtacataaattctgggaacatggtactttggactatatattggactctgagccaaaacgttaaatacactacactgcgccccactgtacagtcttcagagaattagaatttaaaagcaagtaacatcttaagtagttttaggccaggtatggtggctcatgcctgcaatcccagcgctttgggaggccgacgtgggtggatcacttgaggtcaggagtttgagaccagcctggccaacatagtgaaaccctgtctctactaaaaatataaaaattaaccaggtgtgttggtgcccacctgtaatcccagctactggggaggccgaggcaggagaatcactggaacccgggaggtggaggttgtattgagctgggatggcgccactgcacttcagcctgggtgacagagtgagactccatctcaaaaaaaaataaaaactagttttgatcctgtgggaccccctagaagcagctcaggtcccccagaacctctttgagaagtgccaaattgtcagctgtcattacattgcttggtttttgtttgtttcttatttcacacctggtgatcacaaattatatgttgctagttttaaaagttgcttatttatatataaacataatttataatttagaaatacttatttctgctttttttcctagtgtttatcttcctatttgtatctttttttagctcccatagtctcttgttcttttatttaaacttttcctatgtggtttgtcaggtttttttttttttcaggtttaattaaggaataattgatttacaataaattgcacacactgtcatgtgacacataatgacattcaagtcaatgacagaccatatatacagtggtgatcccataagatcatcataccatatttctactgtatcttttctatgtttagctgtgttcatatacacaaatacttaccattgtgttacagttgcctacagtgttcagcacagtaatatgctgtacagcttttttgttttgttttgttttccttaaaaaaaaaaaaacaaaaaatatttaacagtgagatggggtttcactgtgttgcccaggctggtttccaactcctgggctcaagtgatcctcccgcctcagccttccaaagtgctgggattataggcatgagacaccacgcccggcctactgtacaggtttgcagcctaggagcaataagccataccatatagcctaggtgtgtagtaggctctgccacctaggttgtgtaagtccattctgatgttcatacagggagagaatcacctgacgcatgactgtatttagagagtacccctcaggagccatcagtgcaacagaggaagtgaacgtactcattacccgtcaaagtttccttgtgcctcttttatttcccccctgtttccaggcaactgctgatctgttttctctcactatagattagttcgtattttttggaattatattatgtgtgattttgtctggcttctttctgcataattttgaatttcatccatggtgcatgtattggtagtggcttcctttttaatgctgagtcatatttctttctatggatataccaagatttgtttatccattcaagtattcatcaacatagggtatgtatccagattttagctatcaccaaaaaagttgccataaacattccttttttcctctttttctttttttaagagacagggtctttctttgttgcctgggctggagtgcagtggtgtgatcatagctcactgcaacccttgaacttctgggctcaagccatcctctgcctcagcctcccgcatagctaagactacaggcacacgctaccatgcccagctaataattcttaaagttttttgtagaaatgggttctcactatgttattcaggctggtctcagactcctgggctcaggtgatcttcctacctcagcctcttaaagtgttgggattacaggtatgaaccactgcgcctggcctgtatttcctttttttttgagatgccatctcgactcactgcaacctccatctcccaggttcaagcgattctgcctcagcctcccgagtagctgagattataggtgcgtgccaccacatctggctaatttttggtattttgagtagagaaggggcttcaccatgttggccaggccaatctcgaactcctgacctcaggtgatctgcccgactcggcctcccatagtgctcggattacaggtgagagccacctcgcccagcctggcctgtattttattttagaaactttatagttttggctgggcgcagtggctcatgcctgtaatcccagcactttgggcggccgagatgggcggatcatgaggtcaggagatcgacaccatcctggctaacatggtgaaaccccgtctctactaaaaatacaaaaaattagccgggcgtggtggcaggtgcctgtagtcccagctactcgggaggctgaggcaggagaatggcgtgaacccgggaggcggagcttgcagtgagccaagatcgcaccactgcactccagcctgggcgacagaacaagactccatctcaaaagaaactgtatagttttaattcaggtttagaactatgattcattacaagttaatttgcatttctttatcaattttacaattttcaatgtctgcaaaaaggcctacaattcttaaatggttggtttatcttttagagcaattttttttttttttttgagacgaagtctcactgtgtcacccaggctgaagtgcagtggcgctatcttggcccactacaacctctgcctcccaggttcaagcgattctcctgcctcagcctcctgagtagctgggactataggtgcgcatcactatgcccggctaatttttatatttttttagtagagacagggtttcactatattggccaggctggtctcgaactcctgaccttgtgatccacccgcctcggcctaaagtgctgggattataggcttgagccaccgtgcccggccagcaatttttaaaataggaaaaaaggatcttgtagttacccatgtagttactgattccagggctcttcattctctcatgtagagtcagattcccttttgctaccattgctcttctgtgggaaggacttcctttcacttttcatgatgtgcagctctgcaggggatgcatattctcacttttgtatgtctagaaaagtttcagccaggcatggtggctcatgcccgtaatgccagcatttagggaagccgaggctgtcagatcacctgaggtcaggagttcgagaccagtctggccaacagggtgaaaccccgtctctaccaaaaatacaaaaattagccagatatggtggtgtgcacctgtaatcccagctacttgggaggctgaggcaggagaaccacttgaacccggcaggcagaggttgcagtgagctgagatcacatcactgtactccagcttgggcgacagagcgagactccatctcgaaaagaaaaagaaaaagaaaagtctgtttcatcagaacaggtttctgtgttgacaggatttacctttcaggccattaattgtgttgctctgctctcttcctgacttcatattgcttcagaagagatgtctgcttccattctttgttcctttgtacatagtgtttttttcatctctggctgcttttcagtggtttttaggaaaattgattatcacatttatttatgtagttttttgcacatttattttgcttggagttgtttgaacttcttggctctgtgtgtttatactgtttattgaatttggataaacagttgtacacccatacagtgaatactgaacaacaaaaagtaatgaagtatttatacacgcaacaacacgggtgaatctgtaaatcatgacctgagttaaagaagcccgggaaaataggtgccatatggattcatttatataaaacttgaagatgcaaactgatctacagacaaagatttgtggttgcctggggatggtggacagatggatcgatcacaaaggggcatagagacttttggtgaaaaaggaaatgtttttatctcgattgtcatgttttcactgacaaatatgtcagaactcaacaaattatatattataaatatgtgcaggttattcttcgccaattatgtatgtcaataaagttgttaaaggataaaaaatgaagggtttggcctgcacttttgggaatctgtagttctcttagtgacccatgtatacaaaaattcttaagtgtaggttatggtgtttttaacaatttataatactgatgaagtttaattagcaattcagaagtacactttaattaatttgatgcatacaaaagtgtgcaattataggtctaatgctatgctattgattgttcagttttgctgtagtgaatgtgaatttttattttagagatgagatctcactctgtcgctcaggctggagtgcagtggtgccatcagagcttactcaacctcccaggtcaagtgatccttccacctgagcctcccaagtagctgagactacaggctgaatgtgaatgttgaatgaatgaatgaattggtgttaaacaggctaaactgtctcagaacttgtggattgtgctgaaagcagtatggcctctggcagtgaagtaaaccttggcccagatactgccatgaggtggctatctagctgaacattttagtacaattctgagacttgcatatttattctctcatttcctagaaaataccggccaaaaaaagtatgaggtctataaggaggaggaaaaacatgaagtttaacatgcctatagaaaaatttacatcccatgaatgtatataatttgctgctgttttacacagcaaaagcacccctgtgactagcacccagatcaagaaatagaacaccacctagctctggcagcttttaacaattttattctggccgggcgtggtggctcacacctatgatcccagtactttgcgaggctgtggtgggaagattgcttgcgttcaggagttcaagaccagcctgggtaacatagcaagacctcgtctctactgaaaaaaaaaaaaaaaattagctgggtgtggtggtatatacctgtagtcccagcttctcatgaagctgaggcaggaggctcacttgagcctgggagattaaggttacgtgagctatgattgtgccactgcactccagcctggatatcagagtgagaccttgtctctaaataaatatataaaaataaaatttttcctgggctcattacataaaattgaacacaggccaaatgaccatgactacagaatttctagttttgaaaaagtttctactctgggattatatatgattaatatataaacactgtcctgtttacttatatttgtagaaacatagcttatatttgtttaatcaagattttcctcttggcagtggactcccgaaaaattgaccaggaagggaaaatcccagatgaaactttggagaaattgaagagcctagggctttttgggctgcaagtcccagaagaatatggtaagtcaagcaaacaagcacccagccagtttagctcttaagaaagcactctgtatttgtccataacaggtctagttgctggaatagatgacaccatccgtggtgggctacttggtaggggtggactgactgaaggacctgtagggaggaagtgttctcgggtcctgtgcttctcatcctagcacagaggaatgaggcatgtggtctggctggctgtagagtgcaaggcacatcgaggtgggagattggaccagtgggaacctttgagcagggtcctttgtcctatggactgtccctgtaattctttgagcatcctagtgatgtttttagcccccaagtggcggttctgccttattagagttggccagtcactacaacttgcctcccttacgctttttctcgagttggtcacctgaattctgcagaggttaaagggacaggcaagcagtgtgtagaaggcaaggtagaccttcaaggttcaaagggatagaccacacacatgtgtgccatttgtgtttaccctcaggcccttttgatataaaattataaaggccaaggatgctgctaagcatctgacaatccacaggacagacccccaaaacagaaaacaatccattccaaaatgttacagtgccacagtggaaaagctctgtcctggagtcctctggatactgggcagtgggtcacactatagttgttgcatttataaagacctacagctgtgatggaagattctcactacatgttaattgattcgatgtgtgtgtagatatcttcatatttaaagtatatatctacatatgcttgtatgcctagaaaaagtgtggatggaaggatatacacagaaatgcgctttctgaggcacaagattgcgagctttttttttttttttttttgagacagggtctcactctgtcatccaggctggagtgcagtggtgtggtcatagctcactgtagccctgaattcctcgggctcaaacaatcctcccacctaagccttccaagtagctgggactacaggcgtgcgccgccatgcctggtgaattttttttattttgtagagctggggtcctgctatgttgcccaggctagtcttgaattcttggaaccaagcaatcctcccacctcagcctcccaaagcgccgggattacaggcgtgagccactgtgcccagccctcgatttttgtttactttgtacctttctgtattgtgattttttttttttttttttttttgagacagagtctctctctgttgcccaagctagagtgcagtggtgcgatcttggctcactgcaatccctgcctcccaagttcaagtgattctcatgcctcagcctcctgagtagctgggaccacaggcacacaccaccacacctggctaatttttgtatttttagtagagacggggttttgccatgttggccaggctggtctcgaactgttgacctcaggtgatctgcctgcctcagcctcccaaagtactgggattacaggtgtgagccaccatgcccggcctgtattgtgatttttttttttaatatggtgatctggcattactttataatcagaagaaaaaaaaaagccaatgaagccttaatgggaggaatctagggctgggctgtgattgacgctggtccatctctcctaggtggcctgggcttctccaacaccatgtactcaagactaggggagatcatcagcatggatgggtccatcactgtgaccctggcagcgcaccaggctattggcctcaaggtcaggtatctggggattctgtgtggtgctctctgtaggtcttctggagtcacatggaggcatagaggccagaggcttgctccctctgaattgggcctgatatctgaccttcagccctgcccttcagttccctcactctggccacacctcatggtgctcaatcctcacacactgcccacatgcgcagtggcctttgggtcgcatgtcccttccttctgaatccacctcctgtccccattgcctctgatccacccttcaaggcccaggtagggtgccactgccttcgccttgggctggaagtggtctctcctgagccttcgtccttcagcctgagcatgcccccactctttatgcaagccaccttctccccactgggcttggagcaccttagggcaggcccagggtcaaccgcccttactggcaatctcattactcagattatttctgcttaatgttgacatcaaagagagctgaatgcacaccatgctcggctcccccaccccagagagcgcacacattcatgcagatgtttagtgaagagggggactgtctttgtggcactgggagggcagcaggtgggacagccctgacactgagcaccttctttaggataggcttggttccagcactcctgtgtcttcacattgcatcatccagaccctgtcagtgggtgggagtggcccagtttgtggatgacaagatggaggaggctttctttggaaagggatatcctttgcccaagaccactagtctgggaaatgaaggaactgatatgaaagttttggacacagactgcaaagcactgtgggttgcacaggctcacggcactggcatgtgcgccctgaccgtctcctcagcagcttggctccctgggctctgcctgtggccgcttgctctgagttcttgctgtcttctcttgcccgaagtaaatatttgcctcagaaaggaaatgtttcacaaacacctcatgctctcctttctccccacagctgacattagtctgtgtctgttttgtttaggggatcatcttggctggcactgaggagcagaaagccaaatacttgcctaaactggcgtccggggagcacattgcagccttctgcctcacggagccagccaggtctgtctctgcacaaaacgttatccctcagcagctgtgatgttgcccaagattcactggggcaaggggctgttggttttgttgagtagctgacttttccttctttccaaaatcttgcaaagaatcaactcagcaactgttcttgccattcctcttatcttgaccttatttctctgtcccagtgagacttgcaagtgagataccacgcttgacagcacttattaaataaatttttgtggtttacaacacaccttgacatacaatatagtaataacgttccggcttcaaagcacctttcagaatatatagcgtgggtggtactgctcccacttacacattaggagctgaggttcagtgaggctgtgtgatctgctggatggagcagggctgcggcagcactcgggactctgatgataagtccatcacctggaccatcctccatcctgcttcactttgcatgagaacctgggaacagtcatccttcctggggtgcccagaactcatcctcacaggacctcagatgagcccattgcaagcacccatttccatgtttaaacctaagcccaagttgttttcactgccgcttttttacgtgatgtattgaagcagaggtcggctaaatccagcctcctgcctgttttttataaataagttttgtttgtttgtttttgagacagggtcttgctgcgtcacccaggctggagtgcagtggctcaatctcatctcactgcaacctccgccttcaagcgattcttctgcctcagcctcccgagtagctgggactacaggcatgccccaccacacccagctaatttttgtatttttagtagagacggggtttcaccatgttggccagatctcaatctcttgacctcgtgaaccacctgcctcagcctcatgttctattaatagcagcagagttgaggaggtgagacagacatcctgcagcttggaaagctgaatatgttatctgacccttcattttaaaagtttgctgacctcttacaagtactaaaacctccattttcaggccctcaaaagcattcatatttattcccagtattctcccttgaccacatctttctgcatctgcagtgggagcgatgcagcctcaatccggagcagagccacactaagtgaagacaagaagcactacatcctcaatggctccaaggtagggttccttccccatggccacattagggtctcagtcacaaccttcactgccactgagtgagcactctccacacaccagggattgtacctgctgctgtagcaccgactaccttcttgagctgcttttatgtgtttgtttttaattttttttagttttttttatttgcgatggagtctctgtcacccaggctggagtgcagtggtgtaatctcagctcactgaaacttctgcctcccaggtttccaatgattctcctgccttagcctcctgggtagctgggattagaggtgcgtgtcaccactcctggctaatttttgtattttcagtagagatggagtttcaccatgttgtccagtcaggtcttgaactcctgacctcaagtgatctgcccacctcggcctcccaaagtgctgagtttacaggcaatgagccactgtgcccggcttgtaaacccaaaaaatctttaaattttttgttacacaaagtttcagacatattctgtgtgcctggctggccctaactccggcagtcacctgcttatggccactgtgcctcttccagcagcatcgccacctccagatcgcatggtaacaatctcagcatgcctctctaaaagacaggagttttttttgtttgtttttgttttttaataaacacaaagccgtaatacccttatcacattttaaaaattgataatttctcttttcttttgagacagggtcccgctctgtcacccaggctggagtgcagtggcacgatcttggctcactgcagcctcaacttcctgggctcaggtgattctcctacctcaacctcccaagcagctgggagtacaggcacacagctaactctttgtattttttttttggtagagatgggttttcaccgtgttgcccaggttggtctcaaactccggggctcaagtggtctgcccacctcggcctcccaaagtgctgggattacaggcgtgagccactgtgcccagctaataatttcttacttctatcagcattcaaatatccctgattgcctcatacctttttttggtttaactgtttgcttgaattaagatccacacaagtcccatctgttgctgtttgttaaggagtctgtttctgcctctgtctccctctgtttcctttcctcctcctcaccaccctcccgccttttttcatttctttgtagaattaacaaataaatgttgtgtgtatttacatctacaacatgatgtttttatatatgtataccttaagaaatgattaaaccctttctttcttgaagaaatgcagttgtctggcggtggagcctgagctgtctgacaactttgggtgttctttcccccgcccccgcctccacctggccatccatgtcccttgggaaaatccttgctctggggaaagtgggctgagccctgtcctctattcactcatgcttggttggcttctgcagagccaaggaccctgcatgtctggcctgaggtctgactggcagctggagcttgatggacaaagacagagctgaggtgggtcacataggggtttggttttctccaaagtccatctttctgtcctcaggtctggattactaatggaggactggccaatatttttactgtgtttgcaaagactgaggtcgttgattctgatggatcagtgaaagacaaaatcacagcattcatagtagaaagagactttggtggagtcactaatgggaaacccgaagataaattaggcattcggggctccaacagtaagtagctcctgtgcgcgcgtgcgcgtgtgtgtgtgtaagggggagactggcctttgacggtgtgtgtgtgtgtgtgtgtgtgtgtgtgtgtgtgtgtgtaagggggagactggcccttgactctgtccaaatagcaagataaaatgagatttaaacactttcagtttttgttaagcattttaaaaagatcaaattaagaatgccacttgggctttgtctttgttcctgcagctgagtgctgctcacttgaaggcctgctggtcatcccctgctgtagctgccctagcagacacaccaccttagagctcagcttacagtccccagcctttagttgtctcagtctgcagtgcctggcagcctgcttcaggctgtgagttgggttcaggtccatctgggttcaggtccatctggaggcttgttcttagagcagatcataagcacctaaggggccaagccaagccatataagtactatttttgccgtgggagacatagtctccctctgtcacccagcctggaatgcagtgctgtgatctcagctcactgcaacctctgcctcctgggttcgagtgattctcctgtctcagcctcccaagtaattgggactacaggcgtgcaccaccacacctggctaatttttgtattttttgtagagatggggtttcaacatgttgcccagacttgtcttgaactcctgagctcaggcagtctacctgcctcagcctcccaaagtgctaggattacacgtgtgagttaccatacctggccacttttttttggtttgttttttttgagacggagtctcgctctgtcgcccaggctggagtgcagtggcactatcttggctcactgcaagctccgcctcccgggttcacgccattctcctgcctcagcctcccgaatagctgggactacagctgcctgccaccacgtccggctaattttttctattttttagtggagatggggtttcaccatgttagccaggatggcctcgatctcctgacctcgtgatccgctcacctcggcctcccaaagtgcgtgagccaccgcacccggcctttttttttttttttttaaatagagatgaggtcttgctatgttgtcctggctggtctcgaactcctgggttcaagtgatcttcctgcctctgcctcccaaaatgctgggattataggcatgagccaccatacccgactgaccctaaaacacatttaaggtctctgttcatgttgggtcagctctttgtattggccacaggaagtcacatggtcatacctagcaggcagggaaagggagggaggtccatccctcctcacagtgggagagtgctacagttagattgcaggggtgtgattgtgttagagttaagaattgagaccagtggtcccagtctaccctaaggcttcaggaaatgctgttctttccctcactttgcttgttctggctctttatatgcctggttcttttcattcttaaacttctgctaaatgtcaccttagaaaagtctgacatagtccttaataaaaatattattatccacccccttgccaacctccatttctctttatcgtgatgccctatttatttcatccatagcactgatcacaatattacattgttttgtttatagcttttgtctcccaaatcaaagtatgagcctccacaaagataggaactttgtctttctatactgtcctaccaaacattggatggatggatggatggatggatggatgaattgcctgcttgcaggtcagatgcagagtggtttgcattgtcagatgatatcttaaatttcatgtgtttcagcttgtgaagtccattttgaaaacaccaagatacctgtggaaaacatccttggagaggtcggagatgggtttaaggtgagttgccagccacagccccttgtaccaggtagtgtcatgagtgcagtttgtcgcccccagcttttgccctatccctgctcgtagcagagtagcctgtgcatggcaggtgactttgcatggttatctgttgggaaattggcaaaatggacactggaaaattggctggctcctagaagaagtgtatggtaaggattaggaatttcccttcacctctgaggccctattcgcctcgagcggaggctaagattcccttctgcagtgggtatgagaaagcagcctgtgggctctggtgaatctcaagctctgtgtaccacaaccctggtctgcatcgctgccctactcttttctttttggactaagacttatttttatcaagagatgattcatatgacaaaggactcaccattttaaaatattatttcagtggtttttagtatattcactatgttgttcaaatatctcacacagaacatttcctcaccccaaaaagaaatgttgtaccatccagtatgacccttaccccatcccttggctgctactcttttactttatgtccctatggatttgcctgtttggaacatttcataaaaatgcagtcatatacaagatccagtctttggtgacaggcttctctcacattgcgtgatgttttcaaggttcatctctctcatagcatgaatgagtaattcattccttttatggctgaattctcttctgttgagtggagataccacattttgttcatccattcaccagctgatggacattggggttgttaccgcttttggctgctatcagtaatgctacttatgaacattcatgtcaagttttaatgtggaaataacgttttcaggtattttgatttatgcctaaaagtagaatttctgtttggcccaagttggtcttgaactcctgggctcaagcgatcctcttgccttggccttccaaaatgctggtactacaggtgggagccaccatgcccagctctggcatggtcctttggaataacgttcagtggtcttgtgtgtggggatgttggtagagctgcaacagtgactgaaccaccttgttctgaggcattaggatggtgctttctcccagcttgagggaaggcaagctgatccacctggcctggtttcgttgcggcctcctccctctgcctccttcagggcccctgggctctccctgttctccctgcaggtggccatgaacatcctcaacagcggccggttcagcatgggcagcgtcgtggctgggctgctcaagagattgattggtaggtaagttagggacaaggccctttgtgccccaccccctgctgccccggctccaaccctggaggctctgccattcccccggccccttccaggccagtgctgaaccaggctaccagcctgagctcagtccctgggcttttgtggagaccagagggtctcctcagcctgcccctgaggtttgttgtcttccgcattcctctgtttcacctccacccgggtgatgctgactgggggacaggctttctgtctggggtggggatggggattggggaatgggctgtctgtctggagtgagaggttgccactgaccagtaggagcagagctgcttggtgagcacacaccaagaaccaggcttccaggatacacggcctctggttcccaaggtccgtgcctcctgggtgactctgcatggtgggtggggagtaggatcgggtttggaacccaggtccctgggcccctggatcttacctttgttctattctgtcagaataccccaaacctccattttcctttgccagtgaacttagaacagccctgtaaccatcctggttgtggtggaagcatttgcggggaaatgggggtacccggggcagcacacccctaagtgctttatgaagctcctctttggtgccaggctctgggcctgttttggcttccctccattttagagatgagaagacagagactcagagagggcaagcgatttgttccagactgtgctcctggacccaaaatgaaagctgtcaggctccaggctcagggctcttcttactcaggcacaaggcctctggggagctcctctgctggggctctgagtggggctcggccctctacacctcctgagtgcaccacacctgggagagcctgtggaggacatggctatggcggggcgggggtgcttctgcctgggagaggcgccatgtcactcttgggcccttagagctcagcactttgtcacagccacacgcctggaagccccagcctgagtattcaagccaggcggccccacctgctttggtcactgcacggggtgtgagcctgcaccacctctgtctggggcctctgtgcctggctttgtgcgaggcgccctcccccttccacctggttgcatcttcacagcgactctgaggtgggggtggtgttcagggaggtgtcgcactcggcctgaggcacagcctgtaagaaccattgccaggattcaagtctgtatctgatgccaaactctgtgtgtgggtgccatgaggaggggtggttctcctctgacccacgggtgctggcaagtgggggtgccagcttctggggtatttgacctcagcagacacgcttctcacagtgcccacctgtgggaagggtaaggatgatggccataggaaatcatgtttgaaccacagaaatattccagttcattctaataactctgctcttcctcagaaatgactgctgagtacgcctgcacaaggaaacagtttaacaagaggctcagtgaatttggattgattcaggtaccaatggttgagtactgtatttgtgcatttcactgtgtgacatgaacggtgtgttcttttgatgtctctgtactggtgacttctgtggtgatttgggaagaagactagttaaggctttatttgacacgggtcactgggcttgcttctcttgggcattgaggcttctgacttaattactttctctcctgtttcacagatttggctctcagcacatgcaaattgtttcttgtgttttttctgaacactccaggagaaatttgcactgatggctcagaaggcttacgtcatggagagtatgacctacctcacagcagggatgctggaccaacctggctttcccgactgctccatcgaggcagccatggtgaaggtaaccctggcatagccagagagctggcgctggagggaggcttgggaaatctccctcactgtgacctttcaagcccatgctgttgcctgtcatcttcctcctgtcattgatccagtatttatgatgcacttgccctgtgtagcactccagggataggcaggcagcggggagcagcagtagggaagtgtccagtgggccagtggatcagtagtttatagcagaaggagaccgttatgataatatccttttagagtaataacattgcatctggcttgtgtgagaaagacttcttttttccttagtttatggccttcctactttctggtatcaaaactttatcttaaaaactaagcatatggcagggcgcggtggctcacacctgtaatcccagcactttggggggccgaggtggatggatcacctgaggtctggagttcgagaccagcctggccaacatggtaaaaccccatctctactaaaaacacaaaaaattagccgggcatagtggcgggcacctgtaaccccagctacttgggaagctgaggcaagagaatcacttgaacccggtgggggcggaggttgcagtgagccgaggttgtgccattgcacaccagcctaggcaacaagagcaaaactccatctcaaaaaaaaacaaaaaacaaaaaacatgtatgagcctgggcaacatggcgaaaccccatctctacaaaaaatacaaaaattagctggcatggtggcacacgcctatagtccctgctacctgggaggctgaggtgggaagagcatcttatttggttaaggtagatactagaatttgcttttgttttgttgagggtggagggtgtcattttttagctgtaataaaaaagatggccacacttggggggaccctactttgtgccccccacaattgtttttaagctggtctctggaattgagctcttgagagaaatagtgagaggtatggcagcttacagaagcaaacatcctggtgtcggcaggagagtctacctaaaaggttgggatcctgaagtggcaaggtccctaaaaaaataaaaaattaaaaacaaaaaggctgggcatcttggaccgtgtttgagtcttttctaggtgcagtctgtgtactgggtgcatttgcatgtgttttatcatctcgttttcttgtcacccttgaacagtgaccacagacattagtttgctgtaggccagcctcttccagatgctaagcctagggctaaacatggcagtatgtttgcccccaaggcacttatagtgtgcacagacagaaagaaatcacggccgctggggcttggcaggaacaggtcaggttttctcgggaaggggagatcttaggtgggttttaaaggaacaggagctcagccaggtgcagatagggtgaaggcaggcccagaggtacagaaggtcatggtggggtagggaacacaagctggccagtgtggtcacggaaggcaaaggacttgaccacatcacccctcaagttcctccctggccgatctcctccccaagcccgtgtgcctcccatgcctccccagccacccagctccctgcagcgtaggtcctccttttggaaaggattcagtgtgacaccccacaggtgttcagctccgaggccgcctggcagtgtgtgagtgaggcgctgcagatcctcgggggcttgggctacacaagggactatccgtacgagcgcatactgcgtgacacccgcatcctcctcatcttcgaggtgagtggccccgccaccagctaagctgtgctccacccccaccctgcctggtcctaaagatgctgctcagggcctcgcagaggcccccgcagcccagggctgggtcgcatgctctcaggggctctcctagccctggcacgtctccttcccgactgctgccctccatgaagtcacaagcctgaggagtcagttcagttagcatgtgccaggtggcaggggagggaactggggccacagagatgacttcggatgctgtgttctgattgtgcagcagggccgaccaagggagatgacagagtgtaaagaggcagggagcgggcatcctccagaggcagccagagttttgtgaagcatgcgctcctggcccctaggggcagaaagaaagggcttcaaccagggccgggtggagggcagtttgtccctaagggcagggtaatagagcgcgccaggcccagatgggactgatctgctggcacaaggtgaatgaagagagagtgaagggctttctgggagcagcagtcagccctgctaggtgggctggggcaggcagtgggtttgggggtgttgaagaaggtatatgggaaggctaaaaaagtagccagactgtggaggaccttgattgacagcagaggaatttggaagccacaaaacgtctttaagcagggcattatttggttgtatctgtgttgtgggaaatgcccccaggggctcagcaagtgctggacatgtggacggggctcatgtggagagtgagttgcagggatgaggccggagaccaggggctctcctgctgggagggaggggctggacctaagagagcacagcaggatgagtgggatatgatggtgggcatgggtatacaggaggcaggcctgagacagggagagggtttgggcctgagcagcaggtctggtgatgagaggcatcatcagcctctgggagtgtagtcttgtctcctgggccgtcctgcccagtgggaggcctccttggctgcttttgttcctggcctacccattgggttccagccatctccactgttgcagtggacatacggggcaagggccagcctgagggcactggagtggtctcagccctgcaaagggtcttctccaaaggcccttcccttagcctgggagggttggggttctccagggctggggtggtcagcagggttcaggaagccctcaaggccttggaagaacacagggctctcgatgtagggtgagagctcctgtctggagcctgctcggagctgggtggtcctgccaggaggcccctgcagtccccccttttcctgtagggagtcctgctgtccgtgatgtcagcctgactgcaggggacagtcctcagtccctagtgctggctgtgtagcctgggtcaggcccctgcacctgacacacagtaccattgtgcagagtgggcagaagcccactggcctctcactgatcagaatcatgggttgggggagtggggagcatgtggccctctgggtgtgttgacacctggcactgaggaggttctagctgccactcagcaatttctggcttccgtgaggaatctggcctccacctggagccagcaatgtctgtctggcactggctgagccccaggcatcagcacccctcaccacccggggaaagctggtttccattttacagaggacctggagacttggagaaaggcttgacacacgtgaggctggtcacggagaggtgggggggtcccagtgggagctcatggccatctggtcacctccctcctcatccctgtgcactccctgagccctggccagagccctgctcccagctacttcaggagcagtggcttttgtggcaatgggcaagcaggcagtggccggctctacccagcacacgtggcactaccatggctgcctggccggggggcagcctttgacctctacactactgaccacagggaaccaatgagattctccggatgtacatcgccctgacgggtctgcagcatgccggccgcatcctgactaccaggatccagtaggtgccattgtcaccgtgtgcttctcaggtcccatacctgcccagcaggggccagtccagggcagtgggaggaaagagctgccttgacctggagtgggggcatgggggtgtggcgcagccttgtggaggggaccttcccctgtggtagtggggggcttgctgcccagggaagccctcgctgccctgcccttatggccacagcaccctacagcttcagcataaataccgtatcccccatctggtccctcacactagaggcagctggtttttcagaacctgaagaatgagaggtgtccctttaaaggtgccaggcctcacagccaacataagccagtgtttctcttctctgcccttcttcccctcatgctcccctccacccccaccctaggggcacagtaatccaaaatcactgctggaggccaagtacaggttgctagtagcattttgtctccttcacaggagacagctgctgggaagctggctgtgactccacccctcatgggggagcatatgtgtggctcccctgaggagactggctgctctctggcaggtggtgggtttgggggggttcaggctgtagccaggggcccagcatacccaggccagaggggggcacggagcttctgggtgccgaatgggccatgttgctggacagtgagcgccagcagcgaggcctccagtcacaggaccatggactttctgcagtgagcttaaacaggccaaagtgagcacagtcatggataccgttggccggaggcttcgggactccctgggccgaactgtggacctggggctgacaggcaaccatggagttgtgcaccccagtcttgcggtgagtgggcctaacaggcataccccctatttcaatgccctcctgccagatctccttgtggcagaaaagatctcactgtggggggtctgggcttctccaggggaagttggggaacaccagctagtccatgacaccctggattgcttcccccagatggggcatctctgcctggtacccgggctgtgagacaggacagggcactgtagggatgaggtgctgaactgagtcctgtcttggttaataggacagtgccaacaagtttgaggagaacacctactgcttcggccggaccgtggagacactgctgctccgctttggcaaggtaaccaggccctcccaggcctgggtcgcaagcggtcctccaatttggccagcattcatgagactactttttgtcaagcatcctttgggaccaggcctagaacagaaatgttgatcaccctggagggatggggtggtgaggtcaggctgactttgtcagcctggggcccacttagctactcggatgggtacccttgctgggtgagttttctgcagtgtttttctgtgcacctttcaggtagagaggctccctagaatcgggagggcagctccacctggggcctgaatctagggacctgattggtggggcccttgctgctgaaggtggcagtagcacagtaagcactggcttctggtctcagccaagcttctgggacctggtcttgccttaacccctccctgaatctagagctcaaagagaagggaaaacagaaggtggctgggagccgttctcccacaacctgaagagaaaggtgttattgactccactttctcaaggaacacaggagactaagacaggcaaagatgcagcccagggagggaccatgtgggggactggtctaggtagtgagtccccacttggagcctctgtgatcccagaccatcatggaggagcagctggtactgaagcgggtggccaacatcctcatcaacctgtatggcatgacggccgtgctgtcgcgggccagccgctccatccgcattgggctccgcaaccacgaccacgaggtgagcccagcccagcctcacacagggcctggctgctgccatctgtcctgctgcactttaatgaagttgattgttgaggagggtgtggtcgggtgtgggggaggctgtgcaggttcaccatgcggtggccgtgggagggtctgtgctgctcaggagatggggctgttccctttcttcttcctgactgagagaagagggggtgagtgacaggggttcctgatcccagtgcccctacccccagcaagggacagaccctgcacattgcccgctgtgctggagggaggcgggtgcagtctctgaggacccactgtataccaggatctctgcctgcactttccagagcacctgcagataccaggattgtgacatctgcctttcagaggaaacagggtcagagatgttgagtcacttgctgttggggaaaggctgttggatcagggctggaattagaacccaagacggggtgactcctgtgccaggccttgtgacccctgccatgctacccagtttggctgataggctgggtttttgaagctcagaggtctgattccaggaatttgggcatatcttttctgtcctcggttctggcaggttctcttggccaacaccttctgcgtggaagcttacttgcagaatctcttcagcctctctcagctggacaagtgtgagtggcatgtcttgggggagggaaggaagggcccacttctaggcccctattgatggtgagctgtttctggaccctgtcaagctcccagagcctgctagctactcacagacctctgccttgagcgagggcctgggtaggcctgggcttagctgcagcagtgcccaccaggcactgtaggtgcatacctgccccattcaccaaggcagttgtatgtatatatgtgtgtgtgtgtatgtatgtatgtatgtatttatttcgagatggagtttcgctcttgttgcccaagctggagtgtaatggcgcagtcttggctccctgcaaactccacctcttgggttcaagcgattcttctgccccagcctcccgagtagctgggattacaggcgcacgccaccacgcccggctaattttttgtatttttagtagaaacagggtttcaccatgttagccaggctggtctccaactcctgacctcaggtgatctgcctgcctcagcctccaaaaatgctgggattacaggcatgagccaccgcaccgggcctgccaaggcaattttagattgagcaagtgcagagccctttgcgcaggacccctggcatctgcccagcatgcctggctgtattctcttttttttggagacatagtctcactttgtcacccaggctggctggagtgcagtggcatgatcttggctcactgcaacctccacctcctgggttcaagcaactcctgtgcctcagcctcctgagtagttgggattataggcacgcaccaccatgcccagctaatatttgtatttttagtagaaacaaacagggtttcaccatgttggccaagctggtctccaacccctgacctcaggtgatccgcccaccttggcctcccaaagtgctgggattacaggcatgagccactgtgcccagccctggctgtattcttgaagctgcccggggaaggctcacgaagggaggagcatctggttgtacctgattctggagacagcattttacctgcccctttacccactgtactccatccaaaatgaccctgcagtgccctgcagaggtctcaggccttggcctagagaacagagggctttgctcgtgctccccgctctgtctgcagtgctcttcctcttctatagccactcgaccatatctaggaatgcccagctcagtctacctctgaccctcacagtcctgttgacctgaggttctggatcagtgtccccacaaagcccagtcgtgttgccaagtgatgggtgtaggcgccagcactgtggcacttgctgagagtggcatatgattttttgcaggtcctagccctgggggtagcccagacacccccccagtgctgacaggttatgtgctgtggagggtgctgaaatggtttctcctccagtgggctggaatcacagatgggctgtttacggagcaagtgccggctccaccccatgagatctgggggttagagatgagcaggatgagtcctttgtaactgagaatgaagctgtacccctttctctccctgcagccctgaatcacttgctgggggtctggaggaggggttcacccttagggctgcttcatggtgggtgggctgactttgtggaaaaatgcccccacttcagccatgtttgtcttatcacggtgcagaaagatcacccaccatctctccttttccttcccagatgctccagaaaacctagatgagcagattaagaaagtgtcccagcagatccttgagaagcgagcctatatctgtgcccaccctctggacaggacatgctgaggcaggggacagtgtcccctgctaccgcccgcccctacccatggcccgttgctggatgactgttactcttttttcagaaggtgttgggattatcacaggttaagccttttgttccccgtctgcacctgaagggttgtcgcctggcctgggagagcctcttccaggttttgacctgcaggcagtgctctctaacaggaccatcacagcttctgaactgagccggagagagagaatggaattgctgacccctggaactggcgggtattctggtcattgaggagacaccatagtggaaactggggcttatgctgctgcctccagggtgtgaggtgggtggggacctgtgtcaggtgtggatagccatttctgctcaaccacacattctctaagaaacagcttgaaagctctgtctgggtcattcatttaaactagaagcagaggcacttaaaacatgtaccaggaaccatttaacaaagaatataaaatgtcacaatctgtgtactgtta

SEQ ID NO: 15353 - DNA, 33369 bp, Homo sapiens
gctaagaaggggagactgaggctgaggctggggaacatcgggcagcatgagcggctgcgggctcttcctgcgcaccacggctgcggctcgtgcctgccggggtctggtggtctctaccgcgaaccggcggctactgcgcaccagcccgcctgtacgagctttcgccaaagagcttttcctaggcaaaatcaagaaggtaacgcgagccctgggcgaacccttgctgtctggctcccgcttttcaccctcagctgcaagactggtgttgaactttgtgagattccccaaacctgccagagagatacaccctgcggccgaggcgtgttaacactccggattcctgagttccaggaaaaccttcccagagaaagggtgagacatttccaagacgggggacccttggaaatgtggtggtgacgtgttccagctaaattttgtcaggggaattcggaaaactctaggctaggtaattaacaaagcagccttcatctcagctggtctggtctggaaatgtgcggggcttcctctctgattcctaaacagcttacaccatgtccctcctcagtcaccttccagcgccctggggcttccttccccaggtgagcccagcgcctctccctgccattgaggttcctcagaaatctggctccaagatgcttcccaagggtggcacaacccagccaatagtaacagtttggttataaaacactcattgtcttcttagagttggaagacttgggtttggtcttggctcgttgactttgaaactcagttgttttttttgagacagagtcgcgctcttgtcgcccaggctggagtgctcactgcaacctccctcctgggttcaagcgattctcctgcctcagcctccggagtagctgggattacaggcgcctgcccggctttttttttttttgtatttttagcagagacggggtttcaccatgttggccaagctggtctagaactgacctcgggtgatccgcccacctcggcctcccacagtgctgggattacaggggtgagccaccgcgcccggccaagactcagttctttcagccttaaaatggagatagtgttgtgtctccttcacagatgtgttgtagagccccagtgagataaacggtgcatggagagtcttcttaaactgtagagtactgtgcagcagaagagagagctggcttcaacacttagtcttgtgaccttggagctgacggctgcacctccctgtgcctcagtgcattcatctacaaaataggaataaacacatttcttgctctttcctttgtatttcattttatcttctaaggaaaccaacagtatacttgctatttcgtcgaggtgccctactttgaacttggctgaatgttggctgatcctgtatcacagaagttattccctggcttctctttggaacgttcctctgaggttgtcaggctgatacctttatagcaagcaactttacagatgaagaagctaagactcagactaaaagcagtttgcccagctagaaagtgcggagctatgtcttgaacatattggaaaaccttttacccaggacctggggcagtgtggtgctctatcctgggacttcctgctatccagcagcatggtgaagaaagaacacagatctttcagatctgtttccatctttaaacctctggcactacctgccctgccctgcctttactctcagctgtcagctttgcttcccattccactgggaaaatccatgcagtcggatgagaagttcacaggcacagttaccccctcccgctgcatatgtgccggtattatctacattctgttactgtgaactgtctgctcctggcaaaaccaacctctcattagactccaggtcttctcacctactcaagggtaattctttcctttctctgcatcattaactgttctctctactggatcttgagcccttaccattcaggcatttgtccctaatggccatagaagtcagtaatgacctctctgttatcaaattgtgtgatctgttctcagacctcatcctacttgacccatcattggcatctgacaccgttcatccttccaccctgttgacgcactttcgtctctggtttctgaatcactgttctcgccattctctgaatgttctaaatacttcactggctgatacttctctgtgtccattgctggttcttattcagctccttgaccgctaaacagtgaccagtgtttccaactagccaagttggaatttactaaggctgggtctcgtttcatctacagccatctgctgggtgaccttatttagtgtcctggctttaaatatcatcaatatcctgatgcctcaagtttctttcttcagttcagatttctccctgaactccagattccttttgctttttcagagttgggggctttctctgtcacctgtgctggagtgcagtggtgccatcatagctcactgcaaccttgaactcctaaggctcaatagatcctcccacttcagcatccccagtagctgggactacaggcacgccctgccacacccagccaagattctttttttaatctacctttgtactcaaaagctgtactaagaggtctaacaggcatttgagattaatagatcccaaactgagttcctggttcccacccaatcctgctccttccaccagccttctttatcatagataatggtggctctgttgttccacctgttcaaacagaacacctggagtcaccttgtactcttattctcctagtccacttctaattccacagaagatctggttttctctacttttaggttcttagaatctgaccacttttaggcccttctgctgctactttggatcaggccagtgtcatctctcacagccttactgggattagagcagaaacatgggacatgatgcttagaatctcagattgtgtaggccagtggttgtcaccctgccctaagctggacccaagctattcatggagtgtcctggaactgctgcagggatgggtgggaagttgagtgggtgggatttgggtgcctgttttccctatcagcagtctcagtcagagccgcctgcttctgtctgttttacatatttggtttctgcactagatttctttgaataacaggttccacttttttagataatttacaaactgtttattgcaattgaactctcctcccctaaggcattgacctgatttgataacatcaggatctttctcccacgcccctgcaatctctcctgtgtggcaggttttctgtggttgtacctgaaggccaattagttgccaggcagtcttatctggcctgcccactggtaccagaatgatctctaacacagcccattgcacaagacccaagtgtcagtgagcctctgtgttcagtgaaggagactgagctttgatataaaaggctgcagagtgatggagccatcagcttgtttttttttttttttcttgttttttttttccttgagacagtgtcttactctgttgcccaccctggagtgcagtggtgcaatcacagctcactgcagcctcaacctccccaggctcaggggatcctcccacctcagcctcctgagtagctggaactacaggcgtgtgcaaccacgcccaggctggttttgaactcctgggctttaagcaatccccctgcgtcagcttcccaaaggactaggattacaggcagtagccactgcaaccagctaagcttgtttttttctttttcttttcttttttttttatggagtctcactctgtcacctaggctggagtgcaatggcgcaatctcggctcactgcaacctccacctcccgggttcaagcaattctcctgcctcagcctcctgagtagctgggattacaggcgcgtgctaccaagcccgtgtaatttttgtatttttagtagaaacggggtttcaccatgttggtcaggctggtctcaaactcctgacctcgtgatccgcccgcctcggcctcccaaagtgctgggattacaggcgtgagccaccgtgcctggcctccaacctttttttttttctataccaccttcagggtggttttggaatggatggaggcagggattcctttaagttggctgtcacttttagttagggactcacctataagcctgtggtcctgggcccagagaggagaaagcagtgcgagcatattgatagagtagagaaatctgttggctgattagctgtacaaggtctgaggagaaggttgaggtctccccaagacttctctagaacacttggtgagaggcgccatgaggacaggtgatgcttgggcttatagctctgactcaggacatcactgctcaacagcctgaagcccacatccaaagctcatgtcatgctggcaattgaaggggtagcagagcccaaaagtccagaggggctcagcacagggagcagatgtctgtgagcaggagagacagcggctgtagggatcgatgagacttggtaagcatgatgtgctcttgtcagcatagcatctttgagctcacacaataattgatgtagaattgtccatttcagtaaggagtttccacatccactatcttccacgattctcacaagggccttgagtaaatattacctgcatgttatgggtgagaaaggggtagtttagagagctgaagggatttggtgaaggccacataatgagtaagcctgaaatcaaggaccagacccccaggcttctaaatgttagtcttgggctccttgtttcatgggactattatcatcccttgtactgagaaggaaaactgatgaaaatcgggaagaacctatttgaacaggggagggagatggatgtgggtggtggagcctgcacatagtttctgtatctcaggaaccttgtgaggtttgctttccagttccttcagtacgtcatgtcccgctggccagggtggagtggagcacatgtttttccttcccttttaactgatatttccgtgatgggagtgtgctaaaaattaaattttttagaaaatatttactatttttagaaagaagttttcccatttccagaagttagccaagatgaacttaatgaaatcaatcagttcttgggacccgtggaaaaattcttcactgaagagggtatgtatggttttctttaccattgccgatttccattgtaagggctatttggttgatatttatattagaagtgacatacataggagaagtcttcttgagggagaaatggtttccactcataatattttgctttaggtttcatccctattgccatttaattaaaaaacatccagttaaatgcttctcattgtatttgtggttcaggagcactttaaacatttccatactgttccaggtcaacacttccataaagctataataaaaatgaataactaaaaaaattagatggcaaaaagccaaggccacacaccatacaagcccatggagcatgtgttggttgttgtggcagtgtacagttgctcttagtgtttctaaaggttgagtttcaatttctgtactttggtaattgtaaacaaagagtgatttgtggaccagccacagtttggcacctgcatggtgaggcagcatttgacctcaggtccctctctcagagctgttggccggtcctccagccagggccttggtggagagttcagtgatggtggatggacagcaggtcttccctaatagtaggatcctggagagcttttgtttatatgaattttatctatcaatatttgccatcttaggggttattttatttttattttactttatttttttgagaaagggcctagctctgttgctcagactggagtgtggtggtaccatctcatctcaccaccacctccatctttcaggctcaaacagtcccccaacttcagcctcctgagttgctggaactacaggtgcgcacccccatgcccagctaatttttttgtatttttcatagagacaggttctcactatattgcccaggctggtctctactcctaggctcaagtgatcctcccaccttggcctcccaaagggctgggattacaggtgtgagccaccatgcctagcccctcttagaaattaaaactgagaaatttaaaatatactgtggggctgggtgcagtggctcacgcctgtaatcccagcactttgggaggccaacggggacagatcacctgaggtctggagttcaagaccagcgtagccaacatggtgaaaccctgtctctactaaaaatacaaaaattggccgggcatggtggcgggtgcctgtaatcccggctattcaggaggctgaagcaggcgaattgcttgaacccaggaggcagagattgtagtgagccaacattgcaccactgcactccagcctgggtgacagagtgtgactttgtctaaaaaaaaaaaataaaatatactgtgttcatttgtttaaaaataataaatccattacatgttaacataatatttttaatgaaaaatattttgtttttgtttttccgagacagagtctcactctgtcacccaggctggagtgcagtggtgcaatctcgactcactgcaacctctacctcccaggttcaagtgattctcctgcctcagcctcccaagtatctgggactgcaggcatgcaccaccacgcccgggtaatttttgtatttttagtagagatggggtttcactatgttggccaggttggtcttgaactcctgacctcatgatctgccttcctcagcctccccaagtgctgggattacaggcgtgagccaccgcgccagctaatgaaaaatattttgaaaaataatcaggccaggcgcggtggctcacacctgtaatcccagcacttacggagactgaggtgggtggatcacctgaggtcgggagttcgataccagcctgaccaacatggagaaacctcatctctactaaaaatacaaaattagctgggcgtggtggtacatgcctgtaatcccagctactcaggaggctgaggcaggagaatcgctggaacctgggaggcggaggttgcggtgagccgagatcgcgccactgcactccagcatgggcaataagagtgaaactctgtctcaaaaagaaaaaaaaaagaaaagtaagttaaaaaaaaaaaaagaaaaaaattgatggaaagagtgacattggttgaaagttatgcaagtccttttaatgtttggcttattagaagacagctggattctcatacctgtttgtgcacgtaacctctggaaaagtccactgtgcagtctttttttttttttaactgtctttttttataatcttcagacatgctttttgtttgtttgtttctgagacagtcttgctcttgctttgtcacccaggctggagtgcagtggtacgacctcagctcactgcaacctctgcagttgaagtgattctcatgcctcagcttcctgagtagctggaattatagcacgcaccgccacgcctggctaatttttgtattttcagtagagatggggtttcaccatgttggccaggctggtcttgaactcctgacctcaaatgatctgcctgtaatccaaagtgctgggattacaggtgtcagccaccgcacctgtcctgacacgtgcatttaaagcaagaaacacacacttccaggacatagggctctgtcagcaataactgtcatctttgtatttgcagagatgtaaatatataagaaaccggctgggcacggtggctcacactggtaatcttagcactgtggaagactgaggggggcagattgcttgagtcccagagtttgagaccagcctaggcaatggagcgaaaccctgtctctactaaaaatttaaaatattagccgggcatggtggtgcgcgcccatagtcccagctacttgggagtctgaggtgggagaaggtacccaagcctgggaagtcaaggctgtagtcagctgtgttcatgccattgagctccagcctgggcgacaggagtgagaccctgtctcaaaaaaaaataaaaataaaaataaaaaaataaataaatatatatatatatatatatatatgcaagaaaccactgcaaaccaaacccactccctctcacaggaacaaaggtctcttggaataaatagcaaatgctggaataaaaactatgttcattcagctgccatgatgtgaattcaaaaaggaagttaaatccaagggcaaagcagagaaaagaacatacaaaaatacacctatttcatgtacattcaaagaggaggctaatcactgtggacaaagggccctctggaatgacagctgtaggcagccagcagtgccacggaaatagaggcactgtcatctggagacacagaaaaatcacatcctcccacaactggcctctatgaaaaccaaccaggacagacaacccttccccaaaagtaatggccaagaataaaagcacaaatattgctggaaatccaagtagcctgttttactgctttgagtgacttatatgcaaacctaagacttttttctgaatccttgatcaagatttattcatataaaggccgtacataaattctgggaacatggtactttggactatatattggactctgagccaaaacgttaaatacactacactgcgccccactgtacagtcttcagagaattagaatttaaaagcaagtaacatcttaagtagttttaggccaggtatggtggctcatgcctgcaatcccagcgctttgggaggccgacgtgggtggatcacttgaggtcaggagtttgagaccagcctggccaacatagtgaaaccctgtctctactaaaaatataaaaattaaccaggtgtgttggtgcccacctgtaatcccagctactggggaggccgaggcaggagaatcactggaacccgggaggtggaggttgtattgagctgggatggcgccactgcacttcagcctgggtgacagagtgagactccatctcaaaaaaaaataaaaactagttttgatcctgtgggaccccctagaagcagctcaggtcccccagaacctctttgagaagtgccaaattgtcagctgtcattacattgcttggtttttgtttgtttcttatttcacacctggtgatcacaaattatatgttgctagttttaaaagttgcttatttatatataaacataatttataatttagaaatacttatttctgctttttttcctagtgtttatcttcctatttgtatctttttttagctcccatagtctcttgttcttttatttaaacttttcctatgtggtttgtcaggtttttttttttttcaggtttaattaaggaataattgatttacaataaattgcacacactgtcatgtgacacataatgacattcaagtcaatgacagaccatatatacagtggtgatcccataagatcatcataccatatttctactgtatcttttctatgtttagctgtgttcatatacacaaatacttaccattgtgttacagttgcctacagtgttcagcacagtaatatgctgtacagcttttttgttttgttttgttttccttaaaaaaaaaaaaacaaaaaatatttaacagtgagatggggtttcactgtgttgcccaggctggtttccaactcctgggctcaagtgatcctcccgcctcagccttccaaagtgctgggattataggcatgagacaccacgcccggcctactgtacaggtttgcagcctaggagcaataagccataccatatagcctaggtgtgtagtaggctctgccacctaggttgtgtaagtccattctgatgttcatacagggagagaatcacctgacgcatgactgtatttagagagtacccctcaggagccatcagtgcaacagaggaagtgaacgtactcattacccgtcaaagtttccttgtgcctcttttatttcccccctgtttccaggcaactgctgatctgttttctctcactatagattagttcgtattttttggaattatattatgtgtgattttgtctggcttctttctgcataattttgaatttcatccatggtgcatgtattggtagtggcttcctttttaatgctgagtcatatttctttctatggatataccaagatttgtttatccattcaagtattcatcaacatagggtatgtatccagattttagctatcaccaaaaaagttgccataaacattccttttttcctctttttctttttttaagagacagggtctttctttgttgcctgggctggagtgcagtggtgtgatcatagctcactgcaacccttgaacttctgggctcaagccatcctctgcctcagcctcccgcatagctaagactacaggcacacgctaccatgcccagctaataattcttaaagttttttgtagaaatgggttctcactatgttattcaggctggtctcagactcctgggctcaggtgatcttcctacctcagcctcttaaagtgttgggattacaggtatgaaccactgcgcctggcctgtatttcctttttttttgagatgccatctcgactcactgcaacctccatctcccaggttcaagcgattctgcctcagcctcccgagtagctgagattataggtgcgtgccaccacatctggctaatttttggtattttgagtagagaaggggcttcaccatgttggccaggccaatctcgaactcctgacctcaggtgatctgcccgactcggcctcccatagtgctcggattacaggtgagagccacctcgcccagcctggcctgtattttattttagaaactttatagttttggctgggcgcagtggctcatgcctgtaatcccagcactttgggcggccgagatgggcggatcatgaggtcaggagatcgacaccatcctggctaacatggtgaaaccccgtctctactaaaaatacaaaaaattagccgggcgtggtggcaggtgcctgtagtcccagctactcgggaggctgaggcaggagaatggcgtgaacccgggaggcggagcttgcagtgagccaagatcgcaccactgcactccagcctgggcgacagaacaagactccatctcaaaagaaactgtatagttttaattcaggtttagaactatgattcattacaagttaatttgcatttctttatcaattttacaattttcaatgtctgcaaaaaggcctacaattcttaaatggttggtttatcttttagagcaattttttttttttttttgagacgaagtctcactgtgtcacccaggctgaagtgcagtggcgctatcttggcccactacaacctctgcctcccaggttcaagcgattctcctgcctcagcctcctgagtagctgggactataggtgcgcatcactatgcccggctaatttttatatttttttagtagagacagggtttcactatattggccaggctggtctcgaactcctgaccttgtgatccacccgcctcggcctaaagtgctgggattataggcttgagccaccgtgcccggccagcaatttttaaaataggaaaaaaggatcttgtagttacccatgtagttactgattccagggctcttcattctctcatgtagagtcagattcccttttgctaccattgctcttctgtgggaaggacttcctttcacttttcatgatgtgcagctctgcaggggatgcatattctcacttttgtatgtctagaaaagtttcagccaggcatggtggctcatgcccgtaatgccagcatttagggaagccgaggctgtcagatcacctgaggtcaggagttcgagaccagtctggccaacagggtgaaaccccgtctctaccaaaaatacaaaaattagccagatatggtggtgtgcacctgtaatcccagctacttgggaggctgaggcaggagaaccacttgaacccggcaggcagaggttgcagtgagctgagatcacatcactgtactccagcttgggcgacagagcgagactccatctcgaaaagaaaaagaaaaagaaaagtctgtttcatcagaacaggtttctgtgttgacaggatttacctttcaggccattaattgtgttgctctgctctcttcctgacttcatattgcttcagaagagatgtctgcttccattctttgttcctttgtacatagtgtttttttcatctctggctgcttttcagtggtttttaggaaaattgattatcacatttatttatgtagttttttgcacatttattttgcttggagttgtttgaacttcttggctctgtgtgtttatactgtttattgaatttggataaacagttgtacacccatacagtgaatactgaacaacaaaaagtaatgaagtatttatacacgcaacaacacgggtgaatctgtaaatcatgacctgagttaaagaagcccgggaaaataggtgccatatggattcatttatataaaacttgaagatgcaaactgatctacagacaaagatttgtggttgcctggggatggtggacagatggatcgatcacaaaggggcatagagacttttggtgaaaaaggaaatgtttttatctcgattgtcatgttttcactgacaaatatgtcagaactcaacaaattatatattataaatatgtgcaggttattcttcgccaattatgtatgtcaataaagttgttaaaggataaaaaatgaagggtttggcctgcacttttgggaatctgtagttctcttagtgacccatgtatacaaaaattcttaagtgtaggttatggtgtttttaacaatttataatactgatgaagtttaattagcaattcagaagtacactttaattaatttgatgcatacaaaagtgtgcaattataggtctaatgctatgctattgattgttcagttttgctgtagtgaatgtgaatttttattttagagatgagatctcactctgtcgctcaggctggagtgcagtggtgccatcagagcttactcaacctcccaggtcaagtgatccttccacctgagcctcccaagtagctgagactacaggctgaatgtgaatgttgaatgaatgaatgaattggtgttaaacaggctaaactgtctcagaacttgtggattgtgctgaaagcagtatggcctctggcagtgaagtaaaccttggcccagatactgccatgaggtggctatctagctgaacattttagtacaattctgagacttgcatatttattctctcatttcctagaaaataccggccaaaaaaagtatgaggtctataaggaggaggaaaaacatgaagtttaacatgcctatagaaaaatttacatcccatgaatgtatataatttgctgctgttttacacagcaaaagcacccctgtgactagcacccagatcaagaaatagaacaccacctagctctggcagcttttaacaattttattctggccgggcgtggtggctcacacctatgatcccagtactttgcgaggctgtggtgggaagattgcttgcgttcaggagttcaagaccagcctgggtaacatagcaagacctcgtctctactgaaaaaaaaaaaaaaaattagctgggtgtggtggtatatacctgtagtcccagcttctcatgaagctgaggcaggaggctcacttgagcctgggagattaaggttacgtgagctatgattgtgccactgcactccagcctggatatcagagtgagaccttgtctctaaataaatatataaaaataaaatttttcctgggctcattacataaaattgaacacaggccaaatgaccatgactacagaatttctagttttgaaaaagtttctactctgggattatatatgattaatatataaacactgtcctgtttacttatatttgtagaaacatagcttatatttgtttaatcaagattttcctcttggcagtggactcccgaaaaattgaccaggaagggaaaatcccagatgaaactttggagaaattgaagagcctagggctttttgggctgcaagtcccagaagaatatggtaagtcaagcaaacaagcacccagccagtttagctcttaagaaagcactctgtatttgtccataacaggtctagttgctggaatagatgacaccatccgtggtgggctacttggtaggggtggactgactgaaggacctgtagggaggaagtgttctcgggtcctgtgcttctcatcctagcacagaggaatgaggcatgtggtctggctggctgtagagtgcaaggcacatcgaggtgggagattggaccagtgggaacctttgagcagggtcctttgtcctatggactgtccctgtaattctttgagcatcctagtgatgtttttagcccccaagtggcggttctgccttattagagttggccagtcactacaacttgcctcccttacgctttttctcgagttggtcacctgaattctgcagaggttaaagggacaggcaagcagtgtgtagaaggcaaggtagaccttcaaggttcaaagggatagaccacacacatgtgtgccatttgtgtttaccctcaggcccttttgatataaaattataaaggccaaggatgctgctaagcatctgacaatccacaggacagacccccaaaacagaaaacaatccattccaaaatgttacagtgccacagtggaaaagctctgtcctggagtcctctggatactgggcagtgggtcacactatagttgttgcatttataaagacctacagctgtgatggaagattctcactacatgttaattgattcgatgtgtgtgtagatatcttcatatttaaagtatatatctacatatgcttgtatgcctagaaaaagtgtggatggaaggatatacacagaaatgcgctttctgaggcacaagattgcgagctttttttttttttttttttgagacagggtctcactctgtcatccaggctggagtgcagtggtgtggtcatagctcactgtagccctgaattcctcgggctcaaacaatcctcccacctaagccttccaagtagctgggactacaggcgtgcgccgccatgcctggtgaattttttttattttgtagagctggggtcctgctatgttgcccaggctagtcttgaattcttggaaccaagcaatcctcccacctcagcctcccaaagcgccgggattacaggcgtgagccactgtgcccagccctcgatttttgtttactttgtacctttctgtattgtgattttttttttttttttttttttgagacagagtctctctctgttgcccaagctagagtgcagtggtgcgatcttggctcactgcaatccctgcctcccaagttcaagtgattctcatgcctcagcctcctgagtagctgggaccacaggcacacaccaccacacctggctaatttttgtatttttagtagagacggggttttgccatgttggccaggctggtctcgaactgttgacctcaggtgatctgcctgcctcagcctcccaaagtactgggattacaggtgtgagccaccatgcccggcctgtattgtgatttttttttttaatatggtgatctggcattactttataatcagaagaaaaaaaaaagccaatgaagccttaatgggaggaatctagggctgggctgtgattgacgctggtccatctctcctaggtggcctgggcttctccaacaccatgtactcaagactaggggagatcatcagcatggatgggtccatcactgtgaccctggcagcgcaccaggctattggcctcaaggtcaggtatctggggattctgtgtggtgctctctgtaggtcttctggagtcacatggaggcatagaggccagaggcttgctccctctgaattgggcctgatatctgaccttcagccctgcccttcagttccctcactctggccacacctcatggtgctcaatcctcacacactgcccacatgcgcagtggcctttgggtcgcatgtcccttccttctgaatccacctcctgtccccattgcctctgatccacccttcaaggcccaggtagggtgccactgccttcgccttgggctggaagtggtctctcctgagccttcgtccttcagcctgagcatgcccccactctttatgcaagccaccttctccccactgggcttggagcaccttagggcaggcccagggtcaaccgcccttactggcaatctcattactcagattatttctgcttaatgttgacatcaaagagagctgaatgcacaccatgctcggctcccccaccccagagagcgcacacattcatgcagatgtttagtgaagagggggactgtctttgtggcactgggagggcagcaggtgggacagccctgacactgagcaccttctttaggataggcttggttccagcactcctgtgtcttcacattgcatcatccagaccctgtcagtgggtgggagtggcccagtttgtggatgacaagatggaggaggctttctttggaaagggatatcctttgcccaagaccactagtctgggaaatgaaggaactgatatgaaagttttggacacagactgcaaagcactgtgggttgcacaggctcacggcactggcatgtgcgccctgaccgtctcctcagcagcttggctccctgggctctgcctgtggccgcttgctctgagttcttgctgtcttctcttgcccgaagtaaatatttgcctcagaaaggaaatgtttcacaaacacctcatgctctcctttctccccacagctgacattagtctgtgtctgttttgtttaggggatcatcttggctggcactgaggagcagaaagccaaatacttgcctaaactggcgtccggggagcacattgcagccttctgcctcacggagccagccaggtctgtctctgcacaaaacgttatccctcagcagctgtgatgttgcccaagattcactggggcaaggggctgttggttttgttgagtagctgacttttccttctttccaaaatcttgcaaagaatcaactcagcaactgttcttgccattcctcttatcttgaccttatttctctgtcccagtgagacttgcaagtgagataccacgcttgacagcacttattaaataaatttttgtggtttacaacacaccttgacatacaatatagtaataacgttccggcttcaaagcacctttcagaatatatagcgtgggtggtactgctcccacttacacattaggagctgaggttcagtgaggctgtgtgatctgctggatggagcagggctgcggcagcactcgggactctgatgataagtccatcacctggaccatcctccatcctgcttcactttgcatgagaacctgggaacagtcatccttcctggggtgcccagaactcatcctcacaggacctcagatgagcccattgcaagcacccatttccatgtttaaacctaagcccaagttgttttcactgccgcttttttacgtgatgtattgaagcagaggtcggctaaatccagcctcctgcctgttttttataaataagttttgtttgtttgtttttgagacagggtcttgctgcgtcacccaggctggagtgcagtggctcaatctcatctcactgcaacctccgccttcaagcgattcttctgcctcagcctcccgagtagctgggactacaggcatgccccaccacacccagctaatttttgtatttttagtagagacggggtttcaccatgttggccagatctcaatctcttgacctcgtgaaccacctgcctcagcctcatgttctattaatagcagcagagttgaggaggtgagacagacatcctgcagcttggaaagctgaatatgttatctgacccttcattttaaaagtttgctgacctcttacaagtactaaaacctccattttcaggccctcaaaagcattcatatttattcccagtattctcccttgaccacatctttctgcatctgcagtgggagcgatgcagcctcaatccggagcagagccacactaagtgaagacaagaagcactacatcctcaatggctccaaggtagggttccttccccatggccacattagggtctcagtcacaaccttcactgccactgagtgagcactctccacacaccagggattgtacctgctgctgtagcaccgactaccttcttgagctgcttttatgtgtttgtttttaattttttttagttttttttatttgcgatggagtctctgtcacccaggctggagtgcagtggtgtaatctcagctcactgaaacttctgcctcccaggtttccaatgattctcctgccttagcctcctgggtagctgggattagaggtgcgtgtcaccactcctggctaatttttgtattttcagtagagatggagtttcaccatgttgtccagtcaggtcttgaactcctgacctcaagtgatctgcccacctcggcctcccaaagtgctgagtttacaggcaatgagccactgtgcccggcttgtaaacccaaaaaatctttaaattttttgttacacaaagtttcagacatattctgtgtgcctggctggccctaactccggcagtcacctgcttatggccactgtgcctcttccagcagcatcgccacctccagatcgcatggtaacaatctcagcatgcctctctaaaagacaggagttttttttgtttgtttttgttttttaataaacacaaagccgtaatacccttatcacattttaaaaattgataatttctcttttcttttgagacagggtcccgctctgtcacccaggctggagtgcagtggcacgatcttggctcactgcagcctcaacttcctgggctcaggtgattctcctacctcaacctcccaagcagctgggagtacaggcacacagctaactctttgtattttttttttggtagagatgggttttcaccgtgttgcccaggttggtctcaaactccggggctcaagtggtctgcccacctcggcctcccaaagtgctgggattacaggcgtgagccactgtgcccagctaataatttcttacttctatcagcattcaaatatccctgattgcctcatacctttttttggtttaactgtttgcttgaattaagatccacacaagtcccatctgttgctgtttgttaaggagtctgtttctgcctctgtctccctctgtttcctttcctcctcctcaccaccctcccgccttttttcatttctttgtagaattaacaaataaatgttgtgtgtatttacatctacaacatgatgtttttatatatgtataccttaagaaatgattaaaccctttctttcttgaagaaatgcagttgtctggcggtggagcctgagctgtctgacaactttgggtgttctttcccccgcccccgcctccacctggccatccatgtcccttgggaaaatccttgctctggggaaagtgggctgagccctgtcctctattcactcatgcttggttggcttctgcagagccaaggaccctgcatgtctggcctgaggtctgactggcagctggagcttgatggacaaagacagagctgaggtgggtcacataggggtttggttttctccaaagtccatctttctgtcctcaggtctggattactaatggaggactggccaatatttttactgtgtttgcaaagactgaggtcgttgattctgatggatcagtgaaagacaaaatcacagcattcatagtagaaagagactttggtggagtcactaatgggaaacccgaagataaattaggcattcggggctccaacagtaagtagctcctgtgcgcgcgtgcgcgtgtgtgtgtgtaagggggagactggcctttgacggtgtgtgtgtgtgtgtgtgtgtgtgtgtgtgtgtgtgtgtaagggggagactggcccttgactctgtccaaatagcaagataaaatgagatttaaacactttcagtttttgttaagcattttaaaaagatcaaattaagaatgccacttgggctttgtctttgttcctgcagctgagtgctgctcacttgaaggcctgctggtcatcccctgctgtagctgccctagcagacacaccaccttagagctcagcttacagtccccagcctttagttgtctcagtctgcagtgcctggcagcctgcttcaggctgtgagttgggttcaggtccatctgggttcaggtccatctggaggcttgttcttagagcagatcataagcacctaaggggccaagccaagccatataagtactatttttgccgtgggagacatagtctccctctgtcacccagcctggaatgcagtgctgtgatctcagctcactgcaacctctgcctcctgggttcgagtgattctcctgtctcagcctcccaagtaattgggactacaggcgtgcaccaccacacctggctaatttttgtattttttgtagagatggggtttcaacatgttgcccagacttgtcttgaactcctgagctcaggcagtctacctgcctcagcctcccaaagtgctaggattacacgtgtgagttaccatacctggccacttttttttggtttgttttttttgagacggagtctcgctctgtcgcccaggctggagtgcagtggcactatcttggctcactgcaagctccgcctcccgggttcacgccattctcctgcctcagcctcccgaatagctgggactacagctgcctgccaccacgtccggctaattttttctattttttagtggagatggggtttcaccatgttagccaggatggcctcgatctcctgacctcgtgatccgctcacctcggcctcccaaagtgcgtgagccaccgcacccggcctttttttttttttttttaaatagagatgaggtcttgctatgttgtcctggctggtctcgaactcctgggttcaagtgatcttcctgcctctgcctcccaaaatgctgggattataggcatgagccaccatacccgactgaccctaaaacacatttaaggtctctgttcatgttgggtcagctctttgtattggccacaggaagtcacatggtcatacctagcaggcagggaaagggagggaggtccatccctcctcacagtgggagagtgctacagttagattgcaggggtgtgattgtgttagagttaagaattgagaccagtggtcccagtctaccctaaggcttcaggaaatgctgttctttccctcactttgcttgttctggctctttatatgcctggttcttttcattcttaaacttctgctaaatgtcaccttagaaaagtctgacatagtccttaataaaaatattattatccacccccttgccaacctccatttctctttatcgtgatgccctatttatttcatccatagcactgatcacaatattacattgttttgtttatagcttttgtctcccaaatcaaagtatgagcctccacaaagataggaactttgtctttctatactgtcctaccaaacattggatggatggatggatggatggatggatgaattgcctgcttgcaggtcagatgcagagtggtttgcattgtcagatgatatcttaaatttcatgtgtttcagcttgtgaagtccattttgaaaacaccaagatacctgtggaaaacatccttggagaggtcggagatgggtttaaggtgagttgccagccacagccccttgtaccaggtagtgtcatgagtgcagtttgtcgcccccagcttttgccctatccctgctcgtagcagagtagcctgtgcatggcaggtgactttgcatggttatctgttgggaaattggcaaaatggacactggaaaattggctggctcctagaagaagtgtatggtaaggattaggaatttcccttcacctctgaggccctattcgcctcgagcggaggctaagattcccttctgcagtgggtatgagaaagcagcctgtgggctctggtgaatctcaagctctgtgtaccacaaccctggtctgcatcgctgccctactcttttctttttggactaagacttatttttatcaagagatgattcatatgacaaaggactcaccattttaaaatattatttcagtggtttttagtatattcactatgttgttcaaatatctcacacagaacatttcctcaccccaaaaagaaatgttgtaccatccagtatgacccttaccccatcccttggctgctactcttttactttatgtccctatggatttgcctgtttggaacatttcataaaaatgcagtcatatacaagatccagtctttggtgacaggcttctctcacattgcgtgatgttttcaaggttcatctctctcatagcatgaatgagtaattcattccttttatggctgaattctcttctgttgagtggagataccacattttgttcatccattcaccagctgatggacattggggttgttaccgcttttggctgctatcagtaatgctacttatgaacattcatgtcaagttttaatgtggaaataacgttttcaggtattttgatttatgcctaaaagtagaatttctgtttggcccaagttggtcttgaactcctgggctcaagcgatcctcttgccttggccttccaaaatgctggtactacaggtgggagccaccatgcccagctctggcatggtcctttggaataacgttcagtggtcttgtgtgtggggatgttggtagagctgcaacagtgactgaaccaccttgttctgaggcattaggatggtgctttctcccagcttgagggaaggcaagctgatccacctggcctggtttcgttgcggcctcctccctctgcctccttcagggcccctgggctctccctgttctccctgcaggtggccatgaacatcctcaacagcggccggttcagcatgggcagcgtcgtggctgggctgctcaagagattgattggtaggtaagttagggacaaggccctttgtgccccaccccctgctgccccggctccaaccctggaggctctgccattcccccggccccttccaggccagtgctgaaccaggctaccagcctgagctcagtccctgggcttttgtggagaccagagggtctcctcagcctgcccctgaggtttgttgtcttccgcattcctctgtttcacctccacccgggtgatgctgactgggggacaggctttctgtctggggtggggatggggattggggaatgggctgtctgtctggagtgagaggttgccactgaccagtaggagcagagctgcttggtgagcacacaccaagaaccaggcttccaggatacacggcctctggttcccaaggtccgtgcctcctgggtgactctgcatggtgggtggggagtaggatcgggtttggaacccaggtccctgggcccctggatcttacctttgttctattctgtcagaataccccaaacctccattttcctttgccagtgaacttagaacagccctgtaaccatcctggttgtggtggaagcatttgcggggaaatgggggtacccggggcagcacacccctaagtgctttatgaagctcctctttggtgccaggctctgggcctgttttggcttccctccattttagagatgagaagacagagactcagagagggcaagcgatttgttccagactgtgctcctggacccaaaatgaaagctgtcaggctccaggctcagggctcttcttactcaggcacaaggcctctggggagctcctctgctggggctctgagtggggctcggccctctacacctcctgagtgcaccacacctgggagagcctgtggaggacatggctatggcggggcgggggtgcttctgcctgggagaggcgccatgtcactcttgggcccttagagctcagcactttgtcacagccacacgcctggaagccccagcctgagtattcaagccaggcggccccacctgctttggtcactgcacggggtgtgagcctgcaccacctctgtctggggcctctgtgcctggctttgtgcgaggcgccctcccccttccacctggttgcatcttcacagcgactctgaggtgggggtggtgttcagggaggtgtcgcactcggcctgaggcacagcctgtaagaaccattgccaggattcaagtctgtatctgatgccaaactctgtgtgtgggtgccatgaggaggggtggttctcctctgacccacgggtgctggcaagtgggggtgccagcttctggggtatttgacctcagcagacacgcttctcacagtgcccacctgtgggaagggtaaggatgatggccataggaaatcatgtttgaaccacagaaatattccagttcattctaataactctgctcttcctcagaaatgactgctgagtacgcctgcacaaggaaacagtttaacaagaggctcagtgaatttggattgattcaggtaccaatggttgagtactgtatttgtgcatttcactgtgtgacatgaacggtgtgttcttttgatgtctctgtactggtgacttctgtggtgatttgggaagaagactagttaaggctttatttgacacgggtcactgggcttgcttctcttgggcattgaggcttctgacttaattactttctctcctgtttcacagatttggctctcagcacatgcaaattgtttcttgtgttttttctgaacactccaggagaaatttgcactgatggctcagaaggcttacgtcatggagagtatgacctacctcacagcagggatgctggaccaacctggctttcccgactgctccatcgaggcagccatggtgaaggtaaccctggcatagccagagagctggcgctggagggaggcttgggaaatctccctcactgtgacctttcaagcccatgctgttgcctgtcatcttcctcctgtcattgatccagtatttatgatgcacttgccctgtgtagcactccagggataggcaggcagcggggagcagcagtagggaagtgtccagtgggccagtggatcagtagtttatagcagaaggagaccgttatgataatatccttttagagtaataacattgcatctggcttgtgtgagaaagacttcttttttccttagtttatggccttcctactttctggtatcaaaactttatcttaaaaactaagcatatggcagggcgcggtggctcacacctgtaatcccagcactttggggggccgaggtggatggatcacctgaggtctggagttcgagaccagcctggccaacatggtaaaaccccatctctactaaaaacacaaaaaattagccgggcatagtggcgggcacctgtaaccccagctacttgggaagctgaggcaagagaatcacttgaacccggtgggggcggaggttgcagtgagccgaggttgtgccattgcacaccagcctaggcaacaagagcaaaactccatctcaaaaaaaaacaaaaaacaaaaaacatgtatgagcctgggcaacatggcgaaaccccatctctacaaaaaatacaaaaattagctggcatggtggcacacgcctatagtccctgctacctgggaggctgaggtgggaagagcatcttatttggttaaggtagatactagaatttgcttttgttttgttgagggtggagggtgtcattttttagctgtaataaaaaagatggccacacttggggggaccctactttgtgccccccacaattgtttttaagctggtctctggaattgagctcttgagagaaatagtgagaggtatggcagcttacagaagcaaacatcctggtgtcggcaggagagtctacctaaaaggttgggatcctgaagtggcaaggtccctaaaaaaataaaaaattaaaaacaaaaaggctgggcatcttggaccgtgtttgagtcttttctaggtgcagtctgtgtactgggtgcatttgcatgtgttttatcatctcgttttcttgtcacccttgaacagtgaccacagacattagtttgctgtaggccagcctcttccagatgctaagcctagggctaaacatggcagtatgtttgcccccaaggcacttatagtgtgcacagacagaaagaaatcacggccgctggggcttggcaggaacaggtcaggttttctcgggaaggggagatcttaggtgggttttaaaggaacaggagctcagccaggtgcagatagggtgaaggcaggcccagaggtacagaaggtcatggtggggtagggaacacaagctggccagtgtggtcacggaaggcaaaggacttgaccacatcacccctcaagttcctccctggccgatctcctccccaagcccgtgtgcctcccatgcctccccagccacccagctccctgcagcgtaggtcctccttttggaaaggattcagtgtgacaccccacaggtgttcagctccgaggccgcctggcagtgtgtgagtgaggcgctgcagatcctcgggggcttgggctacacaagggactatccgtacgagcgcatactgcgtgacacccgcatcctcctcatcttcgaggtgagtggccccgccaccagctaagctgtgctccacccccaccctgcctggtcctaaagatgctgctcagggcctcgcagaggcccccgcagcccagggctgggtcgcatgctctcaggggctctcctagccctggcacgtctccttcccgactgctgccctccatgaagtcacaagcctgaggagtcagttcagttagcatgtgccaggtggcaggggagggaactggggccacagagatgacttcggatgctgtgttctgattgtgcagcagggccgaccaagggagatgacagagtgtaaagaggcagggagcgggcatcctccagaggcagccagagttttgtgaagcatgcgctcctggcccctaggggcagaaagaaagggcttcaaccagggccgggtggagggcagtttgtccctaagggcagggtaatagagcgcgccaggcccagatgggactgatctgctggcacaaggtgaatgaagagagagtgaagggctttctgggagcagcagtcagccctgctaggtgggctggggcaggcagtgggtttgggggtgttgaagaaggtatatgggaaggctaaaaaagtagccagactgtggaggaccttgattgacagcagaggaatttggaagccacaaaacgtctttaagcagggcattatttggttgtatctgtgttgtgggaaatgcccccaggggctcagcaagtgctggacatgtggacggggctcatgtggagagtgagttgcagggatgaggccggagaccaggggctctcctgctgggagggaggggctggacctaagagagcacagcaggatgagtgggatatgatggtgggcatgggtatacaggaggcaggcctgagacagggagagggtttgggcctgagcagcaggtctggtgatgagaggcatcatcagcctctgggagtgtagtcttgtctcctgggccgtcctgcccagtgggaggcctccttggctgcttttgttcctggcctacccattgggttccagccatctccactgttgcagtggacatacggggcaagggccagcctgagggcactggagtggtctcagccctgcaaagggtcttctccaaaggcccttcccttagcctgggagggttggggttctccagggctggggtggtcagcagggttcaggaagccctcaaggccttggaagaacacagggctctcgatgtagggtgagagctcctgtctggagcctgctcggagctgggtggtcctgccaggaggcccctgcagtccccccttttcctgtagggagtcctgctgtccgtgatgtcagcctgactgcaggggacagtcctcagtccctagtgctggctgtgtagcctgggtcaggcccctgcacctgacacacagtaccattgtgcagagtgggcagaagcccactggcctctcactgatcagaatcatgggttgggggagtggggagcatgtggccctctgggtgtgttgacacctggcactgaggaggttctagctgccactcagcaatttctggcttccgtgaggaatctggcctccacctggagccagcaatgtctgtctggcactggctgagccccaggcatcagcacccctcaccacccggggaaagctggtttccattttacagaggacctggagacttggagaaaggcttgacacacgtgaggctggtcacggagaggtgggggggtcccagtgggagctcatggccatctggtcacctccctcctcatccctgtgcactccctgagccctggccagagccctgctcccagctacttcaggagcagtggcttttgtggcaatgggcaagcaggcagtggccggctctacccagcacacgtggcactaccatggctgcctggccggggggcagcctttgacctctacactactgaccacagggaaccaatgagattctccggatgtacatcgccctgacgggtctgcagcatgccggccgcatcctgactaccaggatccagtaggtgccattgtcaccgtgtgcttctcaggtcccatacctgcccagcaggggccagtccagggcagtgggaggaaagagctgccttgacctggagtgggggcatgggggtgtggcgcagccttgtggaggggaccttcccctgtggtagtggggggcttgctgcccagggaagccctcgctgccctgcccttatggccacagcaccctacagcttcagcataaataccgtatcccccatctggtccctcacactagaggcagctggtttttcagaacctgaagaatgagaggtgtccctttaaaggtgccaggcctcacagccaacataagccagtgtttctcttctctgcccttcttcccctcatgctcccctccacccccaccctaggggcacagtaatccaaaatcactgctggaggccaagtacaggttgctagtagcattttgtctccttcacaggagacagctgctgggaagctggctgtgactccacccctcatgggggagcatatgtgtggctcccctgaggagactggctgctctctggcaggtggtgggtttgggggggttcaggctgtagccaggggcccagcatacccaggccagaggggggcacggagcttctgggtgccgaatgggccatgttgctggacagtgagcgccagcagcgaggcctccagtcacaggaccatggactttctgcagtgagcttaaacaggccaaagtgagcacagtcatggataccgttggccggaggcttcgggactccctgggccgaactgtggacctggggctgacaggcaaccatggagttgtgcaccccagtcttgcggtgagtgggcctaacaggcataccccctatttcaatgccctcctgccagatctccttgtggcagaaaagatctcactgtggggggtctgggcttctccaggggaagttggggaacaccagctagtccatgacaccctggattgcttcccccagatggggcatctctgcctggtacccgggctgtgagacaggacagggcactgtagggatgaggtgctgaactgagtcctgtcttggttaataggacagtgccaacaagtttgaggagaacacctactgcttcggccggaccgtggagacactgctgctccgctttggcaaggtaaccaggccctcccaggcctgggtcgcaagcggtcctccaatttggccagcattcatgagactactttttgtcaagcatcctttgggaccaggcctagaacagaaatgttgatcaccctggagggatggggtggtgaggtcaggctgactttgtcagcctggggcccacttagctactcggatgggtacccttgctgggtgagttttctgcagtgtttttctgtgcacctttcaggtagagaggctccctagaatcgggagggcagctccacctggggcctgaatctagggacctgattggtggggcccttgctgctgaaggtggcagtagcacagtaagcactggcttctggtctcagccaagcttctgggacctggtcttgccttaacccctccctgaatctagagctcaaagagaagggaaaacagaaggtggctgggagccgttctcccacaacctgaagagaaaggtgttattgactccactttctcaaggaacacaggagactaagacaggcaaagatgcagcccagggagggaccatgtgggggactggtctaggtagtgagtccccacttggagcctctgtgatcccagaccatcatggaggagcagctggtactgaagcgggtggccaacatcctcatcaacctgtatggcatgacggccgtgctgtcgcgggccagccgctccatccgcattgggctccgcaaccacgaccacgaggtgagcccagcccagcctcacacagggcctggctgctgccatctgtcctgctgcactttaatgaagttgattgttgaggagggtgtggtcgggtgtgggggaggctgtgcaggttcaccatgcggtggccgtgggagggtctgtgctgctcaggagatggggctgttccctttcttcttcctgactgagagaagagggggtgagtgacaggggttcctgatcccagtgcccctacccccagcaagggacagaccctgcacattgcccgctgtgctggagggaggcgggtgcagtctctgaggacccactgtataccaggatctctgcctgcactttccagagcacctgcagataccaggattgtgacatctgcctttcagaggaaacagggtcagagatgttgagtcacttgctgttggggaaaggctgttggatcagggctggaattagaacccaagacggggtgactcctgtgccaggccttgtgacccctgccatgctacccagtttggctgataggctgggtttttgaagctcagaggtctgattccaggaatttgggcatatcttttctgtcctcggttctggcaggttctcttggccaacaccttctgcgtggaagcttacttgcagaatctcttcagcctctctcagctggacaagtgtgagtggcatgtcttgggggagggaaggaagggcccacttctaggcccctattgatggtgagctgtttctggaccctgtcaagctcccagagcctgctagctactcacagacctctgccttgagcgagggcctgggtaggcctgggcttagctgcagcagtgcccaccaggcactgtaggtgcatacctgccccattcaccaaggcagttgtatgtatatatgtgtgtgtgtgtatgtatgtatgtatgtatttatttcgagatggagtttcgctcttgttgcccaagctggagtgtaatggcgcagtcttggctccctgcaaactccacctcttgggttcaagcgattcttctgccccagcctcccgagtagctgggattacaggcgcacgccaccacgcccggctaattttttgtatttttagtagaaacagggtttcaccatgttagccaggctggtctccaactcctgacctcaggtgatctgcctgcctcagcctccaaaaatgctgggattacaggcatgagccaccgcaccgggcctgccaaggcaattttagattgagcaagtgcagagccctttgcgcaggacccctggcatctgcccagcatgcctggctgtattctcttttttttggagacatagtctcactttgtcacccaggctggctggagtgcagtggcatgatcttggctcactgcaacctccacctcctgggttcaagcaactcctgtgcctcagcctcctgagtagttgggattataggcacgcaccaccatgcccagctaatatttgtatttttagtagaaacaaacagggtttcaccatgttggccaagctggtctccaacccctgacctcaggtgatccgcccaccttggcctcccaaagtgctgggattacaggcatgagccactgtgcccagccctggctgtattcttgaagctgcccggggaaggctcacgaagggaggagcatctggttgtacctgattctggagacagcattttacctgcccctttacccactgtactccatccaaaatgaccctgcagtgccctgcagaggtctcaggccttggcctagagaacagagggctttgctcgtgctccccgctctgtctgcagtgctcttcctcttctatagccactcgaccatatctaggaatgcccagctcagtctacctctgaccctcacagtcctgttgacctgaggttctggatcagtgtccccacaaagcccagtcgtgttgccaagtgatgggtgtaggcgccagcactgtggcacttgctgagagtggcatatgattttttgcaggtcctagccctgggggtagcccagacacccccccagtgctgacaggttatgtgctgtggagggtgctgaaatggtttctcctccagtgggctggaatcacagatgggctgtttacggagcaagtgccggctccaccccatgagatctgggggttagagatgagcaggatgagtcctttgtaactgagaatgaagctgtacccctttctctccctgcagccctgaatcacttgctgggggtctggaggaggggttcacccttagggctgcttcatggtgggtgggctgactttgtggaaaaatgcccccacttcagccatgtttgtcttatcacggtgcagaaagatcacccaccatctctccttttccttcccagatgctccagaaaacctagatgagcagattaagaaagtgtcccagcagatccttgagaagcgagcctatatctgtgcccaccctctggacaggacatgctgaggcaggggacagtgtcccctgctaccgcccgcccctacccatggcccgttgctggatgactgttactcttttttcagaaggtgttgggattatcacaggttaagccttttgttccccgtctgcacctgaagggttgtcgcctggcctgggagagcctcttccaggttttgacctgcaggcagtgctctctaacaggaccatcacagcttctgaactgagccggagagagagaatggaattgctgacccctggaactggcgggtattctggtcattgaggagacaccatagtggaaactggggcttatgctgctgcctccagggtgtgaggtgggtggggacctgtgtcaggtgtggatagccatttctgctcaaccacacattctctaagaaacagcttgaaagctc

SEQ ID NO: 15354 - DNA, 33305 bp, Homo sapiens
agacgtgtgtgtgtccctgcggcgctaagaaggggagactgaggctgaggctggggaacatcgggcagcatgagcggctgcgggctcttcctgcgcaccacggctgcggctcgtgcctgccggggtctggtggtctctaccgcgaaccggcggctactgcgcaccagcccgcctgtacgagctttcgccaaagagcttttcctaggcaaaatcaagaaggtaacgcgagccctgggcgaacccttgctgtctggctcccgcttttcaccctcagctgcaagactggtgttgaactttgtgagattccccaaacctgccagagagatacaccctgcggccgaggcgtgttaacactccggattcctgagttccaggaaaaccttcccagagaaagggtgagacatttccaagacgggggacccttggaaatgtggtggtgacgtgttccagctaaattttgtcaggggaattcggaaaactctaggctaggtaattaacaaagcagccttcatctcagctggtctggtctggaaatgtgcggggcttcctctctgattcctaaacagcttacaccatgtccctcctcagtcaccttccagcgccctggggcttccttccccaggtgagcccagcgcctctccctgccattgaggttcctcagaaatctggctccaagatgcttcccaagggtggcacaacccagccaatagtaacagtttggttataaaacactcattgtcttcttagagttggaagacttgggtttggtcttggctcgttgactttgaaactcagttgttttttttgagacagagtcgcgctcttgtcgcccaggctggagtgctcactgcaacctccctcctgggttcaagcgattctcctgcctcagcctccggagtagctgggattacaggcgcctgcccggctttttttttttttgtatttttagcagagacggggtttcaccatgttggccaagctggtctagaactgacctcgggtgatccgcccacctcggcctcccacagtgctgggattacaggggtgagccaccgcgcccggccaagactcagttctttcagccttaaaatggagatagtgttgtgtctccttcacagatgtgttgtagagccccagtgagataaacggtgcatggagagtcttcttaaactgtagagtactgtgcagcagaagagagagctggcttcaacacttagtcttgtgaccttggagctgacggctgcacctccctgtgcctcagtgcattcatctacaaaataggaataaacacatttcttgctctttcctttgtatttcattttatcttctaaggaaaccaacagtatacttgctatttcgtcgaggtgccctactttgaacttggctgaatgttggctgatcctgtatcacagaagttattccctggcttctctttggaacgttcctctgaggttgtcaggctgatacctttatagcaagcaactttacagatgaagaagctaagactcagactaaaagcagtttgcccagctagaaagtgcggagctatgtcttgaacatattggaaaaccttttacccaggacctggggcagtgtggtgctctatcctgggacttcctgctatccagcagcatggtgaagaaagaacacagatctttcagatctgtttccatctttaaacctctggcactacctgccctgccctgcctttactctcagctgtcagctttgcttcccattccactgggaaaatccatgcagtcggatgagaagttcacaggcacagttaccccctcccgctgcatatgtgccggtattatctacattctgttactgtgaactgtctgctcctggcaaaaccaacctctcattagactccaggtcttctcacctactcaagggtaattctttcctttctctgcatcattaactgttctctctactggatcttgagcccttaccattcaggcatttgtccctaatggccatagaagtcagtaatgacctctctgttatcaaattgtgtgatctgttctcagacctcatcctacttgacccatcattggcatctgacaccgttcatccttccaccctgttgacgcactttcgtctctggtttctgaatcactgttctcgccattctctgaatgttctaaatacttcactggctgatacttctctgtgtccattgctggttcttattcagctccttgaccgctaaacagtgaccagtgtttccaactagccaagttggaatttactaaggctgggtctcgtttcatctacagccatctgctgggtgaccttatttagtgtcctggctttaaatatcatcaatatcctgatgcctcaagtttctttcttcagttcagatttctccctgaactccagattccttttgctttttcagagttgggggctttctctgtcacctgtgctggagtgcagtggtgccatcatagctcactgcaaccttgaactcctaaggctcaatagatcctcccacttcagcatccccagtagctgggactacaggcacgccctgccacacccagccaagattctttttttaatctacctttgtactcaaaagctgtactaagaggtctaacaggcatttgagattaatagatcccaaactgagttcctggttcccacccaatcctgctccttccaccagccttctttatcatagataatggtggctctgttgttccacctgttcaaacagaacacctggagtcaccttgtactcttattctcctagtccacttctaattccacagaagatctggttttctctacttttaggttcttagaatctgaccacttttaggcccttctgctgctactttggatcaggccagtgtcatctctcacagccttactgggattagagcagaaacatgggacatgatgcttagaatctcagattgtgtaggccagtggttgtcaccctgccctaagctggacccaagctattcatggagtgtcctggaactgctgcagggatgggtgggaagttgagtgggtgggatttgggtgcctgttttccctatcagcagtctcagtcagagccgcctgcttctgtctgttttacatatttggtttctgcactagatttctttgaataacaggttccacttttttagataatttacaaactgtttattgcaattgaactctcctcccctaaggcattgacctgatttgataacatcaggatctttctcccacgcccctgcaatctctcctgtgtggcaggttttctgtggttgtacctgaaggccaattagttgccaggcagtcttatctggcctgcccactggtaccagaatgatctctaacacagcccattgcacaagacccaagtgtcagtgagcctctgtgttcagtgaaggagactgagctttgatataaaaggctgcagagtgatggagccatcagcttgtttttttttttttttcttgttttttttttccttgagacagtgtcttactctgttgcccaccctggagtgcagtggtgcaatcacagctcactgcagcctcaacctccccaggctcaggggatcctcccacctcagcctcctgagtagctggaactacaggcgtgtgcaaccacgcccaggctggttttgaactcctgggctttaagcaatccccctgcgtcagcttcccaaaggactaggattacaggcagtagccactgcaaccagctaagcttgtttttttctttttcttttcttttttttttatggagtctcactctgtcacctaggctggagtgcaatggcgcaatctcggctcactgcaacctccacctcccgggttcaagcaattctcctgcctcagcctcctgagtagctgggattacaggcgcgtgctaccaagcccgtgtaatttttgtatttttagtagaaacggggtttcaccatgttggtcaggctggtctcaaactcctgacctcgtgatccgcccgcctcggcctcccaaagtgctgggattacaggcgtgagccaccgtgcctggcctccaacctttttttttttctataccaccttcagggtggttttggaatggatggaggcagggattcctttaagttggctgtcacttttagttagggactcacctataagcctgtggtcctgggcccagagaggagaaagcagtgcgagcatattgatagagtagagaaatctgttggctgattagctgtacaaggtctgaggagaaggttgaggtctccccaagacttctctagaacacttggtgagaggcgccatgaggacaggtgatgcttgggcttatagctctgactcaggacatcactgctcaacagcctgaagcccacatccaaagctcatgtcatgctggcaattgaaggggtagcagagcccaaaagtccagaggggctcagcacagggagcagatgtctgtgagcaggagagacagcggctgtagggatcgatgagacttggtaagcatgatgtgctcttgtcagcatagcatctttgagctcacacaataattgatgtagaattgtccatttcagtaaggagtttccacatccactatcttccacgattctcacaagggccttgagtaaatattacctgcatgttatgggtgagaaaggggtagtttagagagctgaagggatttggtgaaggccacataatgagtaagcctgaaatcaaggaccagacccccaggcttctaaatgttagtcttgggctccttgtttcatgggactattatcatcccttgtactgagaaggaaaactgatgaaaatcgggaagaacctatttgaacaggggagggagatggatgtgggtggtggagcctgcacatagtttctgtatctcaggaaccttgtgaggtttgctttccagttccttcagtacgtcatgtcccgctggccagggtggagtggagcacatgtttttccttcccttttaactgatatttccgtgatgggagtgtgctaaaaattaaattttttagaaaatatttactatttttagaaagaagttttcccatttccagaagttagccaagatgaacttaatgaaatcaatcagttcttgggacccgtggaaaaattcttcactgaagagggtatgtatggttttctttaccattgccgatttccattgtaagggctatttggttgatatttatattagaagtgacatacataggagaagtcttcttgagggagaaatggtttccactcataatattttgctttaggtttcatccctattgccatttaattaaaaaacatccagttaaatgcttctcattgtatttgtggttcaggagcactttaaacatttccatactgttccaggtcaacacttccataaagctataataaaaatgaataactaaaaaaattagatggcaaaaagccaaggccacacaccatacaagcccatggagcatgtgttggttgttgtggcagtgtacagttgctcttagtgtttctaaaggttgagtttcaatttctgtactttggtaattgtaaacaaagagtgatttgtggaccagccacagtttggcacctgcatggtgaggcagcatttgacctcaggtccctctctcagagctgttggccggtcctccagccagggccttggtggagagttcagtgatggtggatggacagcaggtcttccctaatagtaggatcctggagagcttttgtttatatgaattttatctatcaatatttgccatcttaggggttattttatttttattttactttatttttttgagaaagggcctagctctgttgctcagactggagtgtggtggtaccatctcatctcaccaccacctccatctttcaggctcaaacagtcccccaacttcagcctcctgagttgctggaactacaggtgcgcacccccatgcccagctaatttttttgtatttttcatagagacaggttctcactatattgcccaggctggtctctactcctaggctcaagtgatcctcccaccttggcctcccaaagggctgggattacaggtgtgagccaccatgcctagcccctcttagaaattaaaactgagaaatttaaaatatactgtggggctgggtgcagtggctcacgcctgtaatcccagcactttgggaggccaacggggacagatcacctgaggtctggagttcaagaccagcgtagccaacatggtgaaaccctgtctctactaaaaatacaaaaattggccgggcatggtggcgggtgcctgtaatcccggctattcaggaggctgaagcaggcgaattgcttgaacccaggaggcagagattgtagtgagccaacattgcaccactgcactccagcctgggtgacagagtgtgactttgtctaaaaaaaaaaaataaaatatactgtgttcatttgtttaaaaataataaatccattacatgttaacataatatttttaatgaaaaatattttgtttttgtttttccgagacagagtctcactctgtcacccaggctggagtgcagtggtgcaatctcgactcactgcaacctctacctcccaggttcaagtgattctcctgcctcagcctcccaagtatctgggactgcaggcatgcaccaccacgcccgggtaatttttgtatttttagtagagatggggtttcactatgttggccaggttggtcttgaactcctgacctcatgatctgccttcctcagcctccccaagtgctgggattacaggcgtgagccaccgcgccagctaatgaaaaatattttgaaaaataatcaggccaggcgcggtggctcacacctgtaatcccagcacttacggagactgaggtgggtggatcacctgaggtcgggagttcgataccagcctgaccaacatggagaaacctcatctctactaaaaatacaaaattagctgggcgtggtggtacatgcctgtaatcccagctactcaggaggctgaggcaggagaatcgctggaacctgggaggcggaggttgcggtgagccgagatcgcgccactgcactccagcatgggcaataagagtgaaactctgtctcaaaaagaaaaaaaaaagaaaagtaagttaaaaaaaaaaaaagaaaaaaattgatggaaagagtgacattggttgaaagttatgcaagtccttttaatgtttggcttattagaagacagctggattctcatacctgtttgtgcacgtaacctctggaaaagtccactgtgcagtctttttttttttttaactgtctttttttataatcttcagacatgctttttgtttgtttgtttctgagacagtcttgctcttgctttgtcacccaggctggagtgcagtggtacgacctcagctcactgcaacctctgcagttgaagtgattctcatgcctcagcttcctgagtagctggaattatagcacgcaccgccacgcctggctaatttttgtattttcagtagagatggggtttcaccatgttggccaggctggtcttgaactcctgacctcaaatgatctgcctgtaatccaaagtgctgggattacaggtgtcagccaccgcacctgtcctgacacgtgcatttaaagcaagaaacacacacttccaggacatagggctctgtcagcaataactgtcatctttgtatttgcagagatgtaaatatataagaaaccggctgggcacggtggctcacactggtaatcttagcactgtggaagactgaggggggcagattgcttgagtcccagagtttgagaccagcctaggcaatggagcgaaaccctgtctctactaaaaatttaaaatattagccgggcatggtggtgcgcgcccatagtcccagctacttgggagtctgaggtgggagaaggtacccaagcctgggaagtcaaggctgtagtcagctgtgttcatgccattgagctccagcctgggcgacaggagtgagaccctgtctcaaaaaaaaataaaaataaaaataaaaaaataaataaatatatatatatatatatatatatgcaagaaaccactgcaaaccaaacccactccctctcacaggaacaaaggtctcttggaataaatagcaaatgctggaataaaaactatgttcattcagctgccatgatgtgaattcaaaaaggaagttaaatccaagggcaaagcagagaaaagaacatacaaaaatacacctatttcatgtacattcaaagaggaggctaatcactgtggacaaagggccctctggaatgacagctgtaggcagccagcagtgccacggaaatagaggcactgtcatctggagacacagaaaaatcacatcctcccacaactggcctctatgaaaaccaaccaggacagacaacccttccccaaaagtaatggccaagaataaaagcacaaatattgctggaaatccaagtagcctgttttactgctttgagtgacttatatgcaaacctaagacttttttctgaatccttgatcaagatttattcatataaaggccgtacataaattctgggaacatggtactttggactatatattggactctgagccaaaacgttaaatacactacactgcgccccactgtacagtcttcagagaattagaatttaaaagcaagtaacatcttaagtagttttaggccaggtatggtggctcatgcctgcaatcccagcgctttgggaggccgacgtgggtggatcacttgaggtcaggagtttgagaccagcctggccaacatagtgaaaccctgtctctactaaaaatataaaaattaaccaggtgtgttggtgcccacctgtaatcccagctactggggaggccgaggcaggagaatcactggaacccgggaggtggaggttgtattgagctgggatggcgccactgcacttcagcctgggtgacagagtgagactccatctcaaaaaaaaataaaaactagttttgatcctgtgggaccccctagaagcagctcaggtcccccagaacctctttgagaagtgccaaattgtcagctgtcattacattgcttggtttttgtttgtttcttatttcacacctggtgatcacaaattatatgttgctagttttaaaagttgcttatttatatataaacataatttataatttagaaatacttatttctgctttttttcctagtgtttatcttcctatttgtatctttttttagctcccatagtctcttgttcttttatttaaacttttcctatgtggtttgtcaggtttttttttttttcaggtttaattaaggaataattgatttacaataaattgcacacactgtcatgtgacacataatgacattcaagtcaatgacagaccatatatacagtggtgatcccataagatcatcataccatatttctactgtatcttttctatgtttagctgtgttcatatacacaaatacttaccattgtgttacagttgcctacagtgttcagcacagtaatatgctgtacagcttttttgttttgttttgttttccttaaaaaaaaaaaaacaaaaaatatttaacagtgagatggggtttcactgtgttgcccaggctggtttccaactcctgggctcaagtgatcctcccgcctcagccttccaaagtgctgggattataggcatgagacaccacgcccggcctactgtacaggtttgcagcctaggagcaataagccataccatatagcctaggtgtgtagtaggctctgccacctaggttgtgtaagtccattctgatgttcatacagggagagaatcacctgacgcatgactgtatttagagagtacccctcaggagccatcagtgcaacagaggaagtgaacgtactcattacccgtcaaagtttccttgtgcctcttttatttcccccctgtttccaggcaactgctgatctgttttctctcactatagattagttcgtattttttggaattatattatgtgtgattttgtctggcttctttctgcataattttgaatttcatccatggtgcatgtattggtagtggcttcctttttaatgctgagtcatatttctttctatggatataccaagatttgtttatccattcaagtattcatcaacatagggtatgtatccagattttagctatcaccaaaaaagttgccataaacattccttttttcctctttttctttttttaagagacagggtctttctttgttgcctgggctggagtgcagtggtgtgatcatagctcactgcaacccttgaacttctgggctcaagccatcctctgcctcagcctcccgcatagctaagactacaggcacacgctaccatgcccagctaataattcttaaagttttttgtagaaatgggttctcactatgttattcaggctggtctcagactcctgggctcaggtgatcttcctacctcagcctcttaaagtgttgggattacaggtatgaaccactgcgcctggcctgtatttcctttttttttgagatgccatctcgactcactgcaacctccatctcccaggttcaagcgattctgcctcagcctcccgagtagctgagattataggtgcgtgccaccacatctggctaatttttggtattttgagtagagaaggggcttcaccatgttggccaggccaatctcgaactcctgacctcaggtgatctgcccgactcggcctcccatagtgctcggattacaggtgagagccacctcgcccagcctggcctgtattttattttagaaactttatagttttggctgggcgcagtggctcatgcctgtaatcccagcactttgggcggccgagatgggcggatcatgaggtcaggagatcgacaccatcctggctaacatggtgaaaccccgtctctactaaaaatacaaaaaattagccgggcgtggtggcaggtgcctgtagtcccagctactcgggaggctgaggcaggagaatggcgtgaacccgggaggcggagcttgcagtgagccaagatcgcaccactgcactccagcctgggcgacagaacaagactccatctcaaaagaaactgtatagttttaattcaggtttagaactatgattcattacaagttaatttgcatttctttatcaattttacaattttcaatgtctgcaaaaaggcctacaattcttaaatggttggtttatcttttagagcaattttttttttttttttgagacgaagtctcactgtgtcacccaggctgaagtgcagtggcgctatcttggcccactacaacctctgcctcccaggttcaagcgattctcctgcctcagcctcctgagtagctgggactataggtgcgcatcactatgcccggctaatttttatatttttttagtagagacagggtttcactatattggccaggctggtctcgaactcctgaccttgtgatccacccgcctcggcctaaagtgctgggattataggcttgagccaccgtgcccggccagcaatttttaaaataggaaaaaaggatcttgtagttacccatgtagttactgattccagggctcttcattctctcatgtagagtcagattcccttttgctaccattgctcttctgtgggaaggacttcctttcacttttcatgatgtgcagctctgcaggggatgcatattctcacttttgtatgtctagaaaagtttcagccaggcatggtggctcatgcccgtaatgccagcatttagggaagccgaggctgtcagatcacctgaggtcaggagttcgagaccagtctggccaacagggtgaaaccccgtctctaccaaaaatacaaaaattagccagatatggtggtgtgcacctgtaatcccagctacttgggaggctgaggcaggagaaccacttgaacccggcaggcagaggttgcagtgagctgagatcacatcactgtactccagcttgggcgacagagcgagactccatctcgaaaagaaaaagaaaaagaaaagtctgtttcatcagaacaggtttctgtgttgacaggatttacctttcaggccattaattgtgttgctctgctctcttcctgacttcatattgcttcagaagagatgtctgcttccattctttgttcctttgtacatagtgtttttttcatctctggctgcttttcagtggtttttaggaaaattgattatcacatttatttatgtagttttttgcacatttattttgcttggagttgtttgaacttcttggctctgtgtgtttatactgtttattgaatttggataaacagttgtacacccatacagtgaatactgaacaacaaaaagtaatgaagtatttatacacgcaacaacacgggtgaatctgtaaatcatgacctgagttaaagaagcccgggaaaataggtgccatatggattcatttatataaaacttgaagatgcaaactgatctacagacaaagatttgtggttgcctggggatggtggacagatggatcgatcacaaaggggcatagagacttttggtgaaaaaggaaatgtttttatctcgattgtcatgttttcactgacaaatatgtcagaactcaacaaattatatattataaatatgtgcaggttattcttcgccaattatgtatgtcaataaagttgttaaaggataaaaaatgaagggtttggcctgcacttttgggaatctgtagttctcttagtgacccatgtatacaaaaattcttaagtgtaggttatggtgtttttaacaatttataatactgatgaagtttaattagcaattcagaagtacactttaattaatttgatgcatacaaaagtgtgcaattataggtctaatgctatgctattgattgttcagttttgctgtagtgaatgtgaatttttattttagagatgagatctcactctgtcgctcaggctggagtgcagtggtgccatcagagcttactcaacctcccaggtcaagtgatccttccacctgagcctcccaagtagctgagactacaggctgaatgtgaatgttgaatgaatgaatgaattggtgttaaacaggctaaactgtctcagaacttgtggattgtgctgaaagcagtatggcctctggcagtgaagtaaaccttggcccagatactgccatgaggtggctatctagctgaacattttagtacaattctgagacttgcatatttattctctcatttcctagaaaataccggccaaaaaaagtatgaggtctataaggaggaggaaaaacatgaagtttaacatgcctatagaaaaatttacatcccatgaatgtatataatttgctgctgttttacacagcaaaagcacccctgtgactagcacccagatcaagaaatagaacaccacctagctctggcagcttttaacaattttattctggccgggcgtggtggctcacacctatgatcccagtactttgcgaggctgtggtgggaagattgcttgcgttcaggagttcaagaccagcctgggtaacatagcaagacctcgtctctactgaaaaaaaaaaaaaaaattagctgggtgtggtggtatatacctgtagtcccagcttctcatgaagctgaggcaggaggctcacttgagcctgggagattaaggttacgtgagctatgattgtgccactgcactccagcctggatatcagagtgagaccttgtctctaaataaatatataaaaataaaatttttcctgggctcattacataaaattgaacacaggccaaatgaccatgactacagaatttctagttttgaaaaagtttctactctgggattatatatgattaatatataaacactgtcctgtttacttatatttgtagaaacatagcttatatttgtttaatcaagattttcctcttggcagtggactcccgaaaaattgaccaggaagggaaaatcccagatgaaactttggagaaattgaagagcctagggctttttgggctgcaagtcccagaagaatatggtaagtcaagcaaacaagcacccagccagtttagctcttaagaaagcactctgtatttgtccataacaggtctagttgctggaatagatgacaccatccgtggtgggctacttggtaggggtggactgactgaaggacctgtagggaggaagtgttctcgggtcctgtgcttctcatcctagcacagaggaatgaggcatgtggtctggctggctgtagagtgcaaggcacatcgaggtgggagattggaccagtgggaacctttgagcagggtcctttgtcctatggactgtccctgtaattctttgagcatcctagtgatgtttttagcccccaagtggcggttctgccttattagagttggccagtcactacaacttgcctcccttacgctttttctcgagttggtcacctgaattctgcagaggttaaagggacaggcaagcagtgtgtagaaggcaaggtagaccttcaaggttcaaagggatagaccacacacatgtgtgccatttgtgtttaccctcaggcccttttgatataaaattataaaggccaaggatgctgctaagcatctgacaatccacaggacagacccccaaaacagaaaacaatccattccaaaatgttacagtgccacagtggaaaagctctgtcctggagtcctctggatactgggcagtgggtcacactatagttgttgcatttataaagacctacagctgtgatggaagattctcactacatgttaattgattcgatgtgtgtgtagatatcttcatatttaaagtatatatctacatatgcttgtatgcctagaaaaagtgtggatggaaggatatacacagaaatgcgctttctgaggcacaagattgcgagctttttttttttttttttttgagacagggtctcactctgtcatccaggctggagtgcagtggtgtggtcatagctcactgtagccctgaattcctcgggctcaaacaatcctcccacctaagccttccaagtagctgggactacaggcgtgcgccgccatgcctggtgaattttttttattttgtagagctggggtcctgctatgttgcccaggctagtcttgaattcttggaaccaagcaatcctcccacctcagcctcccaaagcgccgggattacaggcgtgagccactgtgcccagccctcgatttttgtttactttgtacctttctgtattgtgattttttttttttttttttttttgagacagagtctctctctgttgcccaagctagagtgcagtggtgcgatcttggctcactgcaatccctgcctcccaagttcaagtgattctcatgcctcagcctcctgagtagctgggaccacaggcacacaccaccacacctggctaatttttgtatttttagtagagacggggttttgccatgttggccaggctggtctcgaactgttgacctcaggtgatctgcctgcctcagcctcccaaagtactgggattacaggtgtgagccaccatgcccggcctgtattgtgatttttttttttaatatggtgatctggcattactttataatcagaagaaaaaaaaaagccaatgaagccttaatgggaggaatctagggctgggctgtgattgacgctggtccatctctcctaggtggcctgggcttctccaacaccatgtactcaagactaggggagatcatcagcatggatgggtccatcactgtgaccctggcagcgcaccaggctattggcctcaaggtcaggtatctggggattctgtgtggtgctctctgtaggtcttctggagtcacatggaggcatagaggccagaggcttgctccctctgaattgggcctgatatctgaccttcagccctgcccttcagttccctcactctggccacacctcatggtgctcaatcctcacacactgcccacatgcgcagtggcctttgggtcgcatgtcccttccttctgaatccacctcctgtccccattgcctctgatccacccttcaaggcccaggtagggtgccactgccttcgccttgggctggaagtggtctctcctgagccttcgtccttcagcctgagcatgcccccactctttatgcaagccaccttctccccactgggcttggagcaccttagggcaggcccagggtcaaccgcccttactggcaatctcattactcagattatttctgcttaatgttgacatcaaagagagctgaatgcacaccatgctcggctcccccaccccagagagcgcacacattcatgcagatgtttagtgaagagggggactgtctttgtggcactgggagggcagcaggtgggacagccctgacactgagcaccttctttaggataggcttggttccagcactcctgtgtcttcacattgcatcatccagaccctgtcagtgggtgggagtggcccagtttgtggatgacaagatggaggaggctttctttggaaagggatatcctttgcccaagaccactagtctgggaaatgaaggaactgatatgaaagttttggacacagactgcaaagcactgtgggttgcacaggctcacggcactggcatgtgcgccctgaccgtctcctcagcagcttggctccctgggctctgcctgtggccgcttgctctgagttcttgctgtcttctcttgcccgaagtaaatatttgcctcagaaaggaaatgtttcacaaacacctcatgctctcctttctccccacagctgacattagtctgtgtctgttttgtttaggggatcatcttggctggcactgaggagcagaaagccaaatacttgcctaaactggcgtccggggagcacattgcagccttctgcctcacggagccagccaggtctgtctctgcacaaaacgttatccctcagcagctgtgatgttgcccaagattcactggggcaaggggctgttggttttgttgagtagctgacttttccttctttccaaaatcttgcaaagaatcaactcagcaactgttcttgccattcctcttatcttgaccttatttctctgtcccagtgagacttgcaagtgagataccacgcttgacagcacttattaaataaatttttgtggtttacaacacaccttgacatacaatatagtaataacgttccggcttcaaagcacctttcagaatatatagcgtgggtggtactgctcccacttacacattaggagctgaggttcagtgaggctgtgtgatctgctggatggagcagggctgcggcagcactcgggactctgatgataagtccatcacctggaccatcctccatcctgcttcactttgcatgagaacctgggaacagtcatccttcctggggtgcccagaactcatcctcacaggacctcagatgagcccattgcaagcacccatttccatgtttaaacctaagcccaagttgttttcactgccgcttttttacgtgatgtattgaagcagaggtcggctaaatccagcctcctgcctgttttttataaataagttttgtttgtttgtttttgagacagggtcttgctgcgtcacccaggctggagtgcagtggctcaatctcatctcactgcaacctccgccttcaagcgattcttctgcctcagcctcccgagtagctgggactacaggcatgccccaccacacccagctaatttttgtatttttagtagagacggggtttcaccatgttggccagatctcaatctcttgacctcgtgaaccacctgcctcagcctcatgttctattaatagcagcagagttgaggaggtgagacagacatcctgcagcttggaaagctgaatatgttatctgacccttcattttaaaagtttgctgacctcttacaagtactaaaacctccattttcaggccctcaaaagcattcatatttattcccagtattctcccttgaccacatctttctgcatctgcagtgggagcgatgcagcctcaatccggagcagagccacactaagtgaagacaagaagcactacatcctcaatggctccaaggtagggttccttccccatggccacattagggtctcagtcacaaccttcactgccactgagtgagcactctccacacaccagggattgtacctgctgctgtagcaccgactaccttcttgagctgcttttatgtgtttgtttttaattttttttagttttttttatttgcgatggagtctctgtcacccaggctggagtgcagtggtgtaatctcagctcactgaaacttctgcctcccaggtttccaatgattctcctgccttagcctcctgggtagctgggattagaggtgcgtgtcaccactcctggctaatttttgtattttcagtagagatggagtttcaccatgttgtccagtcaggtcttgaactcctgacctcaagtgatctgcccacctcggcctcccaaagtgctgagtttacaggcaatgagccactgtgcccggcttgtaaacccaaaaaatctttaaattttttgttacacaaagtttcagacatattctgtgtgcctggctggccctaactccggcagtcacctgcttatggccactgtgcctcttccagcagcatcgccacctccagatcgcatggtaacaatctcagcatgcctctctaaaagacaggagttttttttgtttgtttttgttttttaataaacacaaagccgtaatacccttatcacattttaaaaattgataatttctcttttcttttgagacagggtcccgctctgtcacccaggctggagtgcagtggcacgatcttggctcactgcagcctcaacttcctgggctcaggtgattctcctacctcaacctcccaagcagctgggagtacaggcacacagctaactctttgtattttttttttggtagagatgggttttcaccgtgttgcccaggttggtctcaaactccggggctcaagtggtctgcccacctcggcctcccaaagtgctgggattacaggcgtgagccactgtgcccagctaataatttcttacttctatcagcattcaaatatccctgattgcctcatacctttttttggtttaactgtttgcttgaattaagatccacacaagtcccatctgttgctgtttgttaaggagtctgtttctgcctctgtctccctctgtttcctttcctcctcctcaccaccctcccgccttttttcatttctttgtagaattaacaaataaatgttgtgtgtatttacatctacaacatgatgtttttatatatgtataccttaagaaatgattaaaccctttctttcttgaagaaatgcagttgtctggcggtggagcctgagctgtctgacaactttgggtgttctttcccccgcccccgcctccacctggccatccatgtcccttgggaaaatccttgctctggggaaagtgggctgagccctgtcctctattcactcatgcttggttggcttctgcagagccaaggaccctgcatgtctggcctgaggtctgactggcagctggagcttgatggacaaagacagagctgaggtgggtcacataggggtttggttttctccaaagtccatctttctgtcctcaggtctggattactaatggaggactggccaatatttttactgtgtttgcaaagactgaggtcgttgattctgatggatcagtgaaagacaaaatcacagcattcatagtagaaagagactttggtggagtcactaatgggaaacccgaagataaattaggcattcggggctccaacagtaagtagctcctgtgcgcgcgtgcgcgtgtgtgtgtgtaagggggagactggcctttgacggtgtgtgtgtgtgtgtgtgtgtgtgtgtgtgtgtgtgtgtaagggggagactggcccttgactctgtccaaatagcaagataaaatgagatttaaacactttcagtttttgttaagcattttaaaaagatcaaattaagaatgccacttgggctttgtctttgttcctgcagctgagtgctgctcacttgaaggcctgctggtcatcccctgctgtagctgccctagcagacacaccaccttagagctcagcttacagtccccagcctttagttgtctcagtctgcagtgcctggcagcctgcttcaggctgtgagttgggttcaggtccatctgggttcaggtccatctggaggcttgttcttagagcagatcataagcacctaaggggccaagccaagccatataagtactatttttgccgtgggagacatagtctccctctgtcacccagcctggaatgcagtgctgtgatctcagctcactgcaacctctgcctcctgggttcgagtgattctcctgtctcagcctcccaagtaattgggactacaggcgtgcaccaccacacctggctaatttttgtattttttgtagagatggggtttcaacatgttgcccagacttgtcttgaactcctgagctcaggcagtctacctgcctcagcctcccaaagtgctaggattacacgtgtgagttaccatacctggccacttttttttggtttgttttttttgagacggagtctcgctctgtcgcccaggctggagtgcagtggcactatcttggctcactgcaagctccgcctcccgggttcacgccattctcctgcctcagcctcccgaatagctgggactacagctgcctgccaccacgtccggctaattttttctattttttagtggagatggggtttcaccatgttagccaggatggcctcgatctcctgacctcgtgatccgctcacctcggcctcccaaagtgcgtgagccaccgcacccggcctttttttttttttttttaaatagagatgaggtcttgctatgttgtcctggctggtctcgaactcctgggttcaagtgatcttcctgcctctgcctcccaaaatgctgggattataggcatgagccaccatacccgactgaccctaaaacacatttaaggtctctgttcatgttgggtcagctctttgtattggccacaggaagtcacatggtcatacctagcaggcagggaaagggagggaggtccatccctcctcacagtgggagagtgctacagttagattgcaggggtgtgattgtgttagagttaagaattgagaccagtggtcccagtctaccctaaggcttcaggaaatgctgttctttccctcactttgcttgttctggctctttatatgcctggttcttttcattcttaaacttctgctaaatgtcaccttagaaaagtctgacatagtccttaataaaaatattattatccacccccttgccaacctccatttctctttatcgtgatgccctatttatttcatccatagcactgatcacaatattacattgttttgtttatagcttttgtctcccaaatcaaagtatgagcctccacaaagataggaactttgtctttctatactgtcctaccaaacattggatggatggatggatggatggatggatgaattgcctgcttgcaggtcagatgcagagtggtttgcattgtcagatgatatcttaaatttcatgtgtttcagcttgtgaagtccattttgaaaacaccaagatacctgtggaaaacatccttggagaggtcggagatgggtttaaggtgagttgccagccacagccccttgtaccaggtagtgtcatgagtgcagtttgtcgcccccagcttttgccctatccctgctcgtagcagagtagcctgtgcatggcaggtgactttgcatggttatctgttgggaaattggcaaaatggacactggaaaattggctggctcctagaagaagtgtatggtaaggattaggaatttcccttcacctctgaggccctattcgcctcgagcggaggctaagattcccttctgcagtgggtatgagaaagcagcctgtgggctctggtgaatctcaagctctgtgtaccacaaccctggtctgcatcgctgccctactcttttctttttggactaagacttatttttatcaagagatgattcatatgacaaaggactcaccattttaaaatattatttcagtggtttttagtatattcactatgttgttcaaatatctcacacagaacatttcctcaccccaaaaagaaatgttgtaccatccagtatgacccttaccccatcccttggctgctactcttttactttatgtccctatggatttgcctgtttggaacatttcataaaaatgcagtcatatacaagatccagtctttggtgacaggcttctctcacattgcgtgatgttttcaaggttcatctctctcatagcatgaatgagtaattcattccttttatggctgaattctcttctgttgagtggagataccacattttgttcatccattcaccagctgatggacattggggttgttaccgcttttggctgctatcagtaatgctacttatgaacattcatgtcaagttttaatgtggaaataacgttttcaggtattttgatttatgcctaaaagtagaatttctgtttggcccaagttggtcttgaactcctgggctcaagcgatcctcttgccttggccttccaaaatgctggtactacaggtgggagccaccatgcccagctctggcatggtcctttggaataacgttcagtggtcttgtgtgtggggatgttggtagagctgcaacagtgactgaaccaccttgttctgaggcattaggatggtgctttctcccagcttgagggaaggcaagctgatccacctggcctggtttcgttgcggcctcctccctctgcctccttcagggcccctgggctctccctgttctccctgcaggtggccatgaacatcctcaacagcggccggttcagcatgggcagcgtcgtggctgggctgctcaagagattgattggtaggtaagttagggacaaggccctttgtgccccaccccctgctgccccggctccaaccctggaggctctgccattcccccggccccttccaggccagtgctgaaccaggctaccagcctgagctcagtccctgggcttttgtggagaccagagggtctcctcagcctgcccctgaggtttgttgtcttccgcattcctctgtttcacctccacccgggtgatgctgactgggggacaggctttctgtctggggtggggatggggattggggaatgggctgtctgtctggagtgagaggttgccactgaccagtaggagcagagctgcttggtgagcacacaccaagaaccaggcttccaggatacacggcctctggttcccaaggtccgtgcctcctgggtgactctgcatggtgggtggggagtaggatcgggtttggaacccaggtccctgggcccctggatcttacctttgttctattctgtcagaataccccaaacctccattttcctttgccagtgaacttagaacagccctgtaaccatcctggttgtggtggaagcatttgcggggaaatgggggtacccggggcagcacacccctaagtgctttatgaagctcctctttggtgccaggctctgggcctgttttggcttccctccattttagagatgagaagacagagactcagagagggcaagcgatttgttccagactgtgctcctggacccaaaatgaaagctgtcaggctccaggctcagggctcttcttactcaggcacaaggcctctggggagctcctctgctggggctctgagtggggctcggccctctacacctcctgagtgcaccacacctgggagagcctgtggaggacatggctatggcggggcgggggtgcttctgcctgggagaggcgccatgtcactcttgggcccttagagctcagcactttgtcacagccacacgcctggaagccccagcctgagtattcaagccaggcggccccacctgctttggtcactgcacggggtgtgagcctgcaccacctctgtctggggcctctgtgcctggctttgtgcgaggcgccctcccccttccacctggttgcatcttcacagcgactctgaggtgggggtggtgttcagggaggtgtcgcactcggcctgaggcacagcctgtaagaaccattgccaggattcaagtctgtatctgatgccaaactctgtgtgtgggtgccatgaggaggggtggttctcctctgacccacgggtgctggcaagtgggggtgccagcttctggggtatttgacctcagcagacacgcttctcacagtgcccacctgtgggaagggtaaggatgatggccataggaaatcatgtttgaaccacagaaatattccagttcattctaataactctgctcttcctcagaaatgactgctgagtacgcctgcacaaggaaacagtttaacaagaggctcagtgaatttggattgattcaggtaccaatggttgagtactgtatttgtgcatttcactgtgtgacatgaacggtgtgttcttttgatgtctctgtactggtgacttctgtggtgatttgggaagaagactagttaaggctttatttgacacgggtcactgggcttgcttctcttgggcattgaggcttctgacttaattactttctctcctgtttcacagatttggctctcagcacatgcaaattgtttcttgtgttttttctgaacactccaggagaaatttgcactgatggctcagaaggcttacgtcatggagagtatgacctacctcacagcagggatgctggaccaacctggctttcccgactgctccatcgaggcagccatggtgaaggtaaccctggcatagccagagagctggcgctggagggaggcttgggaaatctccctcactgtgacctttcaagcccatgctgttgcctgtcatcttcctcctgtcattgatccagtatttatgatgcacttgccctgtgtagcactccagggataggcaggcagcggggagcagcagtagggaagtgtccagtgggccagtggatcagtagtttatagcagaaggagaccgttatgataatatccttttagagtaataacattgcatctggcttgtgtgagaaagacttcttttttccttagtttatggccttcctactttctggtatcaaaactttatcttaaaaactaagcatatggcagggcgcggtggctcacacctgtaatcccagcactttggggggccgaggtggatggatcacctgaggtctggagttcgagaccagcctggccaacatggtaaaaccccatctctactaaaaacacaaaaaattagccgggcatagtggcgggcacctgtaaccccagctacttgggaagctgaggcaagagaatcacttgaacccggtgggggcggaggttgcagtgagccgaggttgtgccattgcacaccagcctaggcaacaagagcaaaactccatctcaaaaaaaaacaaaaaacaaaaaacatgtatgagcctgggcaacatggcgaaaccccatctctacaaaaaatacaaaaattagctggcatggtggcacacgcctatagtccctgctacctgggaggctgaggtgggaagagcatcttatttggttaaggtagatactagaatttgcttttgttttgttgagggtggagggtgtcattttttagctgtaataaaaaagatggccacacttggggggaccctactttgtgccccccacaattgtttttaagctggtctctggaattgagctcttgagagaaatagtgagaggtatggcagcttacagaagcaaacatcctggtgtcggcaggagagtctacctaaaaggttgggatcctgaagtggcaaggtccctaaaaaaataaaaaattaaaaacaaaaaggctgggcatcttggaccgtgtttgagtcttttctaggtgcagtctgtgtactgggtgcatttgcatgtgttttatcatctcgttttcttgtcacccttgaacagtgaccacagacattagtttgctgtaggccagcctcttccagatgctaagcctagggctaaacatggcagtatgtttgcccccaaggcacttatagtgtgcacagacagaaagaaatcacggccgctggggcttggcaggaacaggtcaggttttctcgggaaggggagatcttaggtgggttttaaaggaacaggagctcagccaggtgcagatagggtgaaggcaggcccagaggtacagaaggtcatggtggggtagggaacacaagctggccagtgtggtcacggaaggcaaaggacttgaccacatcacccctcaagttcctccctggccgatctcctccccaagcccgtgtgcctcccatgcctccccagccacccagctccctgcagcgtaggtcctccttttggaaaggattcagtgtgacaccccacaggtgttcagctccgaggccgcctggcagtgtgtgagtgaggcgctgcagatcctcgggggcttgggctacacaagggactatccgtacgagcgcatactgcgtgacacccgcatcctcctcatcttcgaggtgagtggccccgccaccagctaagctgtgctccacccccaccctgcctggtcctaaagatgctgctcagggcctcgcagaggcccccgcagcccagggctgggtcgcatgctctcaggggctctcctagccctggcacgtctccttcccgactgctgccctccatgaagtcacaagcctgaggagtcagttcagttagcatgtgccaggtggcaggggagggaactggggccacagagatgacttcggatgctgtgttctgattgtgcagcagggccgaccaagggagatgacagagtgtaaagaggcagggagcgggcatcctccagaggcagccagagttttgtgaagcatgcgctcctggcccctaggggcagaaagaaagggcttcaaccagggccgggtggagggcagtttgtccctaagggcagggtaatagagcgcgccaggcccagatgggactgatctgctggcacaaggtgaatgaagagagagtgaagggctttctgggagcagcagtcagccctgctaggtgggctggggcaggcagtgggtttgggggtgttgaagaaggtatatgggaaggctaaaaaagtagccagactgtggaggaccttgattgacagcagaggaatttggaagccacaaaacgtctttaagcagggcattatttggttgtatctgtgttgtgggaaatgcccccaggggctcagcaagtgctggacatgtggacggggctcatgtggagagtgagttgcagggatgaggccggagaccaggggctctcctgctgggagggaggggctggacctaagagagcacagcaggatgagtgggatatgatggtgggcatgggtatacaggaggcaggcctgagacagggagagggtttgggcctgagcagcaggtctggtgatgagaggcatcatcagcctctgggagtgtagtcttgtctcctgggccgtcctgcccagtgggaggcctccttggctgcttttgttcctggcctacccattgggttccagccatctccactgttgcagtggacatacggggcaagggccagcctgagggcactggagtggtctcagccctgcaaagggtcttctccaaaggcccttcccttagcctgggagggttggggttctccagggctggggtggtcagcagggttcaggaagccctcaaggccttggaagaacacagggctctcgatgtagggtgagagctcctgtctggagcctgctcggagctgggtggtcctgccaggaggcccctgcagtccccccttttcctgtagggagtcctgctgtccgtgatgtcagcctgactgcaggggacagtcctcagtccctagtgctggctgtgtagcctgggtcaggcccctgcacctgacacacagtaccattgtgcagagtgggcagaagcccactggcctctcactgatcagaatcatgggttgggggagtggggagcatgtggccctctgggtgtgttgacacctggcactgaggaggttctagctgccactcagcaatttctggcttccgtgaggaatctggcctccacctggagccagcaatgtctgtctggcactggctgagccccaggcatcagcacccctcaccacccggggaaagctggtttccattttacagaggacctggagacttggagaaaggcttgacacacgtgaggctggtcacggagaggtgggggggtcccagtgggagctcatggccatctggtcacctccctcctcatccctgtgcactccctgagccctggccagagccctgctcccagctacttcaggagcagtggcttttgtggcaatgggcaagcaggcagtggccggctctacccagcacacgtggcactaccatggctgcctggccggggggcagcctttgacctctacactactgaccacagggaaccaatgagattctccggatgtacatcgccctgacgggtctgcagcatgccggccgcatcctgactaccaggatccagtaggtgccattgtcaccgtgtgcttctcaggtcccatacctgcccagcaggggccagtccagggcagtgggaggaaagagctgccttgacctggagtgggggcatgggggtgtggcgcagccttgtggaggggaccttcccctgtggtagtggggggcttgctgcccagggaagccctcgctgccctgcccttatggccacagcaccctacagcttcagcataaataccgtatcccccatctggtccctcacactagaggcagctggtttttcagaacctgaagaatgagaggtgtccctttaaaggtgccaggcctcacagccaacataagccagtgtttctcttctctgcccttcttcccctcatgctcccctccacccccaccctaggggcacagtaatccaaaatcactgctggaggccaagtacaggttgctagtagcattttgtctccttcacaggagacagctgctgggaagctggctgtgactccacccctcatgggggagcatatgtgtggctcccctgaggagactggctgctctctggcaggtggtgggtttgggggggttcaggctgtagccaggggcccagcatacccaggccagaggggggcacggagcttctgggtgccgaatgggccatgttgctggacagtgagcgccagcagcgaggcctccagtcacaggaccatggactttctgcagtgagcttaaacaggccaaagtgagcacagtcatggataccgttggccggaggcttcgggactccctgggccgaactgtggacctggggctgacaggcaaccatggagttgtgcaccccagtcttgcggtgagtgggcctaacaggcataccccctatttcaatgccctcctgccagatctccttgtggcagaaaagatctcactgtggggggtctgggcttctccaggggaagttggggaacaccagctagtccatgacaccctggattgcttcccccagatggggcatctctgcctggtacccgggctgtgagacaggacagggcactgtagggatgaggtgctgaactgagtcctgtcttggttaataggacagtgccaacaagtttgaggagaacacctactgcttcggccggaccgtggagacactgctgctccgctttggcaaggtaaccaggccctcccaggcctgggtcgcaagcggtcctccaatttggccagcattcatgagactactttttgtcaagcatcctttgggaccaggcctagaacagaaatgttgatcaccctggagggatggggtggtgaggtcaggctgactttgtcagcctggggcccacttagctactcggatgggtacccttgctgggtgagttttctgcagtgtttttctgtgcacctttcaggtagagaggctccctagaatcgggagggcagctccacctggggcctgaatctagggacctgattggtggggcccttgctgctgaaggtggcagtagcacagtaagcactggcttctggtctcagccaagcttctgggacctggtcttgccttaacccctccctgaatctagagctcaaagagaagggaaaacagaaggtggctgggagccgttctcccacaacctgaagagaaaggtgttattgactccactttctcaaggaacacaggagactaagacaggcaaagatgcagcccagggagggaccatgtgggggactggtctaggtagtgagtccccacttggagcctctgtgatcccagaccatcatggaggagcagctggtactgaagcgggtggccaacatcctcatcaacctgtatggcatgacggccgtgctgtcgcgggccagccgctccatccgcattgggctccgcaaccacgaccacgaggtgagcccagcccagcctcacacagggcctggctgctgccatctgtcctgctgcactttaatgaagttgattgttgaggagggtgtggtcgggtgtgggggaggctgtgcaggttcaccatgcggtggccgtgggagggtctgtgctgctcaggagatggggctgttccctttcttcttcctgactgagagaagagggggtgagtgacaggggttcctgatcccagtgcccctacccccagcaagggacagaccctgcacattgcccgctgtgctggagggaggcgggtgcagtctctgaggacccactgtataccaggatctctgcctgcactttccagagcacctgcagataccaggattgtgacatctgcctttcagaggaaacagggtcagagatgttgagtcacttgctgttggggaaaggctgttggatcagggctggaattagaacccaagacggggtgactcctgtgccaggccttgtgacccctgccatgctacccagtttggctgataggctgggtttttgaagctcagaggtctgattccaggaatttgggcatatcttttctgtcctcggttctggcaggttctcttggccaacaccttctgcgtggaagcttacttgcagaatctcttcagcctctctcagctggacaagtgtgagtggcatgtcttgggggagggaaggaagggcccacttctaggcccctattgatggtgagctgtttctggaccctgtcaagctcccagagcctgctagctactcacagacctctgccttgagcgagggcctgggtaggcctgggcttagctgcagcagtgcccaccaggcactgtaggtgcatacctgccccattcaccaaggcagttgtatgtatatatgtgtgtgtgtgtatgtatgtatgtatgtatttatttcgagatggagtttcgctcttgttgcccaagctggagtgtaatggcgcagtcttggctccctgcaaactccacctcttgggttcaagcgattcttctgccccagcctcccgagtagctgggattacaggcgcacgccaccacgcccggctaattttttgtatttttagtagaaacagggtttcaccatgttagccaggctggtctccaactcctgacctcaggtgatctgcctgcctcagcctccaaaaatgctgggattacaggcatgagccaccgcaccgggcctgccaaggcaattttagattgagcaagtgcagagccctttgcgcaggacccctggcatctgcccagcatgcctggctgtattctcttttttttggagacatagtctcactttgtcacccaggctggctggagtgcagtggcatgatcttggctcactgcaacctccacctcctgggttcaagcaactcctgtgcctcagcctcctgagtagttgggattataggcacgcaccaccatgcccagctaatatttgtatttttagtagaaacaaacagggtttcaccatgttggccaagctggtctccaacccctgacctcaggtgatccgcccaccttggcctcccaaagtgctgggattacaggcatgagccactgtgcccagccctggctgtattcttgaagctgcccggggaaggctcacgaagggaggagcatctggttgtacctgattctggagacagcattttacctgcccctttacccactgtactccatccaaaatgaccctgcagtgccctgcagaggtctcaggccttggcctagagaacagagggctttgctcgtgctccccgctctgtctgcagtgctcttcctcttctatagccactcgaccatatctaggaatgcccagctcagtctacctctgaccctcacagtcctgttgacctgaggttctggatcagtgtccccacaaagcccagtcgtgttgccaagtgatgggtgtaggcgccagcactgtggcacttgctgagagtggcatatgattttttgcaggtcctagccctgggggtagcccagacacccccccagtgctgacaggttatgtgctgtggagggtgctgaaatggtttctcctccagtgggctggaatcacagatgggctgtttacggagcaagtgccggctccaccccatgagatctgggggttagagatgagcaggatgagtcctttgtaactgagaatgaagctgtacccctttctctccctgcagccctgaatcacttgctgggggtctggaggaggggttcacccttagggctgcttcatggtgggtgggctgactttgtggaaaaatgcccccacttcagccatgtttgtcttatcacggtgcagaaagatcacccaccatctctccttttccttcccagatgctccagaaaacctagatgagcagattaagaaagtgtcccagcagatccttgagaagcgagcctatatctgtgcccaccctctggacaggacatgctgaggcaggggacagtgtcccctgctaccgcccgcccctacccatggcccgttgctggatgactgttactcttttttcagaaggtgttgggattatcacaggttaagccttttgttccccgtctgcacctgaagggttgtcgcctggcctgggagagcctcttccaggttttgacctgcaggcagtgctctctaacaggaccatcacagcttctgaactgagccggagagagagaatggaattgctgacccctggaactggcgggtattctggtcattgaggagacaccatagtggaaactggggcttatgctgctgcctcca

SEQ ID NO: 15355 - DNA, 32055 bp, Homo sapiens
agaggctgcggcctacagccggggagaggccagcccggcctacagtgcggacacaggacagaggggagccaggtgagccaggtttttgggcagggagggactgggagaccccagaggagagggctgcccccatgatgaccctgtccgcagctccgagagaccctgagcaaggctttcttcactgggcacctcctgcaaatcaggccctgcactaagtgttagggtcacggcatgacagtgacaaagatcccggccctcttgcagtttctgtgttagtagcagggagatggaagtaaacaaaaacatatgaaatgagtaaatgatctcaaatgtcagaaggggataagtgaaaagagaaaaaggagagcagagtgaggaggacagggaatgccgggggagggggcttggggttttaaagagggtggcctctttaaggttaaatgaggttcaatgcaaaaagccctagtgacatttgaagaaagggtgttctgggcagatggagatgccctagcaaatgctggcagtggcagggaggcctggagcattcagaacagcaaggaggcagtggcagcagagcaaggaaaagaggtaaggcaggacgagaggagccgcactaggggcacttgcaggactccggggggcagaggatggggccccttgccagcacccccacagccctgctgggggtattggtttgaaagcctcatatgaatcatttgctacatgtggttgcatgacccttataaagtctcctccctttccaaggcccacatcctctccataaaatggtaataacagcagtgcatctgtcaggttgaggtcaggaaggaaggggatcaaaagcatggcagcctgccggagagatttacaacatacctgctgcaagctaggaaatgcagagctggcctcccaggccttgtgggaggaacatgtaagcaaataagaacttgtccctaaccctagagcacccagggaacgagggagctgaactttgttcagagagaacagcaggggcaaagggtaggaagagaatgagtggaggccagggatgagggcagtaagttgacataggagagaggtgagtggagtagggttgggtagacacagcaaggactccattccacaaacagtgggccccaaggagcagattccaagcaggagaggaaaacaatgtgatttgcagttcaagagttcacctggcagctgggagaacaaataagaggaacactgaggccaagtaagagataacagtggcctggatgctagccaaagagatagcaaggagcagatggactcaagagacttgtgaaataggatggactgcacctcatggttgcctcactgtggaggaataggggcttctcagaggccaagcacttgccatgaaggagacagggtccaacctgggtatgaaagacactcaggggctccaggggaacacttcacaggcaggaagaaggcttcctcccttcagttccacaatatacctgcagggctcatagaaatggagctgagtgatcctagaacttatgagcagtttaatgagaccaaggtgcccccagcaatcctccacagtggagctgtagtatggacaagtcatgtgctttgtggtcagaccccatccaactcctggccatctccagctgtgtggctaggggccactcaacctctccaggattattttcttcaggtgtaagcttcactgacttttttgtgaagatttccctaggcaattcatgtaactcaaactgcagtggatagagcccaatctttggggtcaggccctgtccaattttggctaacaagtattgaacaaacatgtaccaagcaatggctgcataccatgcctaccatgcacacagtgcctggtccacagccagtgtccacagggggagtggggaggtggagtggcattcaggtacttagggatgtctttcttctaccaaccagccctggctgacacccagccctaggcagttcctcttgcacacaggttctttgcactgaccaatgctgagagcagaccctcggagcagccgggttggaagtgtctctccatagtcaccagacagatccaggataggatgggcagcccagtgcaccgagtgtcattgggggatacctggagcaggcaaatgcaccccgacatagagagcgagaggtatatgcagtcctttgacgtggaacggctcaccaacatccttgatggaggtgcccagaacactgcactccgcaggaaagttggtaaggggaagctggggaatgggacatctgttttatgccccatgcttctcttgtaagaagagtccttcattagcagttctgcttccaaataacaaactttgcccttgaaattccactgttagagattcattccttcgaactgtaaagacaatcttcacatgtcaatattgcctgagcccacctaggggatagaagagtcctaggcagcagaagacctggattctggtcctaaaattctgccactgcatagctttgtaaccttgggcaattcactttcccaccttggtcctcagttttgtcatctgtaaaataacaataatgtctgacttcctttccagatccatgaagcaagtgggtgagaagatttcaaggtgccagaaacctcacccaggtccctaagccctctgttctctgtcctctgcagagagcatcatccacagttacccggagtttagctgtaaggacaattatttcatgacccagaatgagcgttataaggctgccatgcggagggcattccacatccggttgatagctcggcgcctgggttggttagaagatggtcgtgaattaggctacgcttacaggtgctcactcctcgagcagccccactagagagggatctacctgggatcacctggaaaccccctagccccatgagccatttcccccaacaaagggaagacttgttgggaaaccaggatgctaggtgccctttatctcctgtactctgctcaggcagggggtacctgggcccctgtctccaataagctactcaactacagcatctctccccaacagagccctttctggagacgtggccttaaatatacacagagtcttcgtgagagccctcaggagcctgggctcagaggagcagattgccaaatgggacccactctgcaaaaacatccagatcatcgcaacgtatgcacagacagagttgggacatggtgagctaggactgctgcgtgtggtgtttaggttgtgcactgcaaaactccagagggcccatttacatctaggtagtcataggttcatatgctccgagggacatatgtttaataagaaaacattccagcagctggcagtcaagggtcctgaggaaggggtgccaccttctaatttgcacgtattgtatgagctcccagtggggcaagtcattccttctggaaacatcagcagccaccccttctcatggactggctataggggactgtgtgtcccacacacagcccacagatgaaaggggagaactgcctgcaagtacagctgggagctgggccccactccatactgcgctgatgcctaagagttcagacccacctagaagcagcttcacaggtaagaaccccacctcaggccaatgtctaacacctctccttgatcctaagggacatatcttcagggcctggagactgaagccacctatgacgcagccacccaggagtttgtgatacacagccccacgctgactgccaccaaatggtggcctggagactgtgagtatacatccaccccccttccttaactctccccaagtagaagaatgttggagggcagagtagcactggctttgaggtccaacagacctcagattgattttctgttctaggctgctgaccttgggcaagtcagttcaccaacctgagcctcaggttcttactctgtaaaataggtgggatattaaacatttcattagtgagtggctggaaagtccccaaaggaactttgaagtagaggagacaatcgatccatgagagacaaggcctcactcacacacacacgcacaaacacacacacttggtctagtcctaggcactcctcacaaccccggttcctctcatctcccgagttagtggcagagcttgccaccagccagagcacaggccctgtgatgacacagtggaaagaatacgcctgcctgcccctgctgcagacacccaggaaggctcacgcccatcaccagcccccatcaggccaccaacgccgtacctcctgctgtggccaccaggtggcggccacatcaagcgtccctgaggcttggtgatttaccaagccccaacgagggatttccccttcctcaaacttgagaatttcacctccaaggacacatctgtggcacttggggacccacaccttgtgtggaaaaaattaaaacaaatatgctgagcccaactaaagcaggagagtgacagagatgagagacacatagagagagggagacacaggcagagaccagagacataagagagagacatgagccgggtgcggtggctcatgcctataatcccagcactttgggatgccgaggtgagtggatcacctgaggtcaggagtttgaaccagcctgaccaatatcattaaacctcatctctactaaaaatacaaaaattagtcgtgtgtggtggcgggcatctgtagtcccacctactcgggaggctgagacaggagaattgcttgaacctgggaggcagaggctgcaatgagccgagctcaggccattgcactccagcctggcgaaagagtgagactctgtctcaaaaacaaaagaaagaaagaaagaagaaaaagaaaaaaaaagagagagagagatgagagagtgatgacagaaagagagagagaaaataaatgaccactgtcaaaaatgaagacaaaagaaaccagccttttagatcagacagaccagggtacagatgaatcctagctctgcccctccaggccaatgaccttcagtgtgtcactctactctctgagcctgtttccttaactggaaaatgggactcatcatcctctctcccctgcaagaactggaaagcatctatcacagggtctagcgccacctagattttgataaatgataattatctgtattcattattataaggttgatgacagagtaattcattaatagttggggggggcaaaaaaaaagctggatcatttcacagtgcctttgccaacgctgctaggtttgcttggttctttgggggcaatcccctctctctttgatcagtgacttttcagggccccagaggtacccatccaaaaccccagccccaggaggctgggttggttgggaaaagcaatgcacaggtcttcctgtgacgggccgctactctctctgccctcagtgggacggtcagccacccatgccctggtccaggcccagctgatctgctcaggagccaggcggggcatgcacgcttttattgtgccaatccggagtcttcaggaccacaccccactgccaggtaagcccataatgctccctcaaggaaccctgccaggaggagagcccaggtggcctccctgacctggggccccagagggccacaggagtagctaagacatgtctcccttgggcagggagcggtccagttggacagacttggtgctaactggctaggtgaacttgagcaagatttagcatctttctgacctcagcttgttcacctgcaaaataggtacaataatcccagtgtcacaggctgctgtgacctggaatgtgtgtatgatacctgccacatagcaagcactctctcaactgataggtgtcctcatctccatctccttcaaggaatcatcattggggacatcggacccaagatggactttgatcaaacagacaatggcttcctgcagctgaaccatgtgcgggtccccagggagaacatgctgagtcgctttgcacaggttacagatctggggaggccggggacttgtacttcctggagaggggacctgcgctttgtgcaggctgggcctgggtcctccatagagcttagtttgggccacataacctcctcccccaagagaggctctgatatcccacagattggggtgaaacccctgcttaggagcagtatgatcttgggcacagagcctcagacctctcatgcagaaatgctcgtcacataggctgacagagcaatcgtggggtggggtggcagccccaggagaggatagggctgaggtgacctgcataatatttacccacagtgaggcctgacacagccaatcgcccaacagataccagccagaatgccagcaggagttctgaaggtcccaattctgccaggcatcacccctttagttatgggtcgtggggaggtccggggtgtcccaggagaggcactgtgaagcagggcacttggggaaatggcctggtattttaacactccaactccagatgcgccggttgaggggcgaggtgccctccatgtgtggagccccacagctctggagaagcgagggcatcctgggaagccttggcccagaacttgtgcccgtccttgttccacacaggtcttgccagatggcacctacgtcaaactcggtacagcacagagcaactaccttcccatggtggtggtgcgggtggagctgctgtcaggggagatcctccctatactgcagaaggcctgtgtcatcgccatgcgctactcggtcatccgccgccaatcccggctccggcccaggcaaggggtgcccagtgactgactaccgcagatatgctgcctcttggtcccacagtgcctccccctgacaccacccttctgccagagccagagtgctgggagcaggcaatgccccccaccacatacacacacacaaacacaaaatctacccagcctggccccatctgggcatgtcagaggagtctctctggctgcctctaacagggctgaccagccggcctaacctgcatcctcagtgcctggcccccatcgggctctatgtgatagtgtctttggccctgtagcaccaggtctgtctgactctgtgtctgtccgagtccagccgtgttctgtgcggctgtgacgggttggacgggtctgggtcagccagttgccagctgcatcagactatggctggctgagttgattctgtcaggccgagcctagcaaaatccaatatcatatcgactgtgtgtggctgagctcgttctgtccagctgtgctgtcagcatcccactggtatgtctagtctggatcccttttgttgtaattggttgtgttgctaccactccctccaccccacagcacagaatagcaagggctgcctgaaccctctgtgaacactcagctcggccatttcacttcatccctcagcttcctcagctacaaaatgggtgtggcagaagtggcctttcagtgtggtgtggagggtgaaatgcagtaaggcacattaagtcctcagcccagggtcctttcctctggcaagctcacagcgccctcgcctggcctgggcttcagaatctgggctgcaagagttctctggaggacagggccactgggaagaaggggcttctgctgctgtcctgcccgaggcccatttatctgggctgcagaagtgtccccagggtggttataagaaagatgcgccaggtaagcagctgctgtctgtagaggaggcttcttgtaatcacatcctctttcaatccagttactgcgagctcctaaatgccggacatagccttgggcactgaggacatagcagcggataaggcagacacagtcccttccttggggttccatcagacctgagtttacatcctaagagttattgtttaggcttgacatattcctcagcgcgcggcaagtgcacacgggcagtggaaggtcacaggttcaaatcatcacaggtgcagggccacaactcttcacctgaaatcttgggaccagacgtgttggagtctcagaacttttcaggttttaggataatactgtgtatatgctggaattctataagcctcccttaacaaggggcagtacccaccaacaaatgtgtcagtattcctgcagtgaaatgtgtggatgttcatgttagatgggatttttaaaggattatcaatggcctcatgtcagttcaagttttgcaatgagttctaaggaactgtctgtttttaaggtttttatggtgtcggggataggggaaggtggacacaacaggtagtgatctaaatcttctggttcttttcccttcagtgacccagaggcaaaggtcctggactaccagacacaacagcagaaactctttcctcagctggccatcagttatgccttccatttcctggcagtcagcctcttggagttcttccagcactcctacactgccattctgaaccaagacttcagcttcctgcctgaggtacctgctgtctgcggaggggcaggcgctggcaggcgctgggagctaagattgttccactcactggggagcagccacagccccatccccatgggcactccccacccccacctctcccagctttcagcatcccagggcgtctgggtgaacggcaccctggtatataaatttacccacaaccagcccccagagagctacaaacatactaagagaaaacaatcacacctagcgtagagaacacaggtccacaacccctgatgtgtatttgaaacctgaaaagctccgaaaaacagttgtttggaactcatttggtggcatagtttgacctgaactgacctgatttatccctctgagtgtgaatacattttgcagtaaaattattaatgtgtttaatcactaaagctgccccaaaccccactggggctattatataaaatgcactttaaatgccacttggcctctctataatccaaaagttactctgattcctaaacacatctggctcacaggtctcaggtaaagcattgtggacttacatatatagtaaaattcagtctgtccaggctaccatgctttataagcactgctcattaacccttccaactgcaatgaggcacagagagatcaagggacataactttcctcccaaggacttgaaagctccaaagataggcagggtcttcaagaaccaaaatctgaaagcagtcctgctgcccagcagcctctgtcctgttggggccactgtaacaaaataccataaagcagtggtttataaacaacagaaattggcctggcatggtgacttacacctgtaatctcagcactttgggaggccagggcaggaggattgcttgagcccaggagttcaagacaagaccagcctgagcaagatggtgagacccccgtctccacaaaaaaaaaaaaaaatgaaaaattagtcaggtgtggtagcacacacctgtagtcccaactactactttggaggctgaggtgggaggattccttgagcccaggagtgcaaggatgcagtgagctgtgattgtgccactgcactccagtccagcctgagcagcagagtgagacgctgtctcaaaaaagaaaaacaaacaaatttattgctcacagttctggaggctgggaagtccaaggtcaaggcactagtgcatttggtgtcaggtgagggcctgcttcctgaacggctttttgctgtgtcctcaaatggtagaagcagcctctttctttcttttttttttttttcctgagacagtctcactctgtcacccaggctggagtgcagtggtacaatcttggctcactgcaacctccgcctcccaggttcaagagattctcctgcctcagcctcctgtgtagctgggactacaagtgcacgccaccacgcccagctaatttttgtatttttagtagagacggggtttcactatgttggccaggatggcctcgatctcctgacctcgtgatccacctgccttggcctcccaaagtgctgggattgcaggtgtgagccaccacacccagccagaagcagcctctttcatgagggcactgatcccattcatgaggcctccaccctcatgacttaattacctcctgaaggccccaactcctactaccatcataatacctcctaatcctagtcctaatcatcaatacctcctaatcctagccctaacccttgagggttaggatttctacataagaattttaggtggacacattcagaccctgtcaccctcctacaacccagtaagtgggcttacagtggacacccatcctcataagctagctttctaaaacccaggccagcaaaatccgtaactcctggaggtttgtgggcccaatccaggcagcaccctcttcccaatcctggagacactggccaggccaggttttccttcactcttatgcccctacagctacattgcctaattgtgtgcctctgggtgagtcacataagctgagtacccgccttctcattcataaagttgtgagcagaggaaacacttcttacctcagagctgagctgggcatgagtagatgctcagtaagtggtgcacagggttggtccctatggtggaggccccctaacaccgcccaacccccctccatgttctcacagctccacgcactgagcacgggcatgaaggccatgatgtcagaattctgcacccagggagctgagatgtgccgcagggcctgtggcggacatggctactcaaagctgagtggcctgccatcactggtcaccaaattgtcggcctcctgtacctacgagggtgagaacacagtgctctacctgcaggtggccaggtaaggtccaggctgacccaggcctttgcccaagcccttggggacccaccaagcttctgttgggtggagggttccgtctgaggcccataaaaagagcaggctttgcgaagtgctatttgggagctgtccaattccccagtatgactaacctatccacttctaggccaccatcctctctcacctccaccacagcctcagacccctccctggtctcttgcttctatcctgtcctgcttctccacaggcagccggagggatctgttcagagcctagggaggatcacatctttctctggtttgaaattcttcaacggcttcccagtgctcataggaaaatgacatattctatgctgtggcctgcaaggtccatgtgacctgacccctgcctccccgtccatcctgctctcaccacctcctgcctctgctcacttcttcttcttctttttttttttgagatggagtctcactgtcacccaggctggagtgcagtggtgcaatctcggctcactgcaacctctgcccgccgggttcaagcaattctcctgccttagcctccgcagtagctgggattacacaccaccatgcccatctaatttttgtatttttagtagagatggggtttcaccatgttggccaggctgctctccaactcctgacctcaggtgatccacctgccttagcctcccaaagtgctgggattacaggcacaagccaccgcacccagccacctctgctcacttctgccggccacacacttctttctgtccaggaggcctttgcatttgatcccctcccacccaacatggccttgtttcctttggagcagtttcacaatctatcattgtctcatttttttgttcacctttttagctctactctccaactagattaggagctccctgagggcagggactacccctaccttgctcgctttagcatcgcctaagcttggtgcagagcctgcacacagaggctccaagcaatggccaagtcagcttcctccacacaggcgatttcttttcatccctcttaggtctgtgggccctggaggccgacagagcctcatcctcacctattctcaggtgaacaaacagggcaaatgcttccctatgcaaggagaaagaagttcactggcaaatatgaaaaacaacatttattatatttttaaaaatatataacatcccttggtttttttccaaattagaaaaggagtacaatagcacatattatgtactctgcactgtgccaagcactctacaaatatcatctcattccatttcacaaaccctcaatcagatgagaactgtcctccccacctagagctagagaaacagagacttgggaggtgaagcttctttcatcacacaggtctcggcgaggctgtatgggaatccagggctgtctaagcccagaacctgtaaccactggattatcctaaagcagcagttgagagtcacctataatcctcctactcctgttagcattcttgcctctatccttcttttttcagctaagaaaatttaatttccacccagtcactgtacaagtcattataaatcccaaaatcacagtgttctgatggaaaattctgtttgctcagatcacagaagggtttatgttcaggatcagagagtgtctggcccagctccacaggtcctgggatatgcctgactgagggcctcgaggcaggacggcccgagggggaaccctcaggagggaggccaggcagaggcctggtgacctggctctcccacgggaaggctggaacctagcatgagcttgcctgtctctgggagtgaggggtgctgggctgtctcacagagtctctgccctctcacctgcctcctcttccaacccccaggttcctggtgaagagctacctgcagactcagatgtcccctggctccacgccacagagatctctctctccatctgtcgcatatctcaccgcacctgacctggccaggtgtccagcccagagggcagccgacttcctctgcccggagctctacaccacggcctgggcacatgtggcagtaaggtaagccagtgctgagaaatcagccatcccacctgggcacaggctccatgccacactagggcctttggattggttgggtggacattcgtggattcagttctaaaaaccaccccatgcctagcctccccggtcctctcagttcctgccaccatgggcagagagaggggatgtcccccccatcagccatggacccccgtcacttccccatcctggtcacagtagtagaaggacatcacacctctggccagtgagatatttttaaaatctctagggtcctatggtgatttgcaatacaacgaatgtacccatatgtaaatactccaaatgtattgatatgcaaataccaataaataaagcaatactcactcgtacgtttgaaatatcccataatctaaaaataatttttgaaaatatgactacaccacgggatagaattcatttatttccagggtctagtaggctccagggaacatggacaaaaccaaggactcatccattctgtcattcaacaaatattgttcagtacctactatgtgttaggaatgaacaaatgtgccaggggctgggaatagagaggtcctgaccaaacacacataccaccatggaaaagatggaggtttaactacctaaaaagaaaacgttctgaatgctgcccccaaattaaaacaccgaaaacaggctgggcatggtggctgacaccagtaattccagcactttgggaggtcgaggtgggcggattgcttgagctcaggagtttgagaccagcttcggcaacatggtgaaaccccacctctaccaaaaatacaaaaaattttaataaaaaaataaaaaggaaacaccaaaaacaaactggaaaaacatattttcagtatataataagaggtcttatatcccaacctgtggtcccagggatggttaatagttatttcaagatcacaagcaacttggaacattcatttatttattccaaaaatatttattaactgcctataatatggcaggcactgttctaggcattagggacctatcagtaaataggcctgataaacaccccaaactcatagagctaacatttcaattgggagatttgaggaggggaagataaggctgctcgaggtgattaaagtgtcatggtatttctccttgcttgaaactcagtgtgacatctgcttatctattccctgacaaagcaaaaaacatattgcttaataaacagtttgctttacacacaaattctaagggtcatggatggatgggcagggaatagaaaataagaggggattaaaggttatttaatgactaatttagtggtttgcaggacaaaggttggttttctctttttgtttttaggtcccttgggtagaacctgcagcaggctaggtgaccgacgggcctctctagcctttacagaaaaaccattctccttgctcaggccacaggacgtcagtcaacaaaaaggcctgaacatactggtgtgaggctggaatctgcattagaaataggggacagctcctggcctgtggccctgaggctttataacatggcgattaacaacaagtcaaaatcctggctccactccttactagctgtgtgaccctggacaaattggttaacctctctgggactcagttttccccattgcaaactggggggtgcctgcccttaaaagagttaaaaagataataaatatcaatcatttagctttatggcacataagtggtcaataaacaggcattatttctacttctgagggaccacaggaagcccatcagttgtcttttccactcagtcaggaagctgaaccttttttgctttggctttcaggctcataaaggactcagtgcagcatttacagaccctgacgcaatccggagctgaccagcacgaggcttggaaccagaccactgtcatacacctccaggctgctaaggtgagcgcctgccagctgaagctgaaagggatccattttgcttcccaggcaggctaccctgctgggaaaatccgggctctgccattattccccaactctgcttcagtggcggctgccctcatttcacttccaaggctttagtccagggtattttaattaaaggacttaactccaaagcaatcttgctggcagctcttaggggaaaaggtaatgaggcagtgttattggatttgcttcaggttgttcaaatatttcctcccagatagaaaagcaggtcaagtctccccttagccccacaggcaatccttggatgtctgattccatttccactcgttttgtgtttctgcataattcacagtcggtcggcaaatatttgagcacccactctgccctgggcactgacctgggtgctcaacagtgaagccactgcccatgcacggctacaatcaaggaagcaccatgacagggaaatacaggctgctatggaatcccagagcaggtacacttctgcccacctggaggagtcagaaaggcttcccaaaagaagtggcatatcagctaagacttcaaggataagctgaaattagccagctaaagggtggggtggcagctttggagagaaaagtttccaggcaaagggagctgcgcgtgcaaaaggaagcagcaagaaggatcctggtgtgcttgggaggaagtgcaaatctcccaaggaggacctaaggagaaggactgagactaggggagaaggagagacaggcaaggcctctgaccttttgcaccactgtgaaaagttggggttttgttttcattgcaatgcctttgctgagtttgtttggaggtggggtaaagtgatcagtttcattctagaagaatcatgcaggttgcccaggatggaatgaaagggagcaagttagaaaggagcaagtctgaaccgggactgagggtggtcctgaccatgagcatggcagaaggcctggagacaagtgggtagatcagagatgctaagggggaagaaggcagggacaggcctcagagtgctggggtgggaaagaggtaagaacaactcctgagttctagcttaggcagctgggactctggcaccgccaataactggaaaactaaagtgatcacgccaatcctcaggcctcagacccagaaaatggcagccttggaacaggagagccctgaagggctgcagaggccctcgtgggacagggctggtcaggcaggctggacgttgagcaccaccacgtgacccaccacctccaccacaccacacgtgatgggattacctctgcagccctcagttctgctcagcctacagcaggggcaccccctgctgtgctaactgtcctgtcaacacagagggtgagccaaggcttcctgctttcactggatcaccaaaacagaaaccacagccacccattatccactcattcattttccaaacctatggcctgccttcaaatggaccagatgctgcttgccagggttacttcatttaatccacacagccctgggagggagactgacattatttccacttcaagggtgaggaaagagaactcaggacttaggtcccagaggtaggaaatagctgagtccagatgctttcccttcccacaccactgagggtgtgatgagtgactgaggtgagcaacaaattctggggggatggagggtgacagccagccagcctgcgggggaagaacacgtccctgacagcttcctggggaggtggtgccccagctgagtctccaaggtcataatggatagggctttctgtactctctgtgctttgtggggttatttagtctacagaaagcttcagcacccaactgggccccatctagaaaccataaatgtgcaggtagagataactgcaacttgagggaagaggggatgatactgccagaagagtagacaagggggagccacgggctaaattctggtcccagctctgtgtgacctcaagcagccccttccctctctgggctttaacttccctgtctgtagacaaaggggcatggaagagccctttaggctctgtcaggccgtggtcctataattcagactctgaccagaagagatgtcagtctccaggaccatgggaacaaatgctggcctcattataatccagcctcagtctcctgtggctttggccacacagggttaggaatacagccctggtgtggatctcactgctaccacttcctagccatgaccttgggcaaaaaacttaatctttcagagcctcagtctcttcgtctgcaagatagagctaataacagtacctactttgtaggattctaataaagattaaataagtaaaacttagagaggcagctagcacccccacccccaaattagacaggaggcaagatttaaaccaacacacacaatgtaaataatgttcactgtgctcagagcgtggggccaaggttcagctcagcccttccccaaagtgtagaggtcacctctgtctctgatcctcatcctgctttttaaggcccaggcccctgggcagctctccatcactccactcctcaactcagagccttgagcatttgaggatgtggctctcagattaggacaggaaaaggagtgcgggtccgcagttctgccaagctggacccagtctgagcaacaaaggctactggagccagcagaggcaacacagcacatctgctcaccttccacagccaaatgctgcaagcccagcatggctgtgagcacaccatgtctgaatggcaaagtggagttgtcagcacctgtgtgagggccccctaggaaacacaagttctttccaagtgagaaagcggatcgggtcactgcccagctgaagactcccagtcccacagagcaaattctgaccatgttattcacagcccttcactgacctgggccccaggtatgagtccaccctaacctccatggttccccatcatcacctcattataccaccacacttcagcctcattaaattgcctgcagcttcctgaaagtacagccttttgcacataaagctccccctgcctggaatgacctttcccccaactcatgtccgcctgggtgaactcctttgaacccccaaggcactctttttttttctatgatagagtctcactccaccacccaggctggagtgcagtggcacggtctcagctcactgcaacctccacctcccaggttcaagcaattcttgtgcctcagccttccgagtagccagaattacaggtgtgcaccaccacacctggctaatttttgtattttttgtagagacagggttttgccatgttggccaggctggtctcgaactcctgacctcaagtggtccgcccacctcaacttcccaaagtgctgggatataggtgtgagccaccgcgcccagccgaacccccaagacactctaagtcttgctactgaaaatcactacagcagcatgggcatcacaggggaccttgttagaaatgcacagtctcaggccctgccctggaatctgcattttgacaagatccccaggtgatctatatgcacataaaaaactgagaggcagggcggggtccagaggctcacgcctgtaatcccagcactttgggaagccaaggaaggaggatcacttgagctcaggagttcgagaccagtgtaggcaacatagcaagaccctcgtctctactaaaaatacaaaaaaaaaaaaaagccgggcatggtggtgtgtgcctgtggtcccaactactcaggaggctgaggtgggagaatcacttgagcccagtgggacagaggttgcagcaaggcaagattgcaacactgctcttcagcctgggtgacagagtgagattctatctcagaaaaaacaattaagaagcactgctttatactttctctcttccttgctctcccttatagaactcatatatcctacctgacaaaataattgtgtgtgcttgtcttgacgagatgcggactgttcaaaatatgttacaaccagtaggacaaggcaccaaccaatcaaaatggactttagccctaggggaagcaaggtcctgaaggcctcctgctgagtcaaacattaatcctttagttgctgggctgtggagagaaggagggggtcttcgggaaggagtccatctggcagaaggggctctcacagggttgatggcagtggacagttgccagctggtattaaagtattatttttacaactgccacagccagaccataacatatgggctaaataacagcactgcttaccttaaggagtttatactctagctggaataaatttcatatatatcttgaaactttctcaccccatggtgcacacatgtgcacgcacacacacacaccactgacttgaacacagcagacaacaaatagctattttcttttcttttctttttttttttttttttttttttttgagatggagttttgctcttattgcccaggctggagtgcaatggcatgattttggctcactgcaacctccgcctcctgggttcaaatgattctcctgcctcagcctcccaagtagctgggattacaggcatgcaccaccatgcctggctaatttttgcatttttagtagagacagggtttcaccatgttggtcatactggtctcaaactcctgacctcaggtgatccacccaccttggcctcccaaagtgctgggattacaggcgtgagccaccgcgcccagccttaaaatagctaatttcttaagaacagtggtgctgtcctccaccttccccaggccagcctccaatatgcctgtattctttccttctactttccaacctacttgaaaccgctccaagcaaaagaaaacaagggccatgtttcaaagcccaccagtcccccccgtccccgctcccccccccaacacacacatatacacaacatcaaaacgccttgatcagacccagagctaggagaaaaggcagctgctcatcagcctgctgggaagcacatcatgcctcaagtttattccagccatcttgccatgcttccagggtgacttctggagtagaaaaccagaaatcaggagaacatatctttgtgtctttgtaggtgcactgctactatgtcactgtgaagggttttacagaagctctggagaaactagaaaatgaaccagcgattcagcaggtgctcaagcgcctctgtgacctccatgccatacatggaatcttgactaactcgggtgactttctccatgacgccttcctgtctggtgcccaagtggacatggcaagaacagcctacctggacctgctccgcctgatccggtgagtggcagagacttcaaaccatgttagtcttcagagaataaccctaccccttgttcacaggtcacttccaactccaaaaccttgctaatgggcagagcagcaacagccctggagaggtctacaccctattatcattacaccagcataaagcattatgaattaatgaaagaaaaaaatgggaaaaaatgggaaaaatactgaagaataaatgagctacctcagttgaactctttacattgtcaaggaaataggaatagtatctaaggaaaatcaataaaatgaagcatgctacatatgaatgatatgtgctaatgtgctaataatagtctcaaccatagctaactttttttttcttttctttttttttagacagggactggctctgtcacccaggctaaagtgcagtagtacaatcttgtctcattgcaacctctgcctctgggttcaagtgattctcctgcttcagcctcccaagtagctgggattacaggtgcccacccccatgcccagctaatttttgtatttttagtagagatggggtttcgccatgttgaccaggctggtctccaactcctgacctcaagtgatccacctgccttggcctcccaaagtgctgggattacaggtgtgaaccaacgtgcccaggcatagccaacctttaaagagcacttatgtgacaggccctgtgccaaaagcttttacatacatctcatttaatccttacagccctttgaaatgggtactattaatctcctcattttattggaaaggaaattcaggctgatgggagttgcccagtatcacacaatcagccagaggaggggctgggtacaatctcaggtctggcccctgggcatgagctcttaacctgtatgttaaggttaaggttgaggtattatatactttgaacacatcctagtctttgttgaatgtgcttaagcaaattcttaccaagtttagtaaacttaccttaatcttccctcagcttcaagatgaaaaattttttttaactctgtaattcatatattgatttataaaataataacacaaagttttttaatgcagcattaatgcagtgccatgtatggtgaatgaaatactaatgcagtgctttcacactattattctataatctaaacgattgctttaaaaacatatcaaaaccaaagcccaacctgatcagagtcctagaaaaaaatagaaataaaaacaataaagaaaaaaaaaagcctgggcaacatggcaaaaccccacctctacaaaaaatgaatcaggcacacacctgtagtctcagctactcgggaggctgaggtaggaggattgattgatcccaggaggttgaggttgcagtaagctatgatcacaccactgcactccagcctgggcaacaaagtgagaccttgtctcaaaaaaaggaaagaaaagaaaacattgcaaattatttaccattgtccataagattaaaaaaaatggactaatttgagaatataatctttttgagacctcactgggcagaaaatatgatacctattgcatggggttagaggcgactcctagaatctccaacaattcttatatcaacaagactaataaaaagaaaaaaagaggctgggagcagtggctcacacctgtaatcccagcactttgggaggccaaggtgggaggatcacttgaggcaaagagtttaagactagcttgggcaacatagtgagaccctgtctctaaaagatttgtaattttttaaaaataagattttaagacaggtttttaaaaaactagaccaaattccttttatttctcacaatatgcaatatgttacatgccctttatgactactcatagcatgtaacagatagctggtggtcaaaaaaatgtttgttcaggccaggcgcggtggctaatacctgcaatcccagcactttgggaggccaaggtgggtggatcacctgaggtcaggagttcgaggccagcctggccaacatggtgaaacccggtctctactaaaaatacaaaaattagctgggtgtgatggcacatgcctgtaatcccagttacttgggaggctgaggcagaatcgcttgaacccgggaggcagaggctgccgtgagccaagatcgtaccactgcactccagccttggcgacaagagtgagactccatctcaagaaaaaaaaaaaagtttgttcagttaaatcatcaaaaactgtcaaaaatacgtttgacacaattatgtcccaggtataaaactttccctaatacagggaatccagtggtgaaaactattaagagcataattaagtactgcacagttcaagcccaagggtgtccatctttttgaaactctcagaatttaaaagcacttgaaaataatgttctagccccggttgtcagtgatgataaaatacaaaagattaccttaacaccctataagcatgttttttaaatttgcaaacagcatttctaagtgcttgccttggctccagaaacttacaattcaagacaagacagacagcccagatgcaatctgccaacttactcatgcgtcaaacccagaaattgatttacttccatgatggttcctaagtagccttactactgcagggtaattaggcacataacagattctatgcatatcactgtttggtgtcacagttccctgccttgattagtcactatctccctaagatttctgagatgaaaactgaagggcggcatagtatgctatggatgccaagaacaagctctctgcaatgttaactgacccaaacagtttttagttgtttaagcggtcataaaacctcagctggggggacttccaggtaaagatgacagattaaactatgcatttacttctgttctttcccgaaaccctactaaaacatcagtgaatggactgaaattttttaaaaggcataaacccacaaagagaaagagatgttgtctctgtgttgtccaggctgctcttgaactcctgggctcaagggatcctcctaccttagcctcccaaagtgctgggattacatgcatgagctaacacacctagcctctgtgagtaattttaagactttccttgactctgccctggcagaagggtaaatagaggatctgtggactagggagcatcaggtatagttgataataaggctacccttcagaaaacacagggttctttataggccaaatactgacacctccctcccccagaccttttttcccactggttcctaaaaaactggcagccagactagtaccctgcaagaagatggtaagatgatccttctctggagaatctgaccagcccaaggagaaggagctaaagacactgacatcagagtcccccaatggtccacccaattcactccatagtgaaccccatactagcaagcatagccacaagtttgtaatcagctagttaaggctttgcttttagctatgatcagacactcagggatcaccaaacacctgaagaatgcccctaacataaaagatggagaccaaaacaagcaagaacaaggcaattcagaggacataagagaatccacagggagaagaaaacttaaaaaaaaaaaacagtgatatctcagagttaagagacggtattgcaaccacaaaataaaaacctgaatgccattatttaaaactaatattcagagaacctaaaaaaagagctccttgaagttaaaaaatgataatggaaatgaaaaactcaatgtaaggactggaagataaagttgcagaaatctcacagcaagaaagcaaaaagacaaaaaaaaggaggacttttaaaaagtaagaggaccaatcttagctgttcatcatctgaagaacaggtctagaaagaagacagagaaaacagaaggaagcgaatcattaataaaataattcaagaaaacattcctcaaatgaaggatacgagtttcagatgaaaaagggtcacagatgcctacagactagaggagaggagacaggcacacacatgcacaaaataagtcacactgtataccatgtgaaatggtaatacctaccatgaaagaaaggatagcaggaagtggaggaaagaatgctgggggtcagtagggaggagggggagctacaattttaagtaggccagagaaggcctccctgggagggtgacatttaaggaaagacctgaggagaaggtagggagaagctgttgtggctgctagggaaagagcattacaggcagaacataagtacagtcatgcatcacttaatgactggaggatccgttctgagaaatgtgtcttcaggtgagtctgtcatcatgtgaacatcacagagtgtacttacacaagcctaaatggtatagcctattgctcgtacagtcacacctgcaaagcatgttgctgttctgaatactgcagccaattctaacatcaatcactaagcaataggaatttttcagctctatcataatgtcatgggaccgccatcatatacatggtccatcattgaccaaaacatcattatgcagtgcatgacagtacaaatgttggagaccagagtgtgcttggcatatccatccagagaacacagaagaggccacaggggcaggaatggcatgactgcggtggaaaatgacggcagagggcagagagttaagggagtacagtagggggtgggaagagacggtaaggtagatcattgcaaagacttaagagaatgcgagggttttgagcatgggatagaatgggagggttttgagcattggatagacacaacctaaaagaatctgatgtgtatttttaaaggcttgctccagctgccatattaagaactaagagtgaaaagcagggagatcagctggatcgctaatgcaatcatccaagtgagtgatgatagtggattggagcagtgacagtgctggaggtggtgggaatggttgaagtttgaatatatcttgaaggcagaacaggatttgctgacagattagatgtatggtgagaaagaagagaagaatcaaggtttttggtcagaagggcagagctgccatttactataaatgcggaagactacaggaggcccaggtttgggcagggtggacgggaaggagtttgggttcagatacattacttttgaagagcctatcagaaatccaagtacagatgttggtaagcaggggacactggagggataagtttggaagtcattggcgtatggttgatatttaaagccttgagaagaacatcacaaggagtgcatgaagagaagaggtccaagtactcagtcttgagaccctcgcaagataataaggaagtaaccgtggcaagagctatttctgtggagtggtgggagtaaaaacatgaacagatccagttcaggagagaatgtgaaaattggaaatcataagcataaacacacataacactttcagggagttttgtcctaaacgggagccaaggtgatggagaaggaaatagagtcaaaagcttgtgtttaagatgggagaaatgattgtctgtttgtatactgatggaaatgatccagtagagaggggatttttttttcttgtacctttctttgaacttgatcttggcctcccatcacgccttgtgtttaagagcaaggtctttgaggagatccttgttgatgacagtttgtccaagaggatatctacagagtaccttgtgggcatgaggtgattgcagttataagcttttgcaaaagacttgatccttgacctcttggagatcttcttgcctatggcagctgtcactttgtgaggatagcagtcaattccagctaccaaagcatgactgtaagaatggactgaggtgccatcatcaatgtccttcatgataatggctttgcgtccagagtagcatccagccaggaccagcaccactttcccactttttcatgaacttgcccattttgacagcaaccagccaggcctacagtaaaaagaaagaagggcatttccactaactttttacccctgaggggaattttgatgttgttggagaaaggcaggagaatgttgttctccagtatgcaagaggaaaagacatctagtagacaaggagggactgaggcctgagctgagagcctgaagagagaaagcattgtatgtataaatgcaagggtgggaacttacacagattctcttactgcttccacttcattagtgaaatacgatgtaaagccatccaggcaaaagagatgggaaaggtggatagtgtcaatctgaggatcaaagagatggtaagaaataactgcctaagaaaaagaaacagtaaatgaacaatgagtaaatatagcaatgtaatacgattgctgagctgcaatcagggcccacttgagcccttattacaccagttatgattgttttttccagccatgtatagttacaaaggtggtggcacaaagtgggtggaaaactaaagacaaagaggtatgcgttttgctaaacaggtatgacaaagcaagaaaaatcgttgagtgtgtgtgtgtgtgtgtgtgtgtgtgtgtgtatatatatatatatatatatatatatatatatatatatatatatattttttttttttttttttttttttttttttttgagcgggagtcttgctctgttgcccaagctggagtgcagcggcacgatctcagctcactgcaacctctgactcccaggttcaagcgattctcccacctcagccttcccagtagctgagactacaggcacacaccaccacacctggctaatttttgtatttttagtagagacagggttccgccatgttggccaggctggtctcgaactcctgacctcagctgatccatctgcctcggtctcccaaattgctgggattacaggtgtgagccatcgcgcccggcctgttgaatgtatttttgagagagtaatagaacatggaatttcagctggataaggaatgaagtgagaccacaagggggcagggggacattaaattggcggtagggctcatatgatgttggggatcatcaagaaacgattacattggatacagtatcccagttaccaccaatgctttaatgacacacaatcatcataatgtcaatactaaatattggtctggccaaaattataactatattgggaggcccgaaggccaggaggaagaagaatgggaacaaggggaggtaggagtgaagagagggggtgataaatataaatctttaccttttgaatgaagattcaacagataatatctcaaactgaaccatcaacaagcagcaatataaacaagatattttgacattcagataaatactgaaatatcaactaaaagattgaaattgccagccgggcatggtggctcatgcttgtaatctcagcactttgggaggccgaggtgggcagatcacctgaggtcaggaattcgagaccaacctggccaacatggtgaaaccccatctctactaaaaatacaaaaatcagccaggcatggtggcaggcgcctgtaatcccaactactcgggaggttgaggcaggagaatggcttgagcccgggaggtagaggttgcagtgagctgagattgtgccactgcactccagcctgggcaactgagactctgtatcaaaaaaaaaaaaaaaaacagattgaaattgcttctgaggaaaaagaagtggaaatcagacaggtatatgctcgttatttatttatttatttatttattttgggacaggagtctcactctgtcgcccaggctggagtgcagtggcataatctccactcactgcaacctccgcctcctaggttcaagtgattctcctgcctcagcctcccaagtagttgggactacaggcatgtgccaccatacctggctaattttttgtatttttagtagagacggggtttcaccatgttacccaggatggtcttgatctcctgacctcatgatccacctacttcggcctcccaaagtgccgggattacaggcgtgagccaccacgcatggccggatatgctgtttttttaaacaagccttacggaaccctttgactcattatactatgcacatataactgattaaaaaataaaaactaaaaaaaaatgctgaattgtttgaaaagcgaataatcatgcaacctctaattaggtattgttattcaccatccaagactagtttgattcataagagcaatctaaaatacttacaaactcttgtttcctatcccaggaaggatgccatcctgttaactgatgcttttgacttcaccgatcagtgtttaaattcagcacttggctgttatgatggaaacgtctacgaacgcctgttccagtgggctcagaagtcaccaaccaatactcaggtagttgagtggaacacattataaattatgtaagaaagcagagaacaggcagtgaatacaccttcatgttctcccattttaattgattcccgttaggttggcaatcacttggcgtagcacgtctgtttaaaatattcttagagaacacataaaagaaacaaggagtggcagtatggcctggcaggaactctgagcctggattgtaatcagcaaaatgcactgctcggaacttagtaaagggaattaagaggaaggcccaagctctaaatcatggcttgacagacccaagtgcatacacacagagtggtaaaccggcttttaagtaacaaaaagaaggagataaatcactgcggtaattgaaccaccttattttcagccttttaactttcagttttgtgtagataaaagtaggtattcagaagtggtaggaagcttgagggatgtctctcttagacctgattgcctgctagagatgataccctctcctcttcactctaaggaatacaatccaaggagcaaagaaagctgctgcactgccattagtagcccaggaaagccatatgagtgacaattaaaagggtcatgccaaaaaaatccccagccatcctaggagagcacaccagaactctacatcattaacagcgagaagacggggaggactcataaggtcccaacactcaagggccagggtatgctcgcagctctatgcttatgagcctctttgggaaaagttgtaaatgtcaatgaatatgttaacaggagtgaggtaataaaccctgtagttagaatatgaggaaccaatatttaatagcagattttacatagatgatcaaaacaaaaagtctataggtacaaaacagattattttaaattttatagtgcaaatacatgattcaggtggtgaagctttcttttttacctctttggtccaatttcagaaaaggtgtcttaacaccacatcaaattggcaactctcaggctttcattcacacccagcatggtgttagacttgctcttaacaatttgcagcctgtcataccacatggcttaatttaacatgattatctaaagttacaacacaactaacccatcttggtcactccctgtccccagaaagacatccttttaactcaaggaaatataaacaatatatgttcactgctttagtacagttaacctacttccagtgtgttactttttctaatgattagatctaacatttcaatcttggcataaaaatacagcagtcctcccactccagactagcttccatggtctaaagataaatgtgtgccctttggtgctccacagaaaaacccgccctgctataacacctgtcagaaatgctgacatatatagcccaaacctgttatactggcaacacaggaaacattctggtttctctagagagaatggagggggctttcttgtgttttagttggttttaatatttattttaaaagactttaatctggatactacatgagaacatgtttatctaaacgagaggaatgactgacccagagggtcaacacatttgggaaaacattgatgcacttcatcccattcacttctatctccttccacttgactgtgaacaacgaaggagtcttcaccttcccaactccaagatctatcacagagtagacactccacgtctatggaataaatgaacatggttttacaacctgcatagtgagacaaaggaatctgctgcatacacagtgccacacactcttgtcatcctagcttatattaccttcctaaaaaggtgacaggtatagcattgtggatctttcacgcatgataatttgggaatgtgaagttacaaatgaccttagtgaactgtttccagtcagttaaaatgacatgaggctgcctgctaatgtacatgatcttacatttctggctccttttagagatcaccaaaatagcacttttaaagtgtattttttaatgtgctgtggataattttttaaccctactcttaagatataatgctataattttgaagctgcaataagagacattttcctcatttgcactaatagaaaaaggcacactacagatattttatgtatttttatttattattatttttgagacagagtctcgctctgtcatccaggctgaaatgcagtggcacaaccgcggctcactgcaaccctctgcctcccaggttcaagcaattctcctgcctcccaagtagctggcattacaggcacaagccaccaaacccagctaatttttgtattttgtattagtagagatggggtttcaccatgttggccaggctggtctcaaactcctaacctcaaatgatccgtctgcctcagcctcccaaagtgctgggattataggtgtgagccaccatgcctggcagatattttaaataaaacagcagctatgttgaaacacaccctgtagacataaaagtacagacaggaatatatttcactgacatttttctaccaaaagaaaagtgctatgctaaggtaaacatcttagaatcataggagaagctctcttctgtctggggcagcgttgagctttattcctggacaggatgatgtgctttcttggtttaagggaagaatcattggggataatttcaaaacaaaaatcctgtttttccccaattattctattgtaaaaatgtgtccaagtaggagttagatgcattaaatacatctactgattcattcattcaacaattcaacaaatatttactaagtacatactttgtgccaaaaactattctagatactgaagatacactggagaacaagagtcataaacccagactgagtgcagtggctcaagcctgtaatcccagcactttgggaggctgaggcgggtggatcacttgaggttaggagtttgagaccaacctggccaacatggcaaaactccgtctctattaaaaatacaaaaattagccaggtgtggtggtgcacccctgtaatccaaggtactcgggaggctgaggcacaagaatcgcttgaacccaggaggcggaagttgcagtgagccaaaatcgcaccactgcactccagcctgggcaacagagcaatactgtctccaaaaaaaaacagtcaaaagcccagtgttcgaggagcttacagttttagtgtagacaggcacacacacacacacaaagtaaatattataaaagatgagactagaactaagaaacaaagaatcaagacactgaattacagcataatgaggataacctagtcggacctagaatactgcttatatgatccctatctggttccttgctttgtgattaatgttcagtttcagagagcctcaaagagtcaagccttttatttgtatgaaattccaaaagcaagtgataagctgtgtttttaattggccacctgcatccacaatttaaaatctgcatgagaaaaggaaggatgccctttggaaaaaatgtttctccatatgttcacacaaaatgagtcttagaaataatttttaaaattaagaatcttacgtaatgttactttttgaagctagagacttaatttgaaagtgaaagtcattaatcctggcagaaatgtactgtgttaataatgcgtttctttctacaaacaggagaaccctgcctatgaggaatatataagaccacttttacaaagttggagatccaagctatgaaataaccaacagtattcaagaagcaaccagcaccatcatgtgataatggtactatggcatatatgcaacattaaaattttaaattaga

SEQ ID NO: 15356 - DNA, 32148 bp, Homo sapiens; identical to SEQ ID NO: 1125

SEQ ID NO: 15357 - DNA, 62382 bp, Homo sapiens
gttgggcgccggaactggtccggcccgactcacgaccccgcgggacccggccggaacccggcccgaccccggcgcgcgcgcggcggaggacgaggaagagttgtggcgaggcagatcctgccccgtggccgcggccgtctcgtaggtgcgggcggcggggcccacgggaccgcggcggggtcggccgggcgcagagctctcgggggcgcgggctccggcgcccgcccctgggtcgcagctgggcttgagccgtggcccgtggcgcggtcgcttccccgcgagccgcctggggccgggcgtcggccttcccgggacgccgagcctctcgtgtccggtggggagcggggcccccgcgcggggtgcggggagagaagctgtgcggacgccgggcccggtgataccgtcgagccggcggggtccgtgttcaggcatcctcagaacgaatcgtctttggttgtgtttggaataaattcacttccatttctcattgggcttcagaagtcacccttgaagtactccccgttttagttgtttgctgcgtgcaccttgctgggcgcgtggggcacaggttcacagccggcctagcccctgagggcatgtagatctatgagcaagcaatggagacgtgcggccggccgtgaagtatttggaaggtactgcaggcagcccattccctggagagagggaaggtttaaaggggtgaggcccggtgcagtcaggagttgatgttgctgtcctgagtctaaattccaccaggcaggccaggtgcagtggctcatgcctgtaatcccagcgctttgggcagcagaggcaggaggatcacttgtggccaggagttcaaagccagcctgggcaacatggtgagacccctatctctacaaaaaaatgtaaaaattagctgggtgtggtggcgtacacctgcacttccagctactggttaggctgaggcacgaggatttcttgagcccaggaatcggaggctgcagtgagccatgacagcaccattgcactccagcctaggtggcagagcaagacactgtctcaataaataataaaactgaaaaagaagaggtgatatttgaactgggcttggaagaatgattaggaatttgctagaaagggaacacgtttagagataggaacacgaattgtgtctggggcatagttgttgctttcccatcctgggaggacagacattcgtgttagggcccaaggctgagaccttgttgaggagggggttcacatggtggacccaggagcacgggtgttactaccggtggaccctggggaccctgcgagctttgtagcgtgaagcctggctcaggctggtgtcctctccgcaggtgttggaggacataagatgaggcttcccttgctcttgctcctttggctctgaaccatctcctcaaggcagacagaaatggcggattaaactgtgggcttgggatagttgtaagtgtcacctttccagatggcatttttaaaatagtatttttcttcctaaaatggatatgggtttcaagtgtatttttcctttttggttttttttatttgaatgtactgctcatgaatgcaatgtgaatgtctgttacttaaaaatgtaattttgaaaataaccctccaaaccacaggtgtgatgctgaaacgcatcctgccccgcaggccgagcacagccctcctctgccccacgctctcatcggggcagccgacaggaggaagtgccggcatccacttcaaacacaaggtctgggggggcgggggtgtcaggtgtggtggtgaacaggtcaggtgtcgttttattcatgttgaaagcagcccttcatttgaatgcgagtgtcattctcatctagtaatttttgttgcgaggctccatggggagcaccctgctgagcacggcgcggccgtttgtcttctgcctggcctgtgccgggccattcgtacattctcacgtgaagcctgtgaggcaggtcttgttactgtgccatcttagcggtgggaagtgaagggctaggccagtgaggaaatgaggacaaaggcagcagccgttcaagtcgaagcctgtggtgactaactctgccattaaccagcactccagttaggagggaaaagatgcatcccgctgcgctgcatgtgtgttcccgagaagccccagtgccttagtggtctgatctcagaacctgatggctagaacaccgagaggtcctgcctccctccccgagggctggagagccactgttttcagtggttccagtacgccttcaccaaggaggctgtcctggctcaggcacctttctcagcttctgactagagtccttgcccagccacgtggtgacgccgctgacctcgggttatcagggtgctgcgtagcaggggtatgaagctggctgagggtggaagcccctgactgaactgcatttgtctggtgggcagtgtccctccacactgtgctcctggtggtgatggggagccccacggtagaaggggtcccagtggttgaaaggtgaggttctctctgaggaagctggggtgcctctggaccgggaggtgtgcaggaagaccgcgcacagccatctgccctgagtaggctctgtctgcgtgttcgaggcagggctctgatccgatgaccgtgaagattcaacctctgtgctgaagagaactgatgactgggcacttcattgtcccaagcctgagggactgaaaagctggtttgatggggctggttccgttttccacatgcttggtgggagaataaatcagcacctcgttggaggggactttgtcagtatttctcaaaattaaagatgacccagcaatgtgacttcccggcatctgtgccctagacaccccgagtgaacacagctgtaggtgccaggactccccccttccctcggccgactctggctaggccaggcccttctcaccctccataggaagcctccccaccaggcccccgtccgttcctcctgcccgtggcctctcctcatagcgcgtgggctctctgggagctgggaccatgtcacacggggccagtcacatctgtcacctcccaggggctggtggcaggagtgcccacccacaggcagcgctctggattccgcgcaggagaacagcagtttcttctcagcctgcactttgagtttgcccagcccagctgtgcacgtcagcatcaccagctctgctgagctctgggttttgtggggaatccactcttattcttccgtggcttcgccctgcggggtgactcaggaatttgtagaaatgccaaaaggggggctgtgctctggtagtgtgtgctgtgtgtgctcagcgtgtggttagcgtgtgctcagcgtgtggttaccgtgtgcacagcacgagcttgaactcgctttgtcagaactcggttctttgtggtctgcagaaaccttttctgagcagcagctttagttagagggaagccgtcatcccccttttatgtgcttctgtcatattgagaaacagctacacacaatgacaggcaccttctatattgagtgagtgtcgccggccgtcctagtgctccgctccttagcaccccagaaagcaccgtcccctgctccgagcacccaaggcactccctgtggctctcagcagcggaagtctggcctcggggccgtaacccagagcacccagtgcccagtcggttttctgtgtgtggattctccttgtttctgtgccctcacacctgtaaagcagtgcaggatcggttggaagtgaggaaggaagcgtggtggggccgccctggtttgctgctttctgaagctggcacagcccacgtgccgatctcgtgtcttgtgtctggtgaagcccagttgttttcttgccattctctgggtttctctatggtagcagagtccaggtgtgtgggcggaccagccactgccctgcctctgaacagctgtggagggcttctagaacatgggtgcctcgcgtcaggagatgatgtggcctgcaggactgaccgtttggtaggattcagagaagactcacacaggacgtccaagcagcccgcggagctgtgctgaggttcagggccctgcgtggctcgttttcctcctgcctgggccagaggcaggagatccctcagctggctgggacaggggacttcattaagagccccaggctacctgggaggcggagcttgcagtgagccgagatcgtgccactgcactccagcctgggtgacagagcgagactccgtctcaaaaaaaaaacaaaagagccccaggctagtggggaaaccagacacccaaatcaaacaagcaaaaaccaaggccagtagttgagggtctcaagcacaaaacatactttggctctgacaattttcattgtcatgaagtttgttttgttagacaactatgaagtgttgtgacggtttcaaactaagagcagaaaacaaaactgtttagtacaaaccacagacaataacacagtagctttcccctcacaagttaatgaaagagatgtgctggagagagagaacctgctgaacatgggcacagatcccacagagggggcgtggtgtgtgggaggagactcgacagggtcatggggtcactgctgcccgttgtcgggagataaggctcacagctttatttgataatgttgtctttagcttgtaaatgaacatgcttcccttcccccattgagtgttgagtgttgtgcctgtgggaagcgttatacacacagcctgggacctcagcacagatgcccgttgacaggtgtcccaccggccttccgggttccagcgccaggcctggtgcctgccccaggaggatgagcatttgcattgcctgcaccttatcgtgcccttccacctgctgaagcagctgtgcctgccgctcttgtgaactgcgaacttccccttacctcctctctctggctcgggagctgggtgagtttgaacttggcctcctttgcttttctgtgtgcgaacaagtggttgccttgtttgtttactgaacagagtgtggttgaggcaaaatgctgagatgaaacctaacctaatatgtgtgtattagacggtagcatcattgtcaaaataatacttgttcaaagtccctgaaaaccaaacggacaacttgactacgcttcggccacaggcctgggacgctgtcagaccgagggccgctgagtgcccagtggcagcagagcccagagggtgcttcccccaggaagggaggcagaccagcctattcttactgtgagtcgagcaaagctttgattataaagggccagggatgcaggagcctcgtggagagtgccaccccttcttctcgctctggaatgcgggggctgtgcccctggcctgtgtccgcatcctggggcggtgtcccgtgggcagtgtcctctggctgcagaatgcatgttgcagaattggaccagccctcacgcgtcaggagcgttgggcccacaggcggaggcaccctggcttcttctcggtctcctttctctgaatgaagaattccagtggacggcgggcccgcgcgacccctcccagggagccctcgcttcctgctgatttatttgttatttagtagttaagtttttggggggaaaggagagaattatagttcaacctaaaacacgttttctagctctgtgaattgcctgatttaaagcttggcttggctgggtgcagtggctcacacctgtaatttcaacactttgggaggccaaggtgagtggatcaccggaggtcaggagttggagaccagtctggtcaacatggtgaacccctcgtctctactaacaatacaaaaattagccaggcatggtggtgcgcacctataatcccagctagtcaggaggctgaggcaggagaatcacttgaacccaggaggcggaggttacagtgagcccagatcacactactgtactccagcctgggtgacagaccaagactgcatcttagatagatagatagatagacagagcgggtgagactccatcccagatagataataaagagagagagagaaaggaaaaaaaggtgagagagaggagagagagaaagaaaagaaaagaaggaaaaaagcatggcttacacctgccataaccccaggactttggaccagcctgggcaatacagtgagaccttgtctctaccaaaaaaaaaaaaaaaagctgggtgtggtatcacatgcttgtgggcccagctactcgggaggctgaggccacaggatggcatgagcccaggaagtcgaggctgcagtgagccatgattgcatcactacactccagcctgggcgacacagcaagaccctgtctcaaaaaaacgaaccttggcacctcaccacatttccactgcgcaccagtgtgggaagggtctgagagaggcagcgccgtgtctgccccgggggcggggtctccaggccatgcctgttgtgagcgggggctgtgctgagctcttctctgcacttccccctctcacgggtggttttccaggctcaggattctaaaacccattattcagatgtaccttaagtgtgttgaattttatatgcttctccttggttttacctagtttatttcattgtttagaattttgtgtggtttgggaatccttaaactcatgaagtgaaatagaaagctgagatgctgggcacgtacggaacgttccagcagtgtgggtgagaaaggctggacgtggcctgtctggtgcgctgcctcatgactgaaggtgcagcaggcgtacctggctgggtactggggaggtgttttaaatcctgtcttggccacgtttggatgggacagttgggcactcacgtcctgtgccttgcctttctccagctcggccgcctgtcagtgcaatgctgccccatgtggtgctcaccttccggcgcctgggctgcgccttggcgtcctgccggctggcgcctgcgagacacagaggaagtggtcttctgcacacagccccagtggcccgctcggacaggagcgccccggtgttcacccgtgccctggcctttggggacagaatcgccctggttgaccagcacggccgccacacgtacagggagctttattcccgcagccttcgcctgtcccaggagatctgcaggctctgcgggtgtgtcggcggggacctccgggaggagagggtctccttcctatgcgctaacgatgcctcctacgtcgtggcccagtgggcgtcatggatgagtggcggtgtggcagtccccctctacaggaagcatcccgcggcccagctggagtatgtcatctgcgactcccagagctctgtggtccttgccagccaggagtacctggagctcctgagcccggtggtcaggaagctgggggtcccgctgctgccgctcacaccagccatctacactggagcagtagaggaaccggcagaggtcccggtcccagagcagggatggaggaacaagggcgccatgatcatctacaccagtgggaccacggggaggcccaagggcgtgctgagcacgcaccaaaacatcagggctgtggtgagtgccgcctggcgccgtgatggtttcggtgaccgcacagcactccgggtgggctccgggccagaagcacatcttttcattcgcttttctgtggagtcattcacagttgtcaccatcctgcagacccgtgtgagatacagggacgcaggccctcggggtgtggccgctggcctcactggccacgcaggacggctctgggagcgtccaggtgtagagggattgaggggccgccgagtgaccctgccaggaccatgcggcatgaggtcagaagggaccactcactgcctgtgatgctgaggggcttttcggaggccagccacgtgttaggatgcgtggtcaggaccccacatacacccgggtcttactcgttttttgtgtgtcctgtgacctcagtcacatcttcacagaactctccaaccacatcacttacctggcatttgtacagtgtcataacgtctcctatgcacttgaagcaatcaagtaaaaatgaaaaccaaaagccaggaaggggaaggcaggaagtgtaccccacggagtcgtgggctgacgaggcgccatgagcacacagcaggctgggccctgggtggcctgcgccgtcactcctggaagcggcgcgcctgtcgggagggacgggctctggactcctctgtccttgctgaggggagtgacatgcacatgtgcttctccctggagcctgtgcaggcagcaggcagtgtcctccgtgagattggacagaggattcagtgggccgtgcctcacgctgcttctcagtaagagctgagggtgtgctctggagcctggcctgggttctgtcccggctgagcaggtgacgataattcacgaatcggcagagctctgtgtgggcagtgctgtcacctgagccagtggttgggctgggagtcgattccagcctgaatggcgctgggtccctgagtcccaggcttgggcaggggcggagctctgtcgacctggtgtctgcagagccactccccgaccttctaaattccctaaagcctctggctgtgtgtggcgctgtcctctgtccccagggtaagtgagtgacccagcagatctgctgtggttttgtcgtcatcttgagaggctgctaaaggggagcaacaaagagccagccttctccttccccttcctcagtggggaggcccagagctcctttccgtgagcccgaggtctgtgtgtgctgttgcgggccacagtcttgctcttgctctcagctgtgctctcgtcccctgcaggtgaccgggctggtccacaagtgggcatggaccaaagacgacgtgatcctccacgtgctcccgctgcaccacgtccatggtgtggtcaacgcgctgctctgtcctctctgggtgggagccacctgtgtgatgatgcctgagttcagccctcagcaggtgagttggggtcagggctctcggttgcaccctcagactaggcgcctttcccctgtcggggccagggctctcagccgcgccctcagcctaagcgcctttcgctggttggggtcagggctctcggccgcgccctcagactaggcatcttttcctggtgtgcagtcgcccctatccacaggggacgtgccaatgccgagaccctgggtagcatggaaccctgtacctacgatgctttttgctatacatacgtacctatgataaagcttaatttataagttaggcacagtaagaggttaacaataacagaacagttataaccatgtactgtaatcaagttatgtgaaagtgctctctctcttcaaaataccttccggtactgtgctcgtctgttgtgagactgcagtgggccacgcgtcattgaaaccgtgaatagtgagactggatgagcggaggtgactgtacaggccctgctgcccgcgagctcctgcggctgcggcgaatgctcacgcgcttggtttaaaataatgcgagtttgttcttacatgcttggaggccaggattctgagacgagtcttgcggagctgatgctgggtgtggtagggctgctccgtcaggaggctccagggcaaagtccgttcctgcctcttgcagctctggaggccgcctgtgcccttggctccagctgcttcacgtccagctctgcttctgcaggcacacggccttctctccgtagtcagggctccctcggcttccctttgtgcagcctatgcggatattccaagatcatctcccatcttgaggtccttcgcttcatccacctgcagttcccaccactgcgagaggtgacacattcggggtgtagggcgtagggcgtgaccctttgagctatgatgtggccactgtggcagccctcggttactccagagtactggcccagctggagagctgcttgctgcggagggttactttggagtattggcccagctgaagggctgctgtggagtctctgtctcccctctctgcatggcttcctctgtagcgtctcccttggagcaggcagggagggaaggacgcggtgctggtcacacagagcgctggggtgggagcagtcatcgccgagctgctgcgcgcagccttgcctgtgcagggctgtctccaggcagatcagggatgctgctttggagggaaaggacctgggctcgaggcgggaccctgtgcacagcatcgggcctcgcctgtcagttggggatggcggtggcttttaggagttgctgtggccctgtgtgcattctagctgactgcaggcaagagtcactcaccaggctgcagagggcatgaggggcaggccttgagcccacaggaaggacacggtgtgcgtatgtcacaggtgtggtgaagcagagccctccggtgaggccatggacgtttaccagcctctgcccgtataatgaatatgccttttattcacaggaaaaaaagtttaacacgtgaatgtatggaaaagcccttagaatttggatcgtatcatgatggttctcagcacagaggagcccatctctgaggccagatgcctgggactgggctcttggtctgtgcggggttgttctgcagggcagacgtcccggccagcagaggcacagccctaaagcccagagcacagcagccaccagtggccggccccacactcaccgctcttgccaggactcttcctgtctgaagtctttctggccccatcgaaggctgtgtggagctctgaggcctctgaccgggagctcaggacccaaaccctagtcaggtgtgaatttcgccaggaaggggtccctgcaagcagtcagccctgcccaccttccctctgcttctcctgccgctgagaggcccatcctcttctctgcagggcatccagccccacacggtggctggaggtggagagaaggcagcttttctggccctccacctctctgaccttcagtctcatccccggaaaataaggttggaggccggctcacagtgggcacaaacttggaaaagagaaggggctcttctctagcctccactggaggcaaggtctcacaagagaagccagtatgtagaacagctttgtacgagcaagtgagcctgtttcttcacagatgataacattgggctttagagaaagacctctttaaaatctagcagttactaccgtgccaaagagaggtggctgccagcacacttgcgtgattagccgtcagctccctccactgctcttcaggacgcctgtagccacagagcctccctgagggccccgtcgccagggtcacctcctgaagagcctccctgagggccccgtcgccagggtcaccccctgaagagcctccctgagggccccgtctccctaacacattccacattcttgttggcttcagtccttatttttcacagacatctcagccctgaccccagctgcgacacagcagtctgttaagatggcagacactgcggctgcctcatctgcgtggtccatcccggagacatctgcctggcgctctgctccaggccttcctggctcccctggtagggatctggctcagtgacccgaccctccttgcggctctctctggggtgcgccctgcatggacacagctgtccttggtgaacgtctgctgagtcaaagtggttttgctgcagtgagttccccgtgagtgcactgtgtgggtggtgcagcgcctggtgtgtagggaacttccatgcctttgctgtgtctctgggggctcctctgacggggcagctccctcctctccgccttaagctcctcctttcctttggcggtcagctctgtccagggtgtcagtttctgtgcctgtgactgggccccctcaacctgccccaccttggcctctgctccttggcagcctggccctgaacctctgttgggggctgcccgggcgctgacggtggctggtctaccatggtcacttgggcagaggcagcaacggccattgtcgtggaccgtgccagggcgagatgcagctggcaggggcagaggcagaacatctcccagggagctgagggcaggttggttccatcgtcccggagggcaggttggttccatcctcccaagtaaagagtgtgttaccctcagggcgagaggcaggtgggtgtgggtgctggcgcaggccagctgtcaaggatctgggctttctggtcttgctgcttctccagcactgcatgaatgacaccacctggccctttccagtgcccacaggcacacggcttgggagctgctgctgcggcgtctctgcccaggggcatctgccagggggtccctgccttggggtctgtgtcccaagggcgtctgcccagggatttctgctccgagagtgtctaccctggggtctctgcctggggatctgctgtcatcttccagacactgcagactggctcattaatggacacgggaaagcctcagaccttcaacggacacgggaaagcctcagaccttcaccgtttttgacacttacttgggatttttctttaaactatgctgtgaaaacttaattttttttttttttgagatggagtctcgcactgttagccgggctggagtgcagtggcacgatctcggctcactgcaacctccgcctcctgggttcaagcgattctcctgcctcagcctcctgagtagctgggattacaggcacctgccaccacagccagctaattttttgtatttttagtagagacggggtttcactatgttggccaggctggtctagaactccggacctcatgatccacctgcctcagcctcccaaagtgctgggattacagacgtaagccactatgcccagctgaaaacttaatatttaaacaaatttgatgctgtggctacaaaggattgcaactcttttccataaactccaagtttcagggttttccaactttaggaatttctatgtgtaaaatccagctgtcagcgttattgaactttgggattttgtctaagattgtgtggaagaatgtgtaggatacaagtgtggggtgaccagacacctgcggtggtgctgaacgatctcagacgcggtgtcttcaagtcatcctgcacagagggccgtgggtgtcagtgcctgcaggtgacggatggggttgggggagaggaggaggatgccggaagatggatgtgcagccacagcctctggagatcaaagtcaccactgacgagacagccagaggctcagatcagtcactcgtctccaacagcactgccctggccgacttcctcaggatcgcagcatggactcaggagggctgccatctggcagggtctgtgctgtggcagctcaggttagagcaacaggcctgctcctgccacctcagaagcacttgctagttagtcaaatgttatggcgcccttcagggggcctccaggtctttcacgtcttggaagtgtggcaacacattgggatgtgctggaggaagaaggtcaccctcggctctcagtgcccttctttagggcagcagctgccctctgaagatttggatgaattccaagaaagaccgtccttcgtgtctttcacctccgcgcctgctccctgcccctcagccttgtcccgttgcgtgcatgctgtccccgcctcagcaccatcctgctacacgcatgctctccccacctcggcaccatcctgctacacgcgtgctctccccgcctcggcaccatcctgctacacgcgtgctccgttttccgtgcctcagtgtcacgtttgtgtttctggttcactgtgctgttgatctgtgtgttacatcaaatgcagtttgttctttttacgttgctgtgttgtatttcctggtgtgcagaagccacagtgcgcttatccattctgctcttgaaggacttgagattgttttcagtttgtggctattagaagtcacggttgctatgaacattctcacacagatgtccctgtggacagttcccttggatccgcaactcccagtgccggctcacaggctagatgtatgtttcatttcagtggaaactgcggaagagttctcaaacgtggctgcatgtttcacacaccccagccccaaatgtggctgcatgtttcatacgcccccagccccattctgctggtaccaatttactgtattagtccgtgtgcacactactgataaagacatacccaagacagggaagaaaaagaggtttaattggactcgcagttccacatggctggggaggcctcagaatcatggtgggaggcaaaaggcacttcttacatggcggtggcaagagaaaatgaggaagaagcaaaagcggaaacccttgataaacccatcagatctcatgagacttattcactatcatgagaatagcacaggaaagaccggcccccataattcaattacctccccctgggcacctcccacaacacgtgggaattctgggagatacagttcaagttgagatttgggtggggatgccatcaaaccatatcaggagtccttaaatttgttaaattccccacatgtctcctcttctggtgccttcatttgtccctacagaggttctccgcgaagcactgtgcttcccccaacttgtttcccttcagcctggagaacttcttttcaatagttcttgtagtgcagctttgctgacaacaaatccctcaattttgtttcactgaaaatgtttttattgcaccttcccttttcaaaaacagctctatcgagatacagttcacacaccgcaaaattcattattgtaaattttgaattaagtagccattacctcaaaccagtgtccatttccccccattcccagcccctggcaaccacgaatctgctttctgcctctaggatttccttgtttgagatggcagcgtgtgcaaatggggcgtgtcacactcagtcttttattccagcttctttcacttgcaggatggttctgagtttcatccatgttctactgtgtgtattaataacttgttcctgaatagtacttcatcatatggatataccacattttcctcatccattcaccatctgatgggcatttggactgtttcagtttggagctattatgaataatgctgctatgaacatttacatataaatctctgtagacattcattcatcttacatagacacagagggatagaattgatgggttgtatggtgactttctgtttaatgttttaagaaactgtcaaactggccgggcacggtggctcacacctgaaatcctagcactttgggaggccgaggcaggtggatcacttgaggtcaggagtttgagaccagcctgaccaacagggtgaaaccctgtctatactaaaaatacaaaattagccaggcaccgtggttcacacctgtaatcccagctactcgggaggctgaggtaggagaattgcttgaacccagggggcggcgattgcagtgagccaagatcacaccactgcactccagcctgggcaacagagcaagactgtctcaaaaaaaaaaaaaaaaaaaaagaaaagaaaagaaactggcaaactgttttccaaaatggctgtgttgctgtacgttctcatcagcagcgtatgagagttttcatttctttacgtcctgccaacacttgtcactggcttcagtttgcgtttccctaatgactactgatgttaagcttttttttttttttttttttttttttgagatggagtctcactctgtcgctcaggctggagtgcagtggctcagtctcggctcactgcaatctccgcctcctgggttcaagcgcttctcctgcctcagccatctcagcagctgggattacaggcgcacagctccaggtccagctaattttttgtatttttatagagaccaggtttcaccgtgttggccaggctggtcttgaactcctgacctcaagtaacctgcctgcctcagcctcccaaaatgctgtgattatagccgtgagcccgccgcacccggccagatgttgagcattttttgtgtttatttttacttttttccttttaaattatttttgcagaaacagagcctccctatgttgcccaggctggcctcacactcctgagctcaagggatcctcccgcctcagcctcccaaagtgccgggattacgggcatgagcactgcacccagtgctgttttttacgttcttgtttgcatccgtatgtaatctttggtgaactgtctaatgaaatctttggccatttttaaattgggctgtttgtcttcttactgagttgtaagagttctatgtgtattccggatacgagtctcttttcagatgtacggtttacaaatatttcctccaactgcagcttgtctttttattttcttaatgtgtcttttggagcacacattaattttgatgaaattcattttataaaaaaaattttaaaaataaattcattttatcaatttttaaactttatagattgtgcttttggtatctcatctgagaagtctttgccaaaccacaggtcatgtcatgaagatattcccttttgttttttcttagaagttttctagttttagctcatacgtggaggtttctgacccactttgggttaattttgcatatggtgtgaggtagggtctaggagtcaccttctgcatggagatattcagtgtgtcagtgccatttgtgagaaagattatccttttgtccttttccctattggggacttggtttctttgccaagaatcacttgaccagatatctgtgcattcgtttatttctggactctccattgtgttttgtgggtctcttgtctaatcttacacagcatcacactgtgttcgttacttctggtttacgtcagttttggagttgggaactgtgtgttctcacctttaatctgccttttgaaatttattttggatcttctgggtcctttgccttttcgtgtaaaacgtaggataagtgtatcaatttctgcaaaataaagcttgccggaattttgggaagattgctttgaagctggagctcagtgtgggaagaactgccatcttcacaacatggagtgttcccgtctgcgagcctggcctctctccacccgcttatctgttcccctccctccctcgatggcagtgttgtgggtgctgctccgcggtgctgctgtctcccgcactctggtcgcctgtgtctttgctttcccgtctgtgggtcagcctagatcacccccgttgactgtgtctgacttttttcctcttttctgctgcgtcttgtttgttattaggtctattgaatgaattcattttggatcttgtgtttttcagttttatgattttttgcagttccacttctctttgcaattctccatcttccccacgttgttcatcttttctttgaaattccttaatctgcttattgcagtgatttgaagggccttgtctggtgattcggacgtttggatttcctgagacttcttcccttcagttggggatcacatctttgtgtccttacatgctttgtgactttgaagggttccagtctttgtctttgaaagaatgatattatttcttccccggagattcctgcctttctctgccaggcagctgcggtgaggcactcgtcactgcagtccagtgaggagatgagatgggctggggctggactgtggcatcggcatccgtcgaccccagtttcaacgccgtgtgggcgagatctgtcctgtgtgtcctgggcctcccttaggtgctgaccccacagcacgaagagtgccctcctccctccgccacacccttcggtgctccgtgtggaacaccgcgggtagagagggccatggaaggaatgcggctcaccagctcttcctgaagctttatgggcgacgcgagaacccgctaacgagtgaggaacttaaaacgtatttatatgtaagcaagaaatgtttattatggagtaaaatataaaattcacatgactcttttaaataaaagacttcacccgttcgctagtcactgcatgcctgtccatactgggaagcatgctgacttcaggtctgcgggcagccaggccctcctgccagcttccccaaggtgtacatccgccctctctgtgtagctggaagagcctgaccactcacgtctctccaggccacagatcccgaagcccttttctagctctgttcacgattgctcttcccctcacaggccagacgcagctgtcccgcgcaacatggcttctgtgggaaggggtcagagtttgaggcaccccttttagaagggaggcgctgcagactcttgaatgtgaaccatgagaacgctgtgcctggagccaggagcctccgccacgggccccagtgcctgctcatcttcctaccgagtgcttcctttccttcgtaggtttgggaaaagttcttaagttctgaaacgccgcggatcaatgtctttatggcagtgcctacaatatacaccaagctgatggagtactacgacaggcattttacccagccgcacgcccaggatttcttgcgtgcagtttgtgaagaaaaaattaggtaagtgaaaagagcccactttctcgttcagaaagtcttaaagatcaacagatacgacttatttctaataaatcactcctactaagttctgggaagcagtgctttccatttcctttcaatgttccctctctctctacccgtctccgtctctacctctctaactgtctctctctctctctacccgtctgtatgtatatctgtaatctcttccacgtcgatagctgcctggattctgtatcgctctctctgtcacactctgtctctctatctctctctgtctctctttgtctctctctctccatctctccatctatctgtcttctctgtctctcttgtcagactctccatctctgtcttctctctgtctctctccatcgctcttcatctgtctctccgtcttctctttctctatctctcctgtctctccatctgtctctatctctccatctgtctttgtctccgtctgtctgtctgctctctctcctgtccgtctctctctctctctgtcatggcgtctgaaggacaagggtgaggacagtgagctgacccgcttgctcctgcttcatctgcccacatgtcccacggcgcctgcctctcctatgcagtctctctgccttcgtgggcagccctgtgaggcctcctgcctggggcacgttctgctgcttttcctctcagccccgctcctcccctcccagctccctggataaacccctccctcccaggacaagctggtcttttgggccacccaggggcgtgtttgctctgcactctcccatgaacctgcaggcgtgggaacgtttcttttccctcgtggctgttgaggtgtggttcactaactggaaacgcacacgtgtggctcagtgagtcttcacacgcatcacaggcccgcacctccagcagagtcgtgggtggggtattttttctttttgtgagagggaggggtggcgtggagggtgcactgcaggaactgaaggctccactgccatccagtttccagtgggatgtgtgtgtctgtggctgccgcgcgctcctcccagtccccaggaagtgcacagggaagcggcacctttgttcctggagagaattccgggttgtccaaggcacatgtctgaaccgcttcgctctctttgccgttcccttgccccttttctgtgaggccaccggagcccatggttttgctgctgctactgctgggataccctggggctgggcaggccccaagctgagcagggtgagcacaacgttttaccaaatctaaggaaccaagggcaagaacgaggtcagtgaaggagaggatcaggtgatttctggggtgacagaggcaatgagacctcggccatctggatctcccagcgggggtcctgtcagtggtgcctcctcgtaaagcaggggcagcagcagggaccactccgctcagaccgcaaacaaaagcgccttccctactgcccgtgaggctgcgggaaatgctgtgtgagagcgcggggactcggagttctcagggcccgtgttctcctgccaagcctgagctgaccctgtgggccaagatggctgcagttctgcgggtggttctgagccccttgggtgtgcccggccccaccccttgggtgccgcggccattcacccatgtccgcgttctgctgcagagcctgcaagctgagccggctgtagtccccggatgtgcctggccgcagcctgcagcgccgtggctgttcacccgtgatcagctccgtggtcggcagctgcacggtcactgctgttcttgagcgtggttgtgaacagcgcaggaactttgcaggggacaccgcggaccctaagcacattgtttaccctcattagctgttggacctgcttccttctaaaatacacccaacagatcgttttcaaaaaacaaagtcacgccgtagcgcagactgcagcgttggtcccgggtgtcgcacagtggtgctgtacccacggcctggggctcctgcactcgtgaaggagctgccacttttgcaagcaagggccgcctcctgaggggctaaacctgccacctttgcacgcgagagccacgtcccaaggggctaaacctgcctttggttgtgccgcgtaggctgatggtctcaggctcagctgccctgcccctcccagtgctggagaagtggaagaacatcacgggccacaccctgctggagcggtatggcatgaccgagatcggcatggctctgtccgggcccctgaccactgccgtgcgcctgccaggtacgagcacttcccacagctgcgttcctcttccactgtgctctgagccccccaaggtgggccagtctcgaaccacccacattcggactgaagggcggcatggaggatgctcccccgtgggacaggccactcggccaggagagcactcaggatgcactgcgacctgtcccctctgggtagatcagccttctcccaagtctcagtcgggtggatgggggaggtgtctgtgctggcccctggctgtatgactggggagacaatgggaagaacagcaatgcctggaatgcaggcgtcagtgcatgtctcagaggaaggcggggggccatgctgttggctccagaccacatcagcagtggtggcagcctccgtctgtctggagtccgggtgccacacagcgccagcagcagtgccaggagaggtgggtgtggtgggcagggtgggatgagtcaagcacctgtcttccttctctagatgtgggctcctgataccgggcccctcttgtccagccttccctaacacatcccattctgactttcatctgacccaaccatttgagccctgggtcctccgctgggacttctgggaacagagcccacagctggggggccaccctgctgctttctgcgcagcccttccagtctgtctagagtagaagagagatctcagtgcagacttaaagtgagaccatcccgcacatctgtctgtgcagctgcttacctgcagacccagtaaaaattcacccctctggcgtgcagctctgtgtgtcttaagaaacatcatcacagtcaaaatagagaagggttcctcgcctcagaaactcccttcctagtgctcagcacctcctccacccccgaggcctggccccttgttcctgtttctcttcttgtggttttgctttttctgggaggccacgtggctaaatcctgcaggacgtggcctctgagcctgtctgcttccgcccggcttccgcccacagtcaactgcctgtgctgtgtgcgtcagagcccgcgcctttccctgctgagtggcatccgtggtgtgggtgcggcaccgcttgtgaccctgttttaagcaatgacacgtgagatgttatcaacatttgtgtgcaggtttctgtgcgaacgtggttttttatttcacctgggcagatacctaggagagagattgctgtgttgtctgaagctttcaagctgttctccagagcggctacaccatccccttccccctgcaatgggtgggaggtcacgagcacctgctgctccagcgggcggtggtggtgtctcgttgagttcatgattctctcatgatgggtggcgttgagcacctcttcctgttcgtgtcattccgttttcaactggggcctttgttttcttgagttttgagagcttttaaaattcgggacccaagtgtcagctgtgcgattttaaatatcatctcccagcttgtggtttgtcttcccattcacctaacagcgtctttaaaatcaggagttttaggttttggcccggtttatcaatttgttttgtgaattgtctgatgtcatatctaataaatccttgcgtagcccaaagtcacagagaatagtttcagctcttacgtttgggaccatgatccattttgagttaatgtttgtacatagtgcgagatacggaccacagttcttttttagtgtgtgaatgtctaactttttagcactgttcgttgaaaagactcccttctccatcgaacagccctttggatctttgttgaaagtccgtcgactcctgaggggtcggctcctgggctctgctctgtcccattgctttccgtgtgccctttggctcattccatgcctgcttggttcctgggactctagggtaagcgtggacatgggggttcaggcccaggcagggaccagctggtgccaggcagcgatacggtgctggggcctgcaaggtgagtgtgagggctggctggctgctgggctgggaggaggagagactgtaggctcacgcccctttgctgggcctggggagccatgggggctgttaagtgtattctgagtgtaaagtctcggtttggctggggcatcctgagcagaatgacagggccatggcagcgagatcctcagctgccgtgcagagctgccagtggggtggccgcacagagtgcagtgcctgctgcaacagtgcccagggcagtgggcgggtgggggcatgttgtgaaaagaagtcagtgtgagtgatgagaaatacatcctagtctcagaccccaggaaaccgccgtcagtgctggtggcccctgccctgggccggctcccgcgttagtctcagaccccaggaaacctccacctccgtcagtgctagcggcccctgctctgggctgactcgcgcatctccacgatggctgcggcaccagctgtttcttcggtggctaaagctctctggtggaaataagatggggaccttgaaatcaaatgtgactggtctgttgagtctctgtccttatcgttgtccttcttagtaggatgtgctggttttgtccagtgccaccggccacagtcaccacgtaatatggacggaatgagcaaagcccggctcgctgaggctgcaggctgcaggcaagtgaggactgaaagggtaacgggctctgggctttgtcctctctttgttccggacatgtgagcaggacaagttctgtgtattcagaatctgtctgcacagtttgtagttcatgatgactgttcatccacagcattgctttgtgggcgtcctctcttttgatcttctcgaaacagcccctgcgatggggtcatattttgcactcacatacaagaacccatgagcctgcccacggtcacgcggctggtgagtgatgcacttcccaggagcacggtgacctcttcaatggccctcactagagaagatggacagtgcccccctagccttttttactggaacagatacaaggctgagaagctgaaatcaggagcagcccagggaccactgtctacaccgagggagtcatgagcagcccagggaccactgtctacacccagggagtcaggagcagcccggggactgctgtctacaccgaggatgtcaggagcagcccagggaccactgtctacactgagagcgtcaggagcagcccagggaccgccgtccacaccaagagcgccaaggagcagcccagggaccgccgtccacaccgagggcgccaaggagcagatagtagcccagagacccaggggaggctcagcttccccacgctggaatcagaactcctaggcgaacaggaaggagccccagacagatggcacagggagaggagtccccggctgaggagggggatccagagaccctgaagcttcagggttattgggcaagaaacctgagtgcaccaatccccgagtcttcagctaccgacggcaggttccctcgggtgccggggatgctccctcttctctaaggcagagcccacagtaggttccctcaggcgccaaggacattccctcttctctaaggcagagcccacagcaggttccctcaggcgccagggacgttccctcttctctaaggcagagcccacggcaggttccctcgggcgccggggacgctctctcttctctaaggcagagcccacggcagattccctcgggcgccggggacgctctctcttctctaaggcagagcctgacggcaggttccctcgggcgccagggatgttccctcttctctaaggcagagcatacggcagtttccctggggcgccggggacgctccctcttctctaaggcagaatcaaatatctgtgattttatccttgcctttaaatcaccagcagtgtgagttctttggtttggaaaaaagtaagtaaagtcacctcagcattaaatccaatatgccccacaaaaactccaaaatgcagcctcctgagccatgtttctagagggcacggtggaggagagctttcctcactctcaggctctaacccccaccctggtggccatggccttgacccttgggtcggctccagccacaggctctgagctcatgcttggcctcgctgctcagtgcactgtccgtgctcggaagagagagaagctgggtggagggtgagctctgtcgtgtgttatggttacaggcctgctccgtgcggttcctgtggagggagatgaataattcatggccgaccactgctgggcctcgtcacactctaattggaggttgagctcagaggtgctcacggctcctgggccactctgtggcattgacagggagctccagggcctcattggcggtttccgttccctgggtcccagtccccagtcagagttatcagggaggggctggctgacagcgattttagaggtgggctgtggcaggaaggcagtgccccccacctgcctgcagctgcgctcccatctacattggcctttgcggggccagcctctgtccactctcttgagctctcatgtccacactgtcacatgcccggggcacagcgagcggcacctggagtgtggggacccctccctcgagctctcacgggtggcacctggagtgtgggggcccctgcctcaagctttcatgggtggcacctggagtgtgggggcccctccctgaagctctcacgggcggcacctggagtgtgggggccactccttgagctctcatggacaataccactgcttggctgctgcagaatccagacaccatcccagagcctcttcagcctctgcagatggtgtgggacggccacacggcctccccacctgcggcccccgcccctaccccagccgtgccgtgtccttgcgctgcgtccccgccccagtagaggcatcaccaggaagaggcgaaaggccgcctgtgatggtcctcttcttatgaaacgcccagaacagaaaaaccacggacgcggacagcagacctggtgccaggtctggggagggagggtgtggcggtcgtgggctgtgcgggagttctgactaggggaagtggggggctgtgcaatgtgtgtgcggaacaccgccgtgccgcgcactgaaatgggaagtcatgtgttatgcgggtttcacccccatttaaaaatcttcagaagcaaaacataaaggaggagaaaggatggaagaaagggggctgaagctggccccgccacaccccccatagtggtgacacgggtttctgaccagagtggaggttcggggcgtctgcatacctggaaccacagagaactcccgaggtgacactccgcacaccacactagcccggcttcgcctgcaggaccccaggtgtggacaggcccagcaggatcagcaagaccgagccgggcaccgacagcccctcaccaagcgtctggaggccgggacgccccatggattgcagagttcactgcactgaccctcgatgctgacccttgaagtgccggaaatctcagcgtggactcagacatgataagcgttcaggcactcccctgacgcaggccagggcaaaggcctcacgccccgggatagacaggaagtcccacgtctgctctgcccctaggtcatgcccgtgctgacgccacatcgccagggccgcactccatgagcagcctctgccgtcccaccagcaacctaaaccacaggcagagcgaggctgcggcagccctgcgtgtgccggcgggacacgtctcgccacctgggctctgcccccaccccggccagtgtaagatatgattttagccacgttgagactgtgcaggtgggatggatacactgagcaaatcatgggtgtctaataaatgagccagtacaaagtgtggtccacctgccatgcagagttcaggacagcccctcctggggacatagggcagatcctgccttagcccgtcgtgtgccgggcacacacaggtcccctcatcgtggacagccccggggccatcagggcaaggcgccagccctccctggccagcaagtgtgtaaaagtgggaatgacaccagaatctgtgggcagctgtgaggctttgggaagtaactgggaaagtgatgtatgaggggcccagggcaggccaggcccagcgtgccacgtgagtgcctgctgtgccacatggccatcactgtggcatcggctgggcctgagcacaccgtgcttgccagccacgtatcgtgtggcttttcacctgctggtgcctacaccatcttctctctgggtcacagggcacgtcgctccctccacacagactcccgcacgtggcacacgggagctcagcgggatccgagctcagtgtgtgcttctctcctccaggttcctctcactccagcctccccttcagtgtttctcctctcctgtaggttccgtggggaccccactgcctggagtacaggtgcgcattgtctcagaaaacccacagagggaagcctgctcctacaccatccacgcagagggagacgagagggggaccaaggtaagccactctgctcttggcaggtgggcggccgtgtgtccagtctaggccccccagggtggttacactggtgcatctttcccctggaggcagactcccctccacgcaggggaccagccccctggacactgcaggtgctggctggtgttgcaagggcactggctggtgttctgggccctgcctgctgcgtgtccgtctgtgcgttcacagagcagtgggcagagggagcccagggcggaacgccaaagggactcacacccgggcacacagctcctcccaggggccctgtccacggggacaggctgacgtgggccatgatggccttggctaagcggaagagataaagagcagaggccgttgttgttgatgggaatctggttagaaatatgaactggcctgaccctggcacccgtcctgaggggacgctgaccacaggcccccatagtaggtgtggggagattcacggggccctgcacgcggaggtgggtgcctgtgcagtgctctgtggctgcctccttgtcttgtgcgttattctaaagctgacaagggtgaacaagaacaaaggacattgtctcatttctgtgaggattttaacatgagagtctgctcatcacacgtgaactcatcacagagaaaggtttagggattatggggaaatggaatcttgatttaaaaggaaattattttctctgaagccagtatccacacctgataccacacatgattgactgtgttgccctgaggttttcaaagatcgagggatcctgagtctcatctctgtgcatttccttctctgtgacaccatcttggccctcacgggcacaactgagctccctgtgcagaggctgaggggccgtgggccttgctctcgtgagtgaacagccacacgccctccttgtaccttggtttccacacatgaccacgtgagggttggagcgatggtcgtggttggacgttttagctccagcaaccaagtaggatgtgggtggctttcagtgtcattaaatgacactgaaaggtgcagtggccgcaccttgtgtggagggccacacggcgtgtcccgcctggcctgggccccccgcagtgggctgttatcccccgtggccctgaagtgggtattctgtttccccgtggaaacctctcacctggggccacctgcagtggccgcaccttgtgtggagggccgcacagtgtgtcccgcctggcctgggccacccgcagtgggctgttatcccccgtggccctgaagtgggtattctgtttccccatggaaacctctcacctggggccacctgcagtggccgcaccttgtgtggagggccgcacagtgtgtcccgcctggcctgggccccccgcagtgggctgttatccctgtggcccccacagagccatggggcaacttgctgaaacccacctgggtggctgccccttgctatacccacctcccctgccctctgtagggccccagcccatgctgttgtcctgacatgcctctcctgggattcctgcctctgccctgctggtactaggctgctggccacaccccacatctcaggttcctgaatacaccggcccttcctggctctcaagtctgtgccctgcagtgcccctgcccccaactcgaggacctcccagctcagccagttccaaccctgtctgcagggacggggctcagcctgtgcctgggttggggacaccatctagtcagaaatgtccccagcagagagcagaacgtgagtggcgtgtggaggagtgagacgccccgtggctgtgcagccctctccaggtgtcagtcagctgacactcctgcctctgagcacctgctctgccggaaatggcagaaatgttgccagagaaaggggcggagcgggggtggggagcatttctgtcttaaattaaaacaaaacttaactgcttcacacctgcattggctgccgcgccacctgattgctcctgcctgagtttctttaattatttgtgtctgctggtttcttccctgaagcagtcttgaaatagaagcagcagcctcagctacctgggcaccctgacagtcagagacaccgcacaggggcctctgcgacaggcatgcaggcagaccctgcaaggtgaagccgcacagatgctctggggctgcttaaatctcagcgtacggggggtttgcatctgctgacagcaggcccgggaacatttccagttcagccaaggagtcggtgcagcaggtggagtacagctgccctgcggggcctggctccaccaggggccaagacccttcgtggggaggagcacagcctgagggcctcagggtttgtgccctccgacacctgagattcagggctcccagaggggtgggtgggcgccccaggacaaccaggtgatgatgggcgctgtgaactctgaaaagccccagcatcagagacctgctgctctctcatgtgaagggactccccaccccacgctcacactcgcagacgcacttggtactttcatctgagtctcacgcagtagcccttctctccacagcatcccagaacccgagggtgcccctcactaccacggtcccggatccacgtggctcaagtgaggctgtggccgacagctgggctgtccgatccactcttgtctgtgccgaggcgtgggtcccggccagcgtccctccccagaaggtctccctcaggactagtcatgagaatggccatccctaggcctgtggagtgactcatgactgttcctgggcagatgatcagccaggccttcagagctgaattaagaggcttggtgtcatatttgtcaggaaacagaaagtacctgcagaaaggaatgtgccctgtggggatgggaggacaccttcccaggatcatccccggggccagagtatctggaccctccccaggtggcagctggcctgccaggcccagggctcagcctcctccatcacctcgctgaggggctggctcctaccactccctcacatcctgtgacatatcacaggtaccacacacacatgcagtgcgcgcacgggtatcacagatacacgcagtgtgcacacggatagcacacgtagtacgcatgggtatcacatgcagtgcacacacaggtatcacacgcacgcagtgtgcacactggtatcacacacatgcagtgcatgaacgggtatcacacacatgcctagtgtgcgcatgggtatcacacacatgcctagtgtgcgcatgggtatcacacacatgcagtgtccacacaagtatcacacacacatacacattgtgtgtgcacagctgttacacacataaatacagaaaaaaagacctgatggaaaccccagaagtcaatatggctgagctccaggccggactccctgacgatgtcataggacgagggggcgcgtgtgcacactgcatatatgtgtgtgtgagacccgtttgcacactacatgtatgtgtgtgatacccctgtgcacactgcatgtgtgtgatacctgtgtgtgcactgctcatgtgtgtgttacccgtgcgtgcactgtgcgtatgtgtgtgatacccgtgcgtactctgcgcatgtgtgatacccgtgcacacactgagtgtgtgttacctgtgcacatgctgcatgtatgtgtgtgtgttacccatctgctcactgtatgtatgtgtgtgagatacccatgcgcacactgtgtgtgtgatacccatgcatgcactgcgtgtatgtgtgtgatacctgtgcacataccatgtgtatgtgataactgtgcacgcactgcgtgtgtcacatatgcacacactgcatgtgtgtgtgatacccatgtgcgcactgcatatacgtgtgtgttacctgtgtgcaacactgcatgtgtatgtgacacctgtgcgcacactgcatgtgtgtgtgatatttgttgaaaagactaccctttctgcattgcattgccattgccactttgccaaagattaattggacatatttgagagggtctacatacaggttatctgttctgttcccttgatctatgtttccattcctctaccgacaccacattatcttgactgttgtggttttatagtaggtcttaacaattgtagtgtgatttcaccagctttattctttctcagagttgttttggtgcacatattaattttagaattagcttgtctagccgggcctggtggctcacacctgtaatcccaacactttgggaggccaaggtgggcagatcacctgaggtcaggagttcaagaccagcctgaccaagatgatgaaacccgtctctactaaaaatacaaaaattagccaggcatggtagtgggtgcctgtaatcccagctacttgggaggctgaggcaagagaatcacttgaaaccagaaggcggagtttgcactgagccgagatcacgccactgcactccagcctgggcaacaagagcaaaactctgtctcaaaaaaaaaaaaaaaagaattagcttgtctatatctacaaaaagttcttttgaggtcttgaatggaaagccaggtgtagtggctcatgcctgtattcccagcattttgggaggccaaggcaggctaatcaacttgagaccaggagctcaagaccagcctggccaacatggtaaaaccctgtctctactgaaaatacagttagccaggtgtggtggcacacgcctgtaatcccagctactcgggaggctgagtcacaagaattgtttgagcctgggaggtggaggttgaagtgagccaagactgcaccactgcactccagcctgggcaacagagtgagactgcctcaaaaaaaaaaagagagagagagagagagagatgttgattggaatttagccattctgatcggggagatcacttgggggagaattaacaattactatgctgagtcttccaatccatgaacatggtatgtctctccatttacttagatccgtgaacacggtgtgtctctccgtttacttagatccgtgaacacagtgtgtctctccgtttacttagatccgtgaacctggtgtgtctctccatttacgtagatccgtgaacacggtatgtctctccatttacttagatccgcaaacacggtatatctctccatttacttagatccgtgaacacggtatgtttctccatttacatagatctgtgaacacggtctgtctctccatttacttagatcagtgaacatggtgtgtctctccatttagatatactttggtttcttctgtgttgtattcagcatatagatgctgtacttgtgttaaatttataagtaaatgtttcttcttttctttattcctcctatttcttctcctccttttcctctcctttttaaactattgtaagtatggcaggtgggtatggggggagagttgtttgtttttttgagacagaatcttgtcctttcgcccaggctggagtgtagtggtacgatctcagctcactgcaacctctacttcctgggtctaagtgattctcatgcctcagcctccccagtagctgggattacagatgtgtgccaccacacctggctgattgttgtatttttaatagaggcagggtttcaccatgttggccaggctggtctcaaactcctgacctcaagtgatctgcccgcctcggcctcccaagatgctgagattacaggcatgagcctctgcacacagtcacgtttttgttgctgttgttagttttcaactgttcattgctagtaggtagaaatagaattgatttttgtgtgttggcctcaaatactttagttgttaccttgctaaattaacttactagttttaggagattttaatagacttcttgggaatttctacaaatacaatcatgttttctgcaaatacaaacagttttatttcttcctttccaacctgtatgaccaaagccctgactaggacttccaatacgatactgaacagaagcagtccgagtggaccttcttatttctgatcttagggaaaggattcagtctttcagcaagtgtgttagttactggctttttgcagattccattctatctataatgtgcttagactttttatcactaaatgtatgttgaatattttcaaaaagcttttcggtattgatggacttttctttattaggctgttaatatggtagattacattgaaccaagctttcattcccaggacaaaccccacttggtcctggtgggtcatttttttatatatagtactggatttgatttgctagcatattgctgagtatttttgcatctgtattcataagaaattttggtctgtagtttcccatttttgtactttctttgggttgtgtttgagggtgatgctggcctcattaaatgagttgggaagtgttctctcctctttttttttctggaagagattgtgtagaattggtattatttcttctttcaatgattggtggaattcaccaatgaaatcatctgggcctagaggttttcttttctattattattattttgtgtgtgggggataaggtctcgttctgtcacgcaggctggagtgcagtggtgcaatcatagctcactggagccttgaactcctgggctcaagtgatcctgcgtcagcctcccaagtagctgggaccacaggcatgtgccaacatgcccagctaattttttatttttatttttgtagagttgggggtctcactatattgcccaggctgatcttgaactcctggcctcaagtgattctccctcctcgcctcccaaagtgctagggttacaggtgtgagccactgtgccctaccaacgtttcttttttgaaagaaaaagaactatgaattcaatttctttagtgcttataggactgttcaggtcatctgttgcatcttgggtgatttttggtacatatcatttttgaggaattggttcatttaatctgttaagtttctttatgtagagtttcccttcaggccacgaaaccattaaaaggttgattaaaaggttaataagggaattcccatcttaaccttttaatggtttcagggcctgaagttatgtggctcccattcctcatgttggtaatttgtgtcttctgtttcttttttctttgttatccttgctagaagtttatctgttttatggctcttttttcaaagaagtcacttttggatacattgatttttctttactgtttttctgttttcagtttcactagttcttggtttcttctacttgcttctggcttttctctttttctagttgcttaaggtgaagctttagattattgatttgagacctttcctctttataatgtgtacatttaatgacgtacgttgcccttaagcattgctttagctgcatccccaaatttatatataatatatatatatttttttcttttttctttttttttttttgagacggagtttcgctctcgttgcccaggctggagtgcaatggcatgatcttggctcactgcaacctcagcctcccaggttcaagcaattctcctgcctcagcctcctgagtagctgggagtataggcatgcgccaccacgcccagctaattttttgtatttagtacagatggggtttcaccatgttggtcaggctggtttcgaactcctgacctcaagtgatccacccacctcggcttcccaaagtgctgagattacaggcatgagccaccacgcctgacctaaattttgatatatttttattttcatttagttcaaaatatttttaatgttccttaagacttcctctttgacttgtggattatttagaagtatagcacatattttccaaatagttggatatttttccattatctttctgttactgatttctagtttaagtccattacagtcaaaagacgcacttggtatatttcaattcttttaaatttgttaagttgtgttttgtggcccagaatgtggtttcttttcaggaatgttctggtgtacttgaaaagagtatatattctgcccaggcgcagtggctcacacctgtaatcccaacactttgggaggccaaggcaggagaatcactgcccaggagtttgagcccagcctgagcaacatagtgagaccccatctctacaaaaagttggaaaaaaaaaaatagctgggcatggtgttacatgcctttggtcccagctacacaggaggccgaggcgggaagatcgcctgaatctgggagtttgaggctgcagtgagctgtgatgatgccaccgcactccagcctgacagagcaagagtgtgtgtcctgctcgttttaggaaatgtctgttctgtaaattagatgaaggtgtttgatcgtgttgttcagttcttctatatccttgctggttttctcaccacttgttctgttactaagtgaggggttgaattttccaactataactgcctgtttctgctttcagtttttgcttcatatattttgaaagtctgttgtttggtacattcacatttataatgattgtgtcttattggtgaattgactcttattaacatttaatgctctggtaatgctctttgctcttaagtttactttgatattattatagctattttaatttctcggttggagtttgcatggtatttattgttctatccctttacttccaacctacctgtgtaattgtatttgaagcaagtttcttatacacagcatacagttggattatgtgtgttttttaaatccagcctgacaagctttgtaattggtatgtttagaccatttacatttaatgtaattattgatgtgcttgaatttaagcctaccattttactatgtgtttactattgttccctgagagttttattgctcaactttactgccttctttgaggttattttttcatattccattttaatttgtctcttaagtttttgaccataaatgtctttgcatagtttttttagtagtagttccagaaactacaatatacatacttccttttttacagtctacttaaagtcaacattttaacacttccagaagaatgtagagccacatccctgcctccacatcggttacttaccctctgcctttagagtgtagtcagtgtaatacctgtatttgttgtaaactccgttagacaaaatggtaatttttgctttcaacagtcaaaaatatttcagagaacttgagaagaaaggaactcaacttcattcatccaaatatttgccacttctgttgcttttcctgtattcccaatataccaagtctccttctgataccagtttctttctgtctgaaggacattctataggaattcttttagatcagatctgcttgcaacaaattaccttatttttcctcatctaagaatgtctttatcttccttcctgaaggatattttcattggattaggaattctgggttgacaactattttctttcagcactttaaaaatatgattcttggctggatgtggcagctcatgcctatagtcccagcactttgggaggccaaggtgggagtggatcacctgaggtcaagaatttgagaccagcctggccaacatggggaaaccctgtctctactaaaaatacaaaaattagccaggcatggtggcacacacctgtaatcccagctacttgggaggctgaggctggaggattgttttaacctgggaggtggaggttgcagtaagccgagatcatgccattgcactccagcctgggtgacagaatgagagtctgtctcaaaaaaatactactaataatataactccacttctttccggcctccattgtttccgtggagaaatcagtgggcgcaggaacccttgttcctctctgtgtgtcagtgattggattatgatgtgtctgggcttggacatcttttggtttgtcctgtttgggattctctcagcttctttagtttataggcttatgttttcaccaaattttgggtttttagccaaattttatcaaacgactttgtgcacctaagtgttatcttttcttctgtcactccagtagcatgaacgttagccctctgtgtgttgactttcctggtgatttttctctgctgttcagattttgggtcatttctgttgctctgtcttcaagttgtcacgttcgtttcttcatcgtcctgctcctgaaccaatccatgagattctttatttctgtatttttcagtttttaaattattgtttggttctgctttatatctgttatttctttgttgagactttctgtttttccatttatttccaagtgtttgccctttctttctttttctttttctttttcttttttttttttttttttttttttgagacagggtctcactccgtcacctaggctgaagtgcagggctgcagtcttggttcactgcaatctccacctcaagcgatcctcctacctcagcctcccaagtagctgggactacaagcactgaccaccacacctggctagtttttatcttttttgtagagacagggttttgccatgttgcccaggctgttctcaaacacccgagctcaagcagtctgcccgcctcagcctcccaaagtgtgcccttactttttggagcatttttataatagtgctttaaagtctttctcagataattccaataactgtgttgtctcagtgctgttgtattctttttctatatgagttgctatttttctggttttttcccgtgttgagtaactttgtattgtaccctggatatttttaatgttagggatgagattcttggtcttgttgacattctgtgaagatgttgaggtgtttgttttactgtgacttggttggcttaactctacaaagtctgaccctccttccctgggattggtctcattgtcattttatttgtagggcctttgccttgctgtctctacatgtcccacaagtgtactgaccagtggccagtctgaccacgtcagtggagcagataaaggacagcagtggaaaaattcacgaaattcagataaagtccgtggtttctttgaaaaaacaaacacaaggctctgagcagccaggagttaggctgggcactgcacggaaagccccgtcaccatgtggggcaggtgtttcacccccgtgggtggcgtcagcccctcctggaggagcccaggctggcgggttggcagccccgtcatcatgtggggcaggtgtttcacccccgtgggtggcgtcagcccctcctggaggagcccaggctggcgggttggcagcaggacgacacactcggcagaggctgccatggggcagtgttggccccacggcgtttgagcgccctttctccacatcagatcagtgtgttctgctatttcgcagctacttccctggcccctggttttctgaagtccattccagatggcaggtgatgagcctcagtgagactcttgtacgcatcccttgacctccggggtcacagccagtcactttcacagtagagaagagtgagggtcgtggagctggcagctgctcatctgaagcccctgctccttctctgccctccccagaccctcctgacctatgagccgagggctcggccggtgtcttcacagacccaccgtgtccagggcctcccgtgccatctgttcctggtgctgcagggacccccagcccaggctcatataacccagcctccctcccgccctctccatggtcacaatagaagaacagtgaggctgtgtttcctggggccatggcagtgcctgcatgcttaacaggggcctccagggaccctccaccctcaggccccaccttcccttcccacggagtcttccctcttgtaattggtcactcagccctgtggagggcgctgcccgctccaagctgccccagcccctgtgggcaaggtgtggacaggtgcccgctgctgtgttccctggtttgagaaacgcccccgaagatgggatttgggcacaggttttagacgtggacaggctgcctgaatccagcccaggctctgagtgctgaggcctgggccggtaacatgctcaagtctagaggatggggtaggagcacgttcttctgtggctgttctgggaggaatgaaaggacacccagctcccggccagggcaccagggcccacagaggacggcgggaatgcttagctcagcatggttggcttccacctgtcaaagctgcgttttccaagcattccaacaaagcgctcagtttcagaaagcacgcggccctgggtgggccctgggtgggcagggagcagcccacagtttcagaaagcaccaatcccaagagggtgtgcccagctctgacctccatgttcttcatcctccacaggtgaccccagggtttgaagaaaaggagggggagctgctggtgaggggaccctccgtgtttcgagaatactggaataaaccagaagaaactaagagtgcattcaccctggatggctggtttaagacaggtaggacccagccccatgggagtggaggagaccccgaggggacaggcaggaactcattgctgcccacgttgagtgacaccgaggctgggagttcccagaattttcagccaaaggcagaagatggggtggagtggggctgggggccactgttacggcactgcctcctgagcacccggcctccccaccggcttctagagtgggctccttggccctgtccctcagtgccaggggccccagtgccccatgacaaggcttctacactgtccctcagcgcgacagccgctccggcacgcacgcaccctgaccacagacgccgggccccacgcagcccttcctggtggccctgctgcccctcgtgggctggggcaccctccacctccgaggtgtacccctgtacccagagacctcaccacccccacgcttagccacacttgtgccctccacatccttctccccaccagagtcagaagtcagctgacgcagtgcggttggtttgcagtgcggctgtttgtttactgttccacaaattagcacattctctctgcctgccagaacaggcctgtgggtgagtgggaacctgcccacctgattgaggtggcccaggaagcctgtggcggtcaggagagacggcggcgcccctggagcctgctggcagcccccactgccaccctcctgctctccctgagcctgccctgagctgctgctgcctgacccccctcctttgtgagaagctggcttggtcccaggatcccacatcccgccccatggggcgtatttggacagtggatatttcgacatttggatagtggacgtatatggatggacatttggatagcggacgtatgtggatgtgttactagggggtccttgctcccagagctcccaagatggtagcgggcagcttccaaaatggcggcaggctgcttccaagatggtggcaagcgtcgtgttctctgacctggggttcttggccttatggattccaaggaatggaatcttgggccatgcggtaagtgttatagctctattagaagccgtgggccacagaaaagaaccatggaacccagtgactagtgttcagcttgattaggatgaacgtgggtgcttagccgtgcaggaacaatggcgagcctttaggccagtcgggagtggcagtgggtgcctcgctggatcaggagcacagtggacaccctgcgggatccggaggaatagaagtcagcggcgggtctgcaacggcggcaagcagcagtggtggacggcgagcgaaagctcaacttgagccgtaactaccacggaccagaagagagtgtagttgcaagatttaatagagtgaaaacagagctcccatacaaagggaggggacccagagagggcagccgttgccaggtttatatcccgatcattgtccctcctgctgtgctctgaggagatagatgattggctattgtttacctcctgttttagcctaattagcattttagtgagctcgctttactacctgactggtcgggtgtgagctaagttgcaagccccctgcttaaaggtggatgtggtcaccttcccagctaggcttagggattcttagtcggcctaggaaatccagctagtcctgtctctcagatggacatttggatagtggacgtatgtccatggatatttggatagcagacgtgcgtgggtggacatttggagagtggacacacgtggttgtgtggctgcaggtactcactgtagtgtatttatccggaagatgtgcacgttgctcctgacccctgggtggtgagattgcggtggtttttcttttcctggtttttttttttttttttttggcctgtctatattttatgctgaacatcattattttataataacctttaagtaatattttccaaaaaaaagaggcccattttcatgcatcagaatctgctggcccaaaatcagaaacgcatctgccccatgcccttccacagggagcagagcggggggctgcagcgtgcaggcgggatgggctccttgagggatgctggaaggggcaatgttggcctgcagcctctccgcctcatggcctgatcctgtgggtcccagaggccctggagcatgtgctgctgtgaggcaggtgtgctaggtgtgtggcagttccgcacgtttgcaaagtgaaggctccgtgagcccctagagcagaggccagtgccccacgcagcatctcataggcttcccaaggtaccctgggaggcaccttcgtgggctggacatcagcagaggacccagggctggggccctagaagcctctctgtgacaggacgtggtcagcacatcaaacactccctcccaatttatcttttttatacatccccattagcgcatgctgatctggggaaacagcctgtccatgacttcccttcaaatgcagaattacaggaaccggacttgagcaggtcttgctctgagcatccctccagtgccctctgaatgccccgaccccaatccgactcacgctgcagttgttttatttatttagttagttatttttgagacggagtctcgctctgtcgcccagtctgcagtgcagtggcacgatctcagctcactgcaacctctgcctctcgggttcaagcaattctcctgcctcagcctcccaagtagctgggattacaggcgcccgccaccacgcccggctaatttttgtatttttagtaaagacagggttttgccatgttggccaggctggtctcgagctcctggcctcaggtgatccgcccgcctcggcctcccacagtgctgggattgcaggcgtcagccactgcgtctggccggttcttgtatttttaaattcaggtaaaagctgaagacgttttcttctttgaaagcacaggaaccacagccctgtggattttgcgagtcgcggggctcccggagccgctgggagggcagccgtgtgagatgcggggctgcgagcgtggaaacactcgcagtcgccagtgctgaggcatgtttcagccggggcggaatcacatgcattaattattgtacagagatgtctttagtagaaaatgattttgaaattcagtttaatttcattgtaatgtgctgcaaacaggaagggagtatgtgtgtttaattggctctcgggggtaaggcctggaagccgcatgtctttgtcacaggccattagcgatgctgctgcataatgagagcctgcaatcagctcacagctgccgctcctgccgggagagcatgatattaaatagaaatcaggagaaattaaacttaaccctttccctggccagcccctcctgccacacggattctggcataagccggcgggcacaggggacagccagggatggctggacacagctgaggatggccgaggccggcctgcagctccccaacggcctcctccgggtcaggatgagaggagaggttgccagctttgatgccagccgctcctgcctcccccacctgcctctgtgcctacagcccgcttctgcctcaagatcacacagcgggcttgtgaggccaggggtctccgctgctgctcaaggagatggcaaaggtctgtttcaggtaactcctctgacggccacaacgatgtcttcagacgtcaaaggtctgtctcaggtaactcctctgacggccacaacgatgtcttcagacgtcaaaggtctgtctcaggtaactcctctgacggccacaatgatctctgcagatgctctgactccacgtgccctcgctcagagacacacgcgcacatttgccacctggggcgagtggaaggtgacgtggaggtgggcacctctgccgggcagatgcgggagcagcagcagcagcagcccctcctgggggcatccaggggtcaggagaggggcggtagggcagggcggcatccctgcaggggtgaatggcgtcttaggctccagccgggtgaggaaacctgataaccgaactccttagagaagagccagggatcccgggaggaccaccaggagcttgtggggaaggactgaggggaagagccccaggtctcgggaggaccaccaggagctcacggggaaggattgaggggaagagccccgggtctcgggaggaccaccaggagctcacggggaaggattgaggggaagagccccaggtcccgggaggaccaccaggagctcacggggaaggattgaggggaagagccccaggtctcgggaggaccaccaggagctcacggggaaagattgaggggaagagccccaggtctcgggaggaccaccaggagctcacggggaaagattgaggggaagagccccaggtctcgggaggaccaccaggagctcgtggggaaggattgaggggaagagccccaggtcccgggaggaccaccaggagctcacggggaaggactgaggggaagagccccaggtcccaggaggaccaccaggagctcacagggaaggatggggagaggggagtggggggctggagaacccccagactgagaaattctgctcggagcgagaagggagctgggcccaggtggccccatcccccaaggttgaacatcagcccagcctcccaggccctccacgtgctcatgggcaccactgccgggcactagcttacttgtcaccctgtctgaggcgtgttggggtaggagcaagagtccgctgcttccagggcccagctggggctccatgtgtccctgggcaccccagaaccctctgggtctcagccgttgggttcttacatctgggccagtggcaaagggttaaagggaccttgtgacttagttgggactcactggcctcaagaagcgaaaatcagagggacagcagccccagccgccggggattccctgtggcgccagagctccccggcaggcactgtggaggccaagtggggaccggcagtgtcgtggtcccggcccacagcctctcagcctcccacagcctctccctgtggtaacgaggtggacgctgagccccaggcctgatggcacatttgaggtcaggtgggggcacctgggctgttcctgtagctgtcccctcgtccaggggagggaccttttcagaagccctggggcctttgtctcattgaccaaaaccctcctggccatgctgccttcacaggacactgggcatctctgtggggcaagggaaggaacacaggcctcctggtggggccccaagacccaaccaaggctcgtctggctggtgccagcctctgcgccaagggtgccgaccaaggtcagagccgatcgcggggatgacaggtgccgaaatggccatgcttgccccagcccctttcatccggcagagggacctcgctgggcctgccacgctcagccaggctgtgctgtgaagcccctctcttcccttctcagagccatatgtccacgctgacagctcctgagagggaccatgttttgctgcctgcaggtgccaagctgactgatgggccatgctgaggagggtgccccagccctcctgcaagatgcccttctgtgcagcctgcagggccaccaggcccacgaggcggccatggtcttcagatgtgtcttagcctgggttccctagaaaacacatgaggactctgggcagaggctgagtgtttttacatttttatttttaagccaaagttacacacctgtggcttaaacacccaagtagttgtagcagtttgagaagaagaatcacagccgtgccccttccccagactcgccggctgctgcttctgtgcggtccccgcatcccgagggccgccagcaccgccacctccaggctcctttttgctgccatggcttgagtcccgcagaggaggcccctcctcaggcacggcccggctcagtcccgtatggcatctgcactattgagactatggagtcgccgctgagaactgagcccaggagacactgaggtttttcctctttctttgttttccagagtcgggaaagtcttggttttcttggtctcctggtgccaattcctcgtgggctgggctggtctccccatggcgcctccttccccatcaccaccaccccttccctcctaccgggtcaggacgtcggctcccagcccacagcatcctcgtcttccctcttccgcccccagctgtggggactgctttcccctggggcttcctgaggcgggtgtgtagggtccgtacttggagacttgcgtgtctctccgggtcttcgttctgccctcagccttgcttgtcggtttggctgcgtatagggttcagggttagaagtcgcttctctatcattttctggccttcagatttgctgctgccacagccgtgctgaatcctggcacttggtgaccccctcctttttttttctgtttttttttttttttttttcgagacagagtcttgctctgtcgccagactggagtgcagtggcgccatctcggctcagtgcaacctccgccttccgggttcaagcaattctcctgcttcagcctcccgagagtagctgggattacaggcgcccaccaccacacctggctgatttttgtatttttagtagagacggggtttcaccatgttggccaggatggtctcgatctcctgacctcgtgatctccccacctcagcgtcccaaagtgctggaattacaggcatgagccaccgcacccaaccatgaccccctctttttaacgtacagggtgtcctctgtccccagacccctgagcccaggttgaggagccaccagctgaggacggagccaaggtcacggagctgccgggtgagcgctgagcccaggtcagggagttgggtctcaggccgtcactgggactccctctgccttcaagaagcctctttcacccttggcccacagaggagacctggatggcactggggtccaggtgcagaagcctccagtgtccacgggcacctgagcttccagcaccttccctcctgctgggcggtggcctgtgcctggccgcaatggaggccgccttccccactgcccctctgagcctcagtctgtcctccctgcagccacctcccctggccaggtgccccggggtaactggtggaggctttcacgtaacttggtttccagctgcctctgtacacacacaggcacctgttccaggcttggcctctctgtacacacacacgggcacctgttccaggcttggaggctgagaacttgggggcagagatctcagggcatcggcttgggcggggtccttgggcagggccttgggcttccctcggcactttcctcaaggactggggccaagcttcacattctgttgctggcatcagtgccatttgggagcaaaagtccgacaggctgggtctgggcctctcttcaccttgtttcctgggatcgcgctttgggtgctggtgtcactccagatccaggctcgggaaccacatctgcacagcagaacaggcgctgttcttatcttgcgtgcgggtcaggacatccccccggccaggagtgcttcctccgaggcccacagacaagttctcgctgggggactggggaccacagcacctcactccacctacactctagagaattcaaatctgagtattggaagatttattttcagttacagtggaaggcagagacatgaaatagcaccaaattcaaaagcagctcataaatccaggtaataggagtttattgattgctacattgtatctgtcagaagaaaactcctttaatgaacacatcaggccgaggacatacacagcccattggcagccgactccgattccagaatcgatgcattttgataaataggttgttatggaaagtaaaggttatttaacttgtttgacttgcatttcacagtgatcgcaagttgccctggagccctctgaaccttctgagtcgccctcgctgccgcaggacctcctcccgcggggtgtccgacccgctcttgcttggctgagactttgtttaaaccctggctccgatgcctctgagcccttgatagcagcgtcccagcctggaagaacaaaaccagccacttttccccttggcaaaggcacagcaaggcgggtgaggcgggcgctgagtagtctgggaatgggcagggagatgtcgaccctcggagctgagactgctctgtgctgagaagctagaacaaagcctgacatgttccaaggggcaagctcagggctgggagggaagcagcggggccgcccctttgggtgggggtgcccaggccttgcagacaagacactggccagaggaggtggagcaggggtactggggcagaggggccatgtttgtgcagcaggatggaccctggagggccccggcctagagggggcctttgccaggaagatgccaggaacgtccaggccaaggcgtccgggcaaaggcatccaggcccgggagacgcatgtgggacttgggctttcctctgtgggcagtgggaagtctctccctacccctggaaggagctccaggcagcagtgaggatggggattctgacactggagtggggagccggccctgtggtgctggctgggctgagagcggcaccaccttctgatgcccagggtgggaaggacacacgactgccaccatgcactgagggccctgcacgccacacacgtgctctgagcactgagggtcccctcatgccacgcacaagttctgggcacagaagcacctctcagaatcatccccgagacaggcgtccatcacagagacaggtctcagtcctgcactgattggcttcgcccagtgctgctgggggagtctcagacacagcctttttccgacaggtatagctgccactttctccggcacagaagcctggggccctgggaatggcaccatgttgcgcgccgacccctacggttcttccctccgcatggctcagtggaaaccgtgcgtgcagcacagcaggcagctggggcctgtgacgaccctggggttggaggccaggcagggctatcactgagaagcagggatttggggcctggggcccagggaatggacaactccccaagctgcccccaccagtccttcctgagcactggctctggaagaagcatctcggggcagaggcagccaggcccaggcagggagagacccccaaacaaggcctacagcagggtctcagggcctgaccatgccagaaacagcccagagccagagaggatgggcagatactcagtgccaccactcctgggagatctcagcaccagggcttcgacctctggggatacacacccacacctgctgagatataacacatctgcagagacacagccacgcctgcagagacatacccacacctgcagacacacccacacctgcagacacacccacacctgcagacacacccacacctgcagagacacagccacacctgcagacacacccacacctgcagacacctacacctgcaggcacacccacacctgcagacagagccacacctgcagagacaccctcacctgcagagatacaggcacacctgcagagacacagccacacctatagacacacccacacctgcagagacacacccacacctacagagacacccacacctgcagacacacccacacctgcagacacacccacacctaaggagacggggtctcgcagtgggcggagaggttgggtcttgcatctaatcagccattgatgggcctctcctgtgaagggcactcattccttgtattcataaattaagctcatgtgagtttgttctttaacaagttattgcgcgatcataatccattgccgacgttggcgtgactcaccatgtcatgagcccactcggggctggtgctgctggagatggggaagaaaattgctccataaaccaaaaagcaacattttaaaacttataaaaaagattcgcaggaaattagaaataacacacaggggttccttgtgccgtccccccagtttctcccagcatcagcctggtgtgtaacggtggtacatcctcagtgccgtgcgtagctttggtgcagtctcagccccgtgcgtagctgtggtgcagcctcagccccgtgagtaactgtggtgcatccttggagccaggacacaggcagctcaagagggtgccggggacttgtcagccttgggggcaggcagtgatggcctctccggcaggaccagagcagggcagtggctccatgctgcgctgggtctctgggtggtgcaggccagggtggagccaggccagaagctgtatggagggccctgagcacctggcagcctccctggtgtcagcagctgtggcatccgtggggcaggagcagcctggacggggtggctcggtgcgattaagagatgctattggaagattggtggctgtctggtccagaggggacacacaagccaggctgcacagcaggagcaggagccatggcgggtcccacgggacttgggacaggctgtgtccaaccccgcccacagcccaacctgcacacccccttccagccgcccagactaccccaggggcgcagtgagaccactctcctgtcggggagcctctggtttttctgctacccatcagcacagagttccagagttccagagctccataaataagcctggagcccacctgggcacacccatccgtcttgtttaatagactgaggagcacgccatgggtctcaaggagtggtgaggtggatggatggggcctttctgcgtccaacagcatgatgtataatgaagtatttatgatttattccagctaataacccatgtggagtgcagggtatgtggaagcagacagttgaggcctcagcactgcccttacatgccctgcatgctcccacagccacggcacacatgtgtgcgtgcacatgctcacagtcacgcataccgcgccctcccagctgcacacacgctcgcaggcacgcacactatgggcccatgcgtcatgagacagcttcgggctgggagtacaggctctgaggctgcagcccgctcttcccgactccccaccctcagtggctggtggtgtctgtgttgagctactcgagaaaggaagaaaacgaaggaagcttggttcccacaggagctccaggaactgcacggggaggagcaagggccacgtcgtggctttgccttaggaaggaaaacgtggggcagccccggccattgttctaggaccagcatggtcaggtgtggagggcacaagatgggcaccagcaggaggctccaggcacccaggaaaggccctgtcctcctcagccaccagcccctccctgtggcctctgcgtgggccttggtgcctctcccatccagaggggctgggcattcactgctggagcccaccgtggtgggatgttgtaatgtgtctggttcacttcttttactgaatatttggcctggattcttttgtgggcctgagagaaatggcaggacagggcctggtgggcctcggcccctctcccagagcagcctgcctgcatgaggggcggcccctctatgctgcagtcccaggggctccgtctgggggcccttgcagcagtagcagcacagccaggaggcccagcacaccctggcacccatcctgagggagggtaaagcatcagaccctgtgcttgttgctcagaaaaggccacgcatcccacccatggccagtggttatcaatcactgtcacagaaacagggcctgagccggcttcctaatgcagggtgtctgcagaccacaggcccagcagggcttctggcacctcctgctcctggcaggctctggacccactgctgacctgcccctggaggaagtgcatacagctgagcatggggaagggaccccacaggaagggcagaccccacatcatgggcacagtcccaccttgggacgcacgtcgtgaccaccaggaatgtgggcttacctggcatagctgtttctccgttggggttgccacagggtagtaaccagagccccctttcctcagaggacaccgtggtgtttaaggacggccagttaaccagagccccttttcctcaggggacaccgtggtgtttaaggatggccagttaaccagagccccttttcctcaggggacaccgtggtgtttaaggatggccagtactggatccgaggccggacctcagtggacatcatcaagactggaggctacaaggtcagcgccctggaggtggagtggcacctgctggcccaccccagcatcacaggtgcgtggccggacttgggccagggaggccaggctagacgggtgctgccttccatgtttgagttttagacgactgcagatgagtcgacgccgtcccagctgcctgcaggggtccctgtgatgctcacctctggtccctgccctggccagggaacatggggctagtgggggtgcagcctgctcggtgttggagccactgaccccgtgcccaccagagctcccaggcctggccgggcgcagctcccatctgcatgattcccctgcaggaaggtggcagggagagtgcagagagccaaggggcgggaaggcagagcccctgtgagtgcccagtccccagatccaccgtggggagcccgtcctcactcccctccccacaggcccagccagcaccaggacgagtgattggagtggggcctgtccaaggacgggctccagggctgcggccagactgcgctcttcctgtgtgtccaggcactcttcggcctgtaagggtcactgaggcatccccatgttctcaaactgttcttctatccgcagatgtggctgtgattggagttccggatatgacatggggccagcgggtcactgctgtggtgaccctccgagaaggacactcactgtcccacagggagctcaaagagtgggccaggtagggctgggtggggcgggcagggagcactcatggggtcttgggggtccagtcttgagggccaccctaggtattggcatcgtccgtcttagaggtggagatgagggatcaagaaagaccagcagtgagggtccttagagacctgaaggccgcacacagcaggtagagacgagggcagggggcaggagccgtgctcagatttgacttggtggcaatattccgagggggcagaaactcacattcctgggacagggccctgtacggcctgtggtgggttccgtcctggtcccaggagagatcccggatgagccaggccaggcccatgcaggaggtgcatggagctgagatccagggttgacaccagctggccgcacgcgctgggcccttccccgccaggccacaggcagcctgtccacctgccgccccaaagccagtgctgggccccagcagaactgcaaggcccacccattctccgtcggcacctgcacggcctctccctctcctgccctgggggtgggtcctgaaggtgcctcacacacctccagtcagttccacggagaccccagcaccatcaccatcccctcagtcatttcactttcccctccatgtccagggcagggcctgttcctcagcggtggccaccacccagtccttaaactcacctgcattttttgttttgcctttaccttacccagaacctttccccaaggactttctcccacctgtctcacccccagtggtttctgatgcatgggatccacagaccctccacttttgccagcagtggtggtggtcacgcccagggctgaacctgagctatggccttgtcaaaggccgtcaggacggaagggtatcccataggaccgtcagggcagagccaggctgagctcagaaaggaagcttttagtttcacctacagtaatttcttttgtttttttaatttataaagaaacggggtataattggctcatggttccacaggctatacaggaagcgtggctggggaggcctcaggaaacttacagtcatggcagaaggcaaaggggaaacaggcacatcctacatggccggagcaggagggaggagggaggagccacagagtgagtgagggaggagggagggtccacagagggagggagggtccacagagtgagtgagagaggagggagggtccacagagtgagtgagggaggagggaggggtcacagagtgagtgagggaggagggaggggccacagtgtgagtgagggaggagggaggggtcacagagtgagcaagggggggaggggccacagagtgagcgggggaggggccacagagtgagtgagggaggagggaggggtcacagagtgagtgagggaggagggaggggtcacagagtgagtgagggaggagggaggggtcacagagtgagtgagggaggagggagggtccacagagtgagtgagggaggagggaggggtcacagagtgagcggggggggggggaggggccacagagcgaggagggggtgggaggagccacagagcgatgggagagggaggtgccacgcactctcaaacatgcaggtcttgtgagaactcactcactagcacgagaacagcaaggggaaaatccacccctgtgatgcagtcacctcccaccaggtcgctcctccaacagcggggatcacaattcaacatgagatttgggtggggacacagatccaaaccatatcgttcctccctggcccctcccaaatcttacgtcctttttacattgcaaaatacaatcctacttcccaacagtcccccaagtcttcactcatttcagcattaattcagaagtccacagtccaaagtctcgtctgagacaaggcaagtccttttcacctatgagcctgtaaaatcaaagacaagttacttcccagatacagtgggggtgcaggcattgggtaaatacaccagtgccaaaagagagccgccagccaaaacaaaggggctgcgagccccaggcaggtccaaaacctagcaaggcagtcactgaattgttttttggtttcttcttttttggtttttttttttttttttttttgagacggggtcttgctctgatgcccaggctggagtgcagtggcatgatctcagcttactatagcctctgcctgcaagcaattctcctacctcagcctccctaagtagctgggactataggcatgcaccaccacacccagctaatttttgtattttttagtagagatggggttttgccatgttgtccaggctggtctcgaactcctgacctcaagtgatccacctgcctcagattcccaaaatgctggaattacaggcgtgagcaaccccacccagcccaataaatcttaaagccccaaaataatctcctaagacccatgtctcacatccaggctacactgatgcatggaggtggctcccaaggccatgggtatctctgctcctgtggctctgtagggtacagcccccatgctgctttcataggctgctgttgtgtgcctgcaacttttctaggtgcaccacacagtgcaagctgtcggtgggttattctggggtctggagaacggtggccctcttctcacagctgcagtagccagggccccactggggactctgtgtgggggctccaaccccatctttctcctcttcactgccctggagcagtggcctgagctctatctggagcccttttagccccagagcaacagggatgcaggggccagtgtccctcagggcagtggcccacaaaaccattcttccctccgaggcctccaggcctatgatgagaggcacttccatgaaggtctctgacacgcctagagacattttcctcattgtcttggcgattaatattcagctcctctttacttacgcacatttctgcagccagcttgaattcctccccagaaaattgtttgtttgtttgttttctaccatgtgatcaggctgcaaattttccaaattttatgctctgcttaccttttaaatctaagttccggtttcaggtcatctctttgctcatgcttaacaaaagcaatctttgctccagttcccaataagttcctcatctccctccgagtctacctcagcctggacttcattgtccatatcgctattagcattttagtcacaacaatttaacaagtctttaggaagttccaaactttccctcatcttcctgtcttcttccgagctctccaaatcgttccagcctctgcctgttacccagttccaaagctgcttccacatttccagatgtcttaacagcagtgccccacttccctgtaccagttttctgtgttagtccagtcttgcattgctataaatgaagccagatttttctcagccactttgccaaccggggacctccgtggctggtgacacccccaacccaggcctgccacagaaggcacccacacactcgacccactgggccatgcttggcttatgcactggctcagcccacctgtgttatagcttatacctgcattcatcggttcccaagttcttgtcccgcgtccaagaagaatgaggttacactgacaattcaaagggtgaggagagtggagaagaattttattgagcaatgaaacagctctcagcggagagggtatgcgagggtgctgaaccgcccagagttgggtgtggctgggtctagggcttttctgggcacagaatggggaggggcaggctgtaggtagcactggaaaaggtaacctttggttggttaaaaagcattattcagaaagaaccagtgggaaagagtgggcaaacaggaatagaagttctcactccaggctgcaggtttcaggctgtttttggcttgaaggtggggtttcaccagggacccacccctgtctatctgggcatttgactgcttcctgttgctttcataaggaactacccaagatggtaatttataaagaaaagaggtttaagtggctcacagttccacaggctataaggaagcatggctggggaggcctcaggaaacttacagtcatgacagaaggggaggcaggcatgtcccacatggtggagcaggaggaagagctcacctacagcaaattatttaagaccgagcatttgtctctgttctgttccctctctggacgcaccctcctgcctccaccctgacttgccgtctcctgagcactgaagatatttttggcttgtccgatgtgactccacagacagcagaaacgcttgcttgatcagggcagcatcagggcaccacacatgcctgggcttgcacaacacagcgggagcactgccactcagcagcagctgctgctttcattaaacagttaccttgagaagaaaagataggtgtcgagggctgagagctgtgctagagtttcagggtccgagttggcaggaactgaagtcccgatgctcctcagcccttggctgtcctcagggctgccctctgcgtggggacaccaggccgcccctgcccagggacaccaggccgcctgctcctgctctgtgcatctctcacatcaggctcctcacccagcattgtttgggctatgacagtggctgtgacaagaccctaagacgggaagctgcgtgcagggcacttgagggcccgctgaggagaagccgcctgtgagggacaggactgggcagggaaggccaccagccatgcggtcacagcccaggactccgccagtcctgcaggagccctggagccaggcccttgctgtccaggccacttgctgtacctggcccacagctacctcccctgcagccctgagtcctgcttgctgtgcccggctcaggctgagactgcagtgcttgtccattcaccatgaaagaaagaagaacaggaagggaggcaggaggaagtaagttagaggattaatccaaatgttccaactgtctaatgggagttccaacaagaagatatccagggaggaaattcacagtcaaatttccccaaaccaaaggtcatgagttttcaggttgaaagaacacccaaccaagaggagagaaaacagcattctaaatatcggaaggaaacgaaacctcgcctcaggcatgcgggctctgacgggcaggatggcggcacggagggctgctgtatccagtgaagtcagcagttcagatgaaacagataactcccttaaaagacacaaattgccaagactgacgcaaacactgaaacagactgaacagttctgagttaccaatttaaaactgcaaagcaaatagcaggcccaaaaggcttcactgataaattatctcaaacattgaaggcaaaaaataaaaccagacacagcaaagtaagtctctgatgaaacagagtggggaggaacacttcctaactccccgtatgggaccagcactaccctgaaatcaaaaccagacaagaaaacgagaggacagtgttcccaatgggcagacacacaaaatcctaaacaaaacgttagcaaattaaatccagttaatgcacaaaaagacaacacgtcatgatcaagcagcatttaagccaggaatagagggttactttcatattcaaaaatcagtctgtgtaattcaccatatattttttttttttttggatggagtctcgctctgtcgcccaggctggagtgcagtggcacgatctccgctcactgcaacctccagctcccaggttcaagtgattctcctgcctcagcctcctgagtagctgggattacaggtgcgcaccaccatgcacagctaatttttgtatttttattagagacggggtttcaccgtgttggccaagctggtctcgaactcctgacttcaagtaatcctcccgcctcggcctcccgaagtcctggaattacaagcgtgagccactggtaattcaccatatttacagaatgaagaagaaagatcatatcatttcaatagatacagaaaaagcatttgcaaatgtcaaaacccttttataacaagcactcttagcaaactaggagaagaaggaaaatccttgaacctgatgagggagtctctcaaaagctaccagatgacatcctgctcgatggggagctgctgggcgttttcctcctgtgaccaggaaggggcgcctgccctcaccactgccacccagtctcattcaacacagagtttgtcccctgttagaaaccgagacgttggttacacgtggaggttgggagtggctcaggcaggcagaggggcttctgggaacctggccatgttccctttcagtctgggcgctacttagagcagggggcagttgcttcaataaaactttagattcccacacaggccaggcgtggtgctcacacctgtaatcccagcactttgggaggccgaggtgggcagatcacctgacgtcaggagttggagaccatcctggccaacatggtgaaaccccgtctctattaaaaatacaaaaattagccaggcatggtggtatgcgcctgtagtcccagctagttaggaggctgaggcaggagaatcgcttgaacccgggaggcggaggttgcggcaagccgagactgcaccactgcaatccagcctgggcgacagggcaagcctctgtctcaaaagaaaaaaaaatctacacatccctcaccacactgtacataggacagctgggtgtaaattacatctccatttaaatgcctgtcatagttttatacaactataaaatatatacgtgccaaaataaatttgataggaacattggaaccaggtaaggtgacgcatacctgtagcacttcgggaggatcctttgagcccaggaagtcgaggcttcagtgagccatgactgcaccactgcactctggcccaggcaacagtgagatcctgtcctagaaagaaaagagaaaaaaagaaaaatgcgatttggaaatgtggaggtcgaggttgacagcgacaccgaggtcgaagccagttgcccctggagagcgagagactgggctgggccgactcccacctctgtcgcgagaggcctacgggcaggggcaggtgggcagggggactgtgctgggtctctggccgcgtctggacggcaggcgacactttctccacaaaaagcgtcaagaaaccacgacacttggtttctggacttttccgcggaacagtaaccagaacaatcgccatgaaggttcgtttctgtcatggctcagtgcagcctggacgccctggaccagcccctcctgcgcctgggccacggccgctgccttcagggcatcactggtgggcggcacaaccatcctccctttggggggttaatttcatttctttcctcccttctttaatggtgaatggaggagcaccgagcaccactgcagtctcagtttcagatcccagcgcctcgtccctgcccactgccctcggccccgcccgcctgcattggcagtgccctggccccacccacccgtgtcagcaccgcccaccgccctggcaccacccaccgagttctcgcccatgaggaagggggaccctgagtggaggtttcaaaccttaggggccgtccctgccgtgcagggctctgtgaggcctcttgccacataggcttgtgtctgcaggactgtgcggcatttactcccatctcaaataccccatacagggcagactgcccctgccccacctgcccacccactccccagcctcttccgcacgcctcctctggaaggggaacgggccacagagtgaaatggggccttccagctccagtgcggggacttggaaggcctggcccggtgtgggggcccctctgccctgcaggccactctgtgcaggcctatcctcaggtgtgccctcgcccaaggcctgcacgcaccatggcttctgtggtaccagtgataacaccatgccgggcacctcctgcagtcaccacccctgggctgctagggcagagacagctgcggtggcccggtgcacctgcctggcctcaggatggccgaggcgcctggcaaggctgcagggtcccaggggcacctgtccgtactgctgggcgcctgagttcctcctgctgggcactgtcagggcagtgcgcctcaggctgtgcttgtctctgcagaaatgtcctggccccgtacgcggtgccctcggagctggtgctggtggaggagatcccgcggaaccagatgggcaagattgacaagaaggcgctcatcaggcacttccacccctcatgacccggcagactgggactgcgggtctggtggggagcagcagacgtccccttcacaccgagaaccacgggggcccgtccaagacctggcctcccttaaacctgaaccccccaaatcaggtcacgtagaatcaagaactgtttgggatgaaatcaccatgtggggtccccagcctcgggccagttgttgcagctcaaggagaccgtccctggtgtcacctctgcctggtcaccgccgacctcatctgtgcagcgcggtgcagccagcccctggccccacgtgctgaggcacctcccgccccacagtgccctgcagttgccaggctctccagggcaggtcccagaggtttcccacaaaaaacaaagactccactggaggaaacaagcccctgtcccacgccgtctgcacgtgcctgtgcctcacccagagccagtgtctcccggcccacataggaggtctgggcagccacccagggggccctcctgggaggagctgagggttcacaagcctcccagaaccagccctgtcccatgggttccgtgcatttcctggtgctgctcttggaggagagcagctcccactgtggggacacctgccaccctgcacactactgtgtgtccatcagcatgtgtcacagaaagtgcgtggacggatggccccggagctgctctgccgtgaccctgcctcaccccccagcgcagggactttccaggtcatctccacaccagcccctcagccggtgaaccctctctcccatcaccgtctccacccagacccccacctgccccatggcccccatttcatgtctgtggctcaccagcttttccccagacccagctccggagcccacaggcgtggccgatgcagaaacctcaggaaggtgtgttgtgaatgttgggtgcacccacgttgcatttacttagcggggccaattcagatgcacaggggccacatgcagaatccagaagtttctggacaattttcagaagaataggctgcctcctccccacagcctgggggaagtaacagtcatcgcccagcagtgtctggcctgaacttacccagaacattctgcccccggaatgcacgtctgaaagagtggccagaaacgagtgtgccgggcaggaggccagccccatctcaggctcacgtgcctctgacaggagaccagccccatctcaggctcacatgcctcgcggacagttggacgtggcctggggcccctgctcacttgagcatgtcgcccaccaagcttgtctgaggccacagagcagcgtcccagccctgttttccaggactggtgggtgccccagtccacggccctgccccacccgaactcctgcctcacggtgtggccttgtgcatccccatggcctgaccccgggaacagtcagaggaaggggtcccgccctcccgccagaggcctggacccaagggaacggcagtcagagactacagtccagacgtttgtgtctaggccttgctggtagctaaggaaatgccttctgttgggaaaaggtcaaatttaacatagcaaaatttttacttaattccactaattttacatttgcatctctctcctttaatcctgaaacttttgattcctaaaaagcttacataatcatttgctttatccgatagtatacatcagtatatcatgctttcgaaataatgagtgtaactttctgctgacaatactacaaactacagaaagcctggagctcattgaccagaaactgcagagagcctggagctcgttgaccacaaactacagaaagcctggagctcgttgaccagccggttgaccagaatacggtgctccaaggacatgcggttgaatgccgtgttctaaagtcacgagtgactctccagctggtccctgtgccaggctggtcggccttcgtgcacacagtccgccagtgcccagccaggcccctggttcccctctgctccaccagccgagaacaagcccgtcctggagggaactcatcctctcctccctccccattaaagcccagtttattcccca

SEQ ID NO: 15358 - DNA, 60691 bp, Homo sapiens
ccggccggaacccggcccgaccccggcgcgcgcgcggcggaggacgaggaagagttgtggcgaggcagatcctgccccgtggccgcggccgtctcgtaggtgcgggcggcggggcccacgggaccgcggcggggtcggccgggcgcagagctctcgggggcgcgggctccggcgcccgcccctgggtcgcagctgggcttgagccgtggcccgtggcgcggtcgcttccccgcgagccgcctggggccgggcgtcggccttcccgggacgccgagcctctcgtgtccggtggggagcggggcccccgcgcggggtgcggggagagaagctgtgcggacgccgggcccggtgataccgtcgagccggcggggtccgtgttcaggcatcctcagaacgaatcgtctttggttgtgtttggaataaattcacttccatttctcattgggcttcagaagtcacccttgaagtactccccgttttagttgtttgctgcgtgcaccttgctgggcgcgtggggcacaggttcacagccggcctagcccctgagggcatgtagatctatgagcaagcaatggagacgtgcggccggccgtgaagtatttggaaggtactgcaggcagcccattccctggagagagggaaggtttaaaggggtgaggcccggtgcagtcaggagttgatgttgctgtcctgagtctaaattccaccaggcaggccaggtgcagtggctcatgcctgtaatcccagcgctttgggcagcagaggcaggaggatcacttgtggccaggagttcaaagccagcctgggcaacatggtgagacccctatctctacaaaaaaatgtaaaaattagctgggtgtggtggcgtacacctgcacttccagctactggttaggctgaggcacgaggatttcttgagcccaggaatcggaggctgcagtgagccatgacagcaccattgcactccagcctaggtggcagagcaagacactgtctcaataaataataaaactgaaaaagaagaggtgatatttgaactgggcttggaagaatgattaggaatttgctagaaagggaacacgtttagagataggaacacgaattgtgtctggggcatagttgttgctttcccatcctgggaggacagacattcgtgttagggcccaaggctgagaccttgttgaggagggggttcacatggtggacccaggagcacgggtgttactaccggtggaccctggggaccctgcgagctttgtagcgtgaagcctggctcaggctggtgtcctctccgcaggtgttggaggacataagatgaggcttcccttgctcttgctcctttggctctgaaccatctcctcaaggcagacagaaatggcggattaaactgtgggcttgggatagttgtaagtgtcacctttccagatggcatttttaaaatagtatttttcttcctaaaatggatatgggtttcaagtgtatttttcctttttggttttttttatttgaatgtactgctcatgaatgcaatgtgaatgtctgttacttaaaaatgtaattttgaaaataaccctccaaaccacaggtgtgatgctgaaacgcatcctgccccgcaggccgagcacagccctcctctgccccacgctctcatcggggcagccgacaggaggaagtgccggcatccacttcaaacacaaggtctgggggggcgggggtgtcaggtgtggtggtgaacaggtcaggtgtcgttttattcatgttgaaagcagcccttcatttgaatgcgagtgtcattctcatctagtaatttttgttgcgaggctccatggggagcaccctgctgagcacggcgcggccgtttgtcttctgcctggcctgtgccgggccattcgtacattctcacgtgaagcctgtgaggcaggtcttgttactgtgccatcttagcggtgggaagtgaagggctaggccagtgaggaaatgaggacaaaggcagcagccgttcaagtcgaagcctgtggtgactaactctgccattaaccagcactccagttaggagggaaaagatgcatcccgctgcgctgcatgtgtgttcccgagaagccccagtgccttagtggtctgatctcagaacctgatggctagaacaccgagaggtcctgcctccctccccgagggctggagagccactgttttcagtggttccagtacgccttcaccaaggaggctgtcctggctcaggcacctttctcagcttctgactagagtccttgcccagccacgtggtgacgccgctgacctcgggttatcagggtgctgcgtagcaggggtatgaagctggctgagggtggaagcccctgactgaactgcatttgtctggtgggcagtgtccctccacactgtgctcctggtggtgatggggagccccacggtagaaggggtcccagtggttgaaaggtgaggttctctctgaggaagctggggtgcctctggaccgggaggtgtgcaggaagaccgcgcacagccatctgccctgagtaggctctgtctgcgtgttcgaggcagggctctgatccgatgaccgtgaagattcaacctctgtgctgaagagaactgatgactgggcacttcattgtcccaagcctgagggactgaaaagctggtttgatggggctggttccgttttccacatgcttggtgggagaataaatcagcacctcgttggaggggactttgtcagtatttctcaaaattaaagatgacccagcaatgtgacttcccggcatctgtgccctagacaccccgagtgaacacagctgtaggtgccaggactccccccttccctcggccgactctggctaggccaggcccttctcaccctccataggaagcctccccaccaggcccccgtccgttcctcctgcccgtggcctctcctcatagcgcgtgggctctctgggagctgggaccatgtcacacggggccagtcacatctgtcacctcccaggggctggtggcaggagtgcccacccacaggcagcgctctggattccgcgcaggagaacagcagtttcttctcagcctgcactttgagtttgcccagcccagctgtgcacgtcagcatcaccagctctgctgagctctgggttttgtggggaatccactcttattcttccgtggcttcgccctgcggggtgactcaggaatttgtagaaatgccaaaaggggggctgtgctctggtagtgtgtgctgtgtgtgctcagcgtgtggttagcgtgtgctcagcgtgtggttaccgtgtgcacagcacgagcttgaactcgctttgtcagaactcggttctttgtggtctgcagaaaccttttctgagcagcagctttagttagagggaagccgtcatcccccttttatgtgcttctgtcatattgagaaacagctacacacaatgacaggcaccttctatattgagtgagtgtcgccggccgtcctagtgctccgctccttagcaccccagaaagcaccgtcccctgctccgagcacccaaggcactccctgtggctctcagcagcggaagtctggcctcggggccgtaacccagagcacccagtgcccagtcggttttctgtgtgtggattctccttgtttctgtgccctcacacctgtaaagcagtgcaggatcggttggaagtgaggaaggaagcgtggtggggccgccctggtttgctgctttctgaagctggcacagcccacgtgccgatctcgtgtcttgtgtctggtgaagcccagttgttttcttgccattctctgggtttctctatggtagcagagtccaggtgtgtgggcggaccagccactgccctgcctctgaacagctgtggagggcttctagaacatgggtgcctcgcgtcaggagatgatgtggcctgcaggactgaccgtttggtaggattcagagaagactcacacaggacgtccaagcagcccgcggagctgtgctgaggttcagggccctgcgtggctcgttttcctcctgcctgggccagaggcaggagatccctcagctggctgggacaggggacttcattaagagccccaggctacctgggaggcggagcttgcagtgagccgagatcgtgccactgcactccagcctgggtgacagagcgagactccgtctcaaaaaaaaaacaaaagagccccaggctagtggggaaaccagacacccaaatcaaacaagcaaaaaccaaggccagtagttgagggtctcaagcacaaaacatactttggctctgacaattttcattgtcatgaagtttgttttgttagacaactatgaagtgttgtgacggtttcaaactaagagcagaaaacaaaactgtttagtacaaaccacagacaataacacagtagctttcccctcacaagttaatgaaagagatgtgctggagagagagaacctgctgaacatgggcacagatcccacagagggggcgtggtgtgtgggaggagactcgacagggtcatggggtcactgctgcccgttgtcgggagataaggctcacagctttatttgataatgttgtctttagcttgtaaatgaacatgcttcccttcccccattgagtgttgagtgttgtgcctgtgggaagcgttatacacacagcctgggacctcagcacagatgcccgttgacaggtgtcccaccggccttccgggttccagcgccaggcctggtgcctgccccaggaggatgagcatttgcattgcctgcaccttatcgtgcccttccacctgctgaagcagctgtgcctgccgctcttgtgaactgcgaacttccccttacctcctctctctggctcgggagctgggtgagtttgaacttggcctcctttgcttttctgtgtgcgaacaagtggttgccttgtttgtttactgaacagagtgtggttgaggcaaaatgctgagatgaaacctaacctaatatgtgtgtattagacggtagcatcattgtcaaaataatacttgttcaaagtccctgaaaaccaaacggacaacttgactacgcttcggccacaggcctgggacgctgtcagaccgagggccgctgagtgcccagtggcagcagagcccagagggtgcttcccccaggaagggaggcagaccagcctattcttactgtgagtcgagcaaagctttgattataaagggccagggatgcaggagcctcgtggagagtgccaccccttcttctcgctctggaatgcgggggctgtgcccctggcctgtgtccgcatcctggggcggtgtcccgtgggcagtgtcctctggctgcagaatgcatgttgcagaattggaccagccctcacgcgtcaggagcgttgggcccacaggcggaggcaccctggcttcttctcggtctcctttctctgaatgaagaattccagtggacggcgggcccgcgcgacccctcccagggagccctcgcttcctgctgatttatttgttatttagtagttaagtttttggggggaaaggagagaattatagttcaacctaaaacacgttttctagctctgtgaattgcctgatttaaagcttggcttggctgggtgcagtggctcacacctgtaatttcaacactttgggaggccaaggtgagtggatcaccggaggtcaggagttggagaccagtctggtcaacatggtgaacccctcgtctctactaacaatacaaaaattagccaggcatggtggtgcgcacctataatcccagctagtcaggaggctgaggcaggagaatcacttgaacccaggaggcggaggttacagtgagcccagatcacactactgtactccagcctgggtgacagaccaagactgcatcttagatagatagatagatagacagagcgggtgagactccatcccagatagataataaagagagagagagaaaggaaaaaaaggtgagagagaggagagagagaaagaaaagaaaagaaggaaaaaagcatggcttacacctgccataaccccaggactttggaccagcctgggcaatacagtgagaccttgtctctaccaaaaaaaaaaaaaaaagctgggtgtggtatcacatgcttgtgggcccagctactcgggaggctgaggccacaggatggcatgagcccaggaagtcgaggctgcagtgagccatgattgcatcactacactccagcctgggcgacacagcaagaccctgtctcaaaaaaacgaaccttggcacctcaccacatttccactgcgcaccagtgtgggaagggtctgagagaggcagcgccgtgtctgccccgggggcggggtctccaggccatgcctgttgtgagcgggggctgtgctgagctcttctctgcacttccccctctcacgggtggttttccaggctcaggattctaaaacccattattcagatgtaccttaagtgtgttgaattttatatgcttctccttggttttacctagtttatttcattgtttagaattttgtgtggtttgggaatccttaaactcatgaagtgaaatagaaagctgagatgctgggcacgtacggaacgttccagcagtgtgggtgagaaaggctggacgtggcctgtctggtgcgctgcctcatgactgaaggtgcagcaggcgtacctggctgggtactggggaggtgttttaaatcctgtcttggccacgtttggatgggacagttgggcactcacgtcctgtgccttgcctttctccagctcggccgcctgtcagtgcaatgctgccccatgtggtgctcaccttccggcgcctgggctgcgccttggcgtcctgccggctggcgcctgcgagacacagaggaagtggtcttctgcacacagccccagtggcccgctcggacaggagcgccccggtgttcacccgtgccctggcctttggggacagaatcgccctggttgaccagcacggccgccacacgtacagggagctttattcccgcagccttcgcctgtcccaggagatctgcaggctctgcgggtgtgtcggcggggacctccgggaggagagggtctccttcctatgcgctaacgatgcctcctacgtcgtggcccagtgggcgtcatggatgagtggcggtgtggcagtccccctctacaggaagcatcccgcggcccagctggagtatgtcatctgcgactcccagagctctgtggtccttgccagccaggagtacctggagctcctgagcccggtggtcaggaagctgggggtcccgctgctgccgctcacaccagccatctacactggagcagtagaggaaccggcagaggtcccggtcccagagcagggatggaggaacaagggcgccatgatcatctacaccagtgggaccacggggaggcccaagggcgtgctgagcacgcaccaaaacatcagggctgtggtgagtgccgcctggcgccgtgatggtttcggtgaccgcacagcactccgggtgggctccgggccagaagcacatcttttcattcgcttttctgtggagtcattcacagttgtcaccatcctgcagacccgtgtgagatacagggacgcaggccctcggggtgtggccgctggcctcactggccacgcaggacggctctgggagcgtccaggtgtagagggattgaggggccgccgagtgaccctgccaggaccatgcggcatgaggtcagaagggaccactcactgcctgtgatgctgaggggcttttcggaggccagccacgtgttaggatgcgtggtcaggaccccacatacacccgggtcttactcgttttttgtgtgtcctgtgacctcagtcacatcttcacagaactctccaaccacatcacttacctggcatttgtacagtgtcataacgtctcctatgcacttgaagcaatcaagtaaaaatgaaaaccaaaagccaggaaggggaaggcaggaagtgtaccccacggagtcgtgggctgacgaggcgccatgagcacacagcaggctgggccctgggtggcctgcgccgtcactcctggaagcggcgcgcctgtcgggagggacgggctctggactcctctgtccttgctgaggggagtgacatgcacatgtgcttctccctggagcctgtgcaggcagcaggcagtgtcctccgtgagattggacagaggattcagtgggccgtgcctcacgctgcttctcagtaagagctgagggtgtgctctggagcctggcctgggttctgtcccggctgagcaggtgacgataattcacgaatcggcagagctctgtgtgggcagtgctgtcacctgagccagtggttgggctgggagtcgattccagcctgaatggcgctgggtccctgagtcccaggcttgggcaggggcggagctctgtcgacctggtgtctgcagagccactccccgaccttctaaattccctaaagcctctggctgtgtgtggcgctgtcctctgtccccagggtaagtgagtgacccagcagatctgctgtggttttgtcgtcatcttgagaggctgctaaaggggagcaacaaagagccagccttctccttccccttcctcagtggggaggcccagagctcctttccgtgagcccgaggtctgtgtgtgctgttgcgggccacagtcttgctcttgctctcagctgtgctctcgtcccctgcaggtgaccgggctggtccacaagtgggcatggaccaaagacgacgtgatcctccacgtgctcccgctgcaccacgtccatggtgtggtcaacgcgctgctctgtcctctctgggtgggagccacctgtgtgatgatgcctgagttcagccctcagcaggtgagttggggtcagggctctcggttgcaccctcagactaggcgcctttcccctgtcggggccagggctctcagccgcgccctcagcctaagcgcctttcgctggttggggtcagggctctcggccgcgccctcagactaggcatcttttcctggtgtgcagtcgcccctatccacaggggacgtgccaatgccgagaccctgggtagcatggaaccctgtacctacgatgctttttgctatacatacgtacctatgataaagcttaatttataagttaggcacagtaagaggttaacaataacagaacagttataaccatgtactgtaatcaagttatgtgaaagtgctctctctcttcaaaataccttccggtactgtgctcgtctgttgtgagactgcagtgggccacgcgtcattgaaaccgtgaatagtgagactggatgagcggaggtgactgtacaggccctgctgcccgcgagctcctgcggctgcggcgaatgctcacgcgcttggtttaaaataatgcgagtttgttcttacatgcttggaggccaggattctgagacgagtcttgcggagctgatgctgggtgtggtagggctgctccgtcaggaggctccagggcaaagtccgttcctgcctcttgcagctctggaggccgcctgtgcccttggctccagctgcttcacgtccagctctgcttctgcaggcacacggccttctctccgtagtcagggctccctcggcttccctttgtgcagcctatgcggatattccaagatcatctcccatcttgaggtccttcgcttcatccacctgcagttcccaccactgcgagaggtgacacattcggggtgtagggcgtagggcgtgaccctttgagctatgatgtggccactgtggcagccctcggttactccagagtactggcccagctggagagctgcttgctgcggagggttactttggagtattggcccagctgaagggctgctgtggagtctctgtctcccctctctgcatggcttcctctgtagcgtctcccttggagcaggcagggagggaaggacgcggtgctggtcacacagagcgctggggtgggagcagtcatcgccgagctgctgcgcgcagccttgcctgtgcagggctgtctccaggcagatcagggatgctgctttggagggaaaggacctgggctcgaggcgggaccctgtgcacagcatcgggcctcgcctgtcagttggggatggcggtggcttttaggagttgctgtggccctgtgtgcattctagctgactgcaggcaagagtcactcaccaggctgcagagggcatgaggggcaggccttgagcccacaggaaggacacggtgtgcgtatgtcacaggtgtggtgaagcagagccctccggtgaggccatggacgtttaccagcctctgcccgtataatgaatatgccttttattcacaggaaaaaaagtttaacacgtgaatgtatggaaaagcccttagaatttggatcgtatcatgatggttctcagcacagaggagcccatctctgaggccagatgcctgggactgggctcttggtctgtgcggggttgttctgcagggcagacgtcccggccagcagaggcacagccctaaagcccagagcacagcagccaccagtggccggccccacactcaccgctcttgccaggactcttcctgtctgaagtctttctggccccatcgaaggctgtgtggagctctgaggcctctgaccgggagctcaggacccaaaccctagtcaggtgtgaatttcgccaggaaggggtccctgcaagcagtcagccctgcccaccttccctctgcttctcctgccgctgagaggcccatcctcttctctgcagggcatccagccccacacggtggctggaggtggagagaaggcagcttttctggccctccacctctctgaccttcagtctcatccccggaaaataaggttggaggccggctcacagtgggcacaaacttggaaaagagaaggggctcttctctagcctccactggaggcaaggtctcacaagagaagccagtatgtagaacagctttgtacgagcaagtgagcctgtttcttcacagatgataacattgggctttagagaaagacctctttaaaatctagcagttactaccgtgccaaagagaggtggctgccagcacacttgcgtgattagccgtcagctccctccactgctcttcaggacgcctgtagccacagagcctccctgagggccccgtcgccagggtcacctcctgaagagcctccctgagggccccgtcgccagggtcaccccctgaagagcctccctgagggccccgtctccctaacacattccacattcttgttggcttcagtccttatttttcacagacatctcagccctgaccccagctgcgacacagcagtctgttaagatggcagacactgcggctgcctcatctgcgtggtccatcccggagacatctgcctggcgctctgctccaggccttcctggctcccctggtagggatctggctcagtgacccgaccctccttgcggctctctctggggtgcgccctgcatggacacagctgtccttggtgaacgtctgctgagtcaaagtggttttgctgcagtgagttccccgtgagtgcactgtgtgggtggtgcagcgcctggtgtgtagggaacttccatgcctttgctgtgtctctgggggctcctctgacggggcagctccctcctctccgccttaagctcctcctttcctttggcggtcagctctgtccagggtgtcagtttctgtgcctgtgactgggccccctcaacctgccccaccttggcctctgctccttggcagcctggccctgaacctctgttgggggctgcccgggcgctgacggtggctggtctaccatggtcacttgggcagaggcagcaacggccattgtcgtggaccgtgccagggcgagatgcagctggcaggggcagaggcagaacatctcccagggagctgagggcaggttggttccatcgtcccggagggcaggttggttccatcctcccaagtaaagagtgtgttaccctcagggcgagaggcaggtgggtgtgggtgctggcgcaggccagctgtcaaggatctgggctttctggtcttgctgcttctccagcactgcatgaatgacaccacctggccctttccagtgcccacaggcacacggcttgggagctgctgctgcggcgtctctgcccaggggcatctgccagggggtccctgccttggggtctgtgtcccaagggcgtctgcccagggatttctgctccgagagtgtctaccctggggtctctgcctggggatctgctgtcatcttccagacactgcagactggctcattaatggacacgggaaagcctcagaccttcaacggacacgggaaagcctcagaccttcaccgtttttgacacttacttgggatttttctttaaactatgctgtgaaaacttaattttttttttttttgagatggagtctcgcactgttagccgggctggagtgcagtggcacgatctcggctcactgcaacctccgcctcctgggttcaagcgattctcctgcctcagcctcctgagtagctgggattacaggcacctgccaccacagccagctaattttttgtatttttagtagagacggggtttcactatgttggccaggctggtctagaactccggacctcatgatccacctgcctcagcctcccaaagtgctgggattacagacgtaagccactatgcccagctgaaaacttaatatttaaacaaatttgatgctgtggctacaaaggattgcaactcttttccataaactccaagtttcagggttttccaactttaggaatttctatgtgtaaaatccagctgtcagcgttattgaactttgggattttgtctaagattgtgtggaagaatgtgtaggatacaagtgtggggtgaccagacacctgcggtggtgctgaacgatctcagacgcggtgtcttcaagtcatcctgcacagagggccgtgggtgtcagtgcctgcaggtgacggatggggttgggggagaggaggaggatgccggaagatggatgtgcagccacagcctctggagatcaaagtcaccactgacgagacagccagaggctcagatcagtcactcgtctccaacagcactgccctggccgacttcctcaggatcgcagcatggactcaggagggctgccatctggcagggtctgtgctgtggcagctcaggttagagcaacaggcctgctcctgccacctcagaagcacttgctagttagtcaaatgttatggcgcccttcagggggcctccaggtctttcacgtcttggaagtgtggcaacacattgggatgtgctggaggaagaaggtcaccctcggctctcagtgcccttctttagggcagcagctgccctctgaagatttggatgaattccaagaaagaccgtccttcgtgtctttcacctccgcgcctgctccctgcccctcagccttgtcccgttgcgtgcatgctgtccccgcctcagcaccatcctgctacacgcatgctctccccacctcggcaccatcctgctacacgcgtgctctccccgcctcggcaccatcctgctacacgcgtgctccgttttccgtgcctcagtgtcacgtttgtgtttctggttcactgtgctgttgatctgtgtgttacatcaaatgcagtttgttctttttacgttgctgtgttgtatttcctggtgtgcagaagccacagtgcgcttatccattctgctcttgaaggacttgagattgttttcagtttgtggctattagaagtcacggttgctatgaacattctcacacagatgtccctgtggacagttcccttggatccgcaactcccagtgccggctcacaggctagatgtatgtttcatttcagtggaaactgcggaagagttctcaaacgtggctgcatgtttcacacaccccagccccaaatgtggctgcatgtttcatacgcccccagccccattctgctggtaccaatttactgtattagtccgtgtgcacactactgataaagacatacccaagacagggaagaaaaagaggtttaattggactcgcagttccacatggctggggaggcctcagaatcatggtgggaggcaaaaggcacttcttacatggcggtggcaagagaaaatgaggaagaagcaaaagcggaaacccttgataaacccatcagatctcatgagacttattcactatcatgagaatagcacaggaaagaccggcccccataattcaattacctccccctgggcacctcccacaacacgtgggaattctgggagatacagttcaagttgagatttgggtggggatgccatcaaaccatatcaggagtccttaaatttgttaaattccccacatgtctcctcttctggtgccttcatttgtccctacagaggttctccgcgaagcactgtgcttcccccaacttgtttcccttcagcctggagaacttcttttcaatagttcttgtagtgcagctttgctgacaacaaatccctcaattttgtttcactgaaaatgtttttattgcaccttcccttttcaaaaacagctctatcgagatacagttcacacaccgcaaaattcattattgtaaattttgaattaagtagccattacctcaaaccagtgtccatttccccccattcccagcccctggcaaccacgaatctgctttctgcctctaggatttccttgtttgagatggcagcgtgtgcaaatggggcgtgtcacactcagtcttttattccagcttctttcacttgcaggatggttctgagtttcatccatgttctactgtgtgtattaataacttgttcctgaatagtacttcatcatatggatataccacattttcctcatccattcaccatctgatgggcatttggactgtttcagtttggagctattatgaataatgctgctatgaacatttacatataaatctctgtagacattcattcatcttacatagacacagagggatagaattgatgggttgtatggtgactttctgtttaatgttttaagaaactgtcaaactggccgggcacggtggctcacacctgaaatcctagcactttgggaggccgaggcaggtggatcacttgaggtcaggagtttgagaccagcctgaccaacagggtgaaaccctgtctatactaaaaatacaaaattagccaggcaccgtggttcacacctgtaatcccagctactcgggaggctgaggtaggagaattgcttgaacccagggggcggcgattgcagtgagccaagatcacaccactgcactccagcctgggcaacagagcaagactgtctcaaaaaaaaaaaaaaaaaaaaagaaaagaaaagaaactggcaaactgttttccaaaatggctgtgttgctgtacgttctcatcagcagcgtatgagagttttcatttctttacgtcctgccaacacttgtcactggcttcagtttgcgtttccctaatgactactgatgttaagcttttttttttttttttttttttttttgagatggagtctcactctgtcgctcaggctggagtgcagtggctcagtctcggctcactgcaatctccgcctcctgggttcaagcgcttctcctgcctcagccatctcagcagctgggattacaggcgcacagctccaggtccagctaattttttgtatttttatagagaccaggtttcaccgtgttggccaggctggtcttgaactcctgacctcaagtaacctgcctgcctcagcctcccaaaatgctgtgattatagccgtgagcccgccgcacccggccagatgttgagcattttttgtgtttatttttacttttttccttttaaattatttttgcagaaacagagcctccctatgttgcccaggctggcctcacactcctgagctcaagggatcctcccgcctcagcctcccaaagtgccgggattacgggcatgagcactgcacccagtgctgttttttacgttcttgtttgcatccgtatgtaatctttggtgaactgtctaatgaaatctttggccatttttaaattgggctgtttgtcttcttactgagttgtaagagttctatgtgtattccggatacgagtctcttttcagatgtacggtttacaaatatttcctccaactgcagcttgtctttttattttcttaatgtgtcttttggagcacacattaattttgatgaaattcattttataaaaaaaattttaaaaataaattcattttatcaatttttaaactttatagattgtgcttttggtatctcatctgagaagtctttgccaaaccacaggtcatgtcatgaagatattcccttttgttttttcttagaagttttctagttttagctcatacgtggaggtttctgacccactttgggttaattttgcatatggtgtgaggtagggtctaggagtcaccttctgcatggagatattcagtgtgtcagtgccatttgtgagaaagattatccttttgtccttttccctattggggacttggtttctttgccaagaatcacttgaccagatatctgtgcattcgtttatttctggactctccattgtgttttgtgggtctcttgtctaatcttacacagcatcacactgtgttcgttacttctggtttacgtcagttttggagttgggaactgtgtgttctcacctttaatctgccttttgaaatttattttggatcttctgggtcctttgccttttcgtgtaaaacgtaggataagtgtatcaatttctgcaaaataaagcttgccggaattttgggaagattgctttgaagctggagctcagtgtgggaagaactgccatcttcacaacatggagtgttcccgtctgcgagcctggcctctctccacccgcttatctgttcccctccctccctcgatggcagtgttgtgggtgctgctccgcggtgctgctgtctcccgcactctggtcgcctgtgtctttgctttcccgtctgtgggtcagcctagatcacccccgttgactgtgtctgacttttttcctcttttctgctgcgtcttgtttgttattaggtctattgaatgaattcattttggatcttgtgtttttcagttttatgattttttgcagttccacttctctttgcaattctccatcttccccacgttgttcatcttttctttgaaattccttaatctgcttattgcagtgatttgaagggccttgtctggtgattcggacgtttggatttcctgagacttcttcccttcagttggggatcacatctttgtgtccttacatgctttgtgactttgaagggttccagtctttgtctttgaaagaatgatattatttcttccccggagattcctgcctttctctgccaggcagctgcggtgaggcactcgtcactgcagtccagtgaggagatgagatgggctggggctggactgtggcatcggcatccgtcgaccccagtttcaacgccgtgtgggcgagatctgtcctgtgtgtcctgggcctcccttaggtgctgaccccacagcacgaagagtgccctcctccctccgccacacccttcggtgctccgtgtggaacaccgcgggtagagagggccatggaaggaatgcggctcaccagctcttcctgaagctttatgggcgacgcgagaacccgctaacgagtgaggaacttaaaacgtatttatatgtaagcaagaaatgtttattatggagtaaaatataaaattcacatgactcttttaaataaaagacttcacccgttcgctagtcactgcatgcctgtccatactgggaagcatgctgacttcaggtctgcgggcagccaggccctcctgccagcttccccaaggtgtacatccgccctctctgtgtagctggaagagcctgaccactcacgtctctccaggccacagatcccgaagcccttttctagctctgttcacgattgctcttcccctcacaggccagacgcagctgtcccgcgcaacatggcttctgtgggaaggggtcagagtttgaggcaccccttttagaagggaggcgctgcagactcttgaatgtgaaccatgagaacgctgtgcctggagccaggagcctccgccacgggccccagtgcctgctcatcttcctaccgagtgcttcctttccttcgtaggtttgggaaaagttcttaagttctgaaacgccgcggatcaatgtctttatggcagtgcctacaatatacaccaagctgatggagtactacgacaggcattttacccagccgcacgcccaggatttcttgcgtgcagtttgtgaagaaaaaattaggtaagtgaaaagagcccactttctcgttcagaaagtcttaaagatcaacagatacgacttatttctaataaatcactcctactaagttctgggaagcagtgctttccatttcctttcaatgttccctctctctctacccgtctccgtctctacctctctaactgtctctctctctctctacccgtctgtatgtatatctgtaatctcttccacgtcgatagctgcctggattctgtatcgctctctctgtcacactctgtctctctatctctctctgtctctctttgtctctctctctccatctctccatctatctgtcttctctgtctctcttgtcagactctccatctctgtcttctctctgtctctctccatcgctcttcatctgtctctccgtcttctctttctctatctctcctgtctctccatctgtctctatctctccatctgtctttgtctccgtctgtctgtctgctctctctcctgtccgtctctctctctctctgtcatggcgtctgaaggacaagggtgaggacagtgagctgacccgcttgctcctgcttcatctgcccacatgtcccacggcgcctgcctctcctatgcagtctctctgccttcgtgggcagccctgtgaggcctcctgcctggggcacgttctgctgcttttcctctcagccccgctcctcccctcccagctccctggataaacccctccctcccaggacaagctggtcttttgggccacccaggggcgtgtttgctctgcactctcccatgaacctgcaggcgtgggaacgtttcttttccctcgtggctgttgaggtgtggttcactaactggaaacgcacacgtgtggctcagtgagtcttcacacgcatcacaggcccgcacctccagcagagtcgtgggtggggtattttttctttttgtgagagggaggggtggcgtggagggtgcactgcaggaactgaaggctccactgccatccagtttccagtgggatgtgtgtgtctgtggctgccgcgcgctcctcccagtccccaggaagtgcacagggaagcggcacctttgttcctggagagaattccgggttgtccaaggcacatgtctgaaccgcttcgctctctttgccgttcccttgccccttttctgtgaggccaccggagcccatggttttgctgctgctactgctgggataccctggggctgggcaggccccaagctgagcagggtgagcacaacgttttaccaaatctaaggaaccaagggcaagaacgaggtcagtgaaggagaggatcaggtgatttctggggtgacagaggcaatgagacctcggccatctggatctcccagcgggggtcctgtcagtggtgcctcctcgtaaagcaggggcagcagcagggaccactccgctcagaccgcaaacaaaagcgccttccctactgcccgtgaggctgcgggaaatgctgtgtgagagcgcggggactcggagttctcagggcccgtgttctcctgccaagcctgagctgaccctgtgggccaagatggctgcagttctgcgggtggttctgagccccttgggtgtgcccggccccaccccttgggtgccgcggccattcacccatgtccgcgttctgctgcagagcctgcaagctgagccggctgtagtccccggatgtgcctggccgcagcctgcagcgccgtggctgttcacccgtgatcagctccgtggtcggcagctgcacggtcactgctgttcttgagcgtggttgtgaacagcgcaggaactttgcaggggacaccgcggaccctaagcacattgtttaccctcattagctgttggacctgcttccttctaaaatacacccaacagatcgttttcaaaaaacaaagtcacgccgtagcgcagactgcagcgttggtcccgggtgtcgcacagtggtgctgtacccacggcctggggctcctgcactcgtgaaggagctgccacttttgcaagcaagggccgcctcctgaggggctaaacctgccacctttgcacgcgagagccacgtcccaaggggctaaacctgcctttggttgtgccgcgtaggctgatggtctcaggctcagctgccctgcccctcccagtgctggagaagtggaagaacatcacgggccacaccctgctggagcggtatggcatgaccgagatcggcatggctctgtccgggcccctgaccactgccgtgcgcctgccaggtacgagcacttcccacagctgcgttcctcttccactgtgctctgagccccccaaggtgggccagtctcgaaccacccacattcggactgaagggcggcatggaggatgctcccccgtgggacaggccactcggccaggagagcactcaggatgcactgcgacctgtcccctctgggtagatcagccttctcccaagtctcagtcgggtggatgggggaggtgtctgtgctggcccctggctgtatgactggggagacaatgggaagaacagcaatgcctggaatgcaggcgtcagtgcatgtctcagaggaaggcggggggccatgctgttggctccagaccacatcagcagtggtggcagcctccgtctgtctggagtccgggtgccacacagcgccagcagcagtgccaggagaggtgggtgtggtgggcagggtgggatgagtcaagcacctgtcttccttctctagatgtgggctcctgataccgggcccctcttgtccagccttccctaacacatcccattctgactttcatctgacccaaccatttgagccctgggtcctccgctgggacttctgggaacagagcccacagctggggggccaccctgctgctttctgcgcagcccttccagtctgtctagagtagaagagagatctcagtgcagacttaaagtgagaccatcccgcacatctgtctgtgcagctgcttacctgcagacccagtaaaaattcacccctctggcgtgcagctctgtgtgtcttaagaaacatcatcacagtcaaaatagagaagggttcctcgcctcagaaactcccttcctagtgctcagcacctcctccacccccgaggcctggccccttgttcctgtttctcttcttgtggttttgctttttctgggaggccacgtggctaaatcctgcaggacgtggcctctgagcctgtctgcttccgcccggcttccgcccacagtcaactgcctgtgctgtgtgcgtcagagcccgcgcctttccctgctgagtggcatccgtggtgtgggtgcggcaccgcttgtgaccctgttttaagcaatgacacgtgagatgttatcaacatttgtgtgcaggtttctgtgcgaacgtggttttttatttcacctgggcagatacctaggagagagattgctgtgttgtctgaagctttcaagctgttctccagagcggctacaccatccccttccccctgcaatgggtgggaggtcacgagcacctgctgctccagcgggcggtggtggtgtctcgttgagttcatgattctctcatgatgggtggcgttgagcacctcttcctgttcgtgtcattccgttttcaactggggcctttgttttcttgagttttgagagcttttaaaattcgggacccaagtgtcagctgtgcgattttaaatatcatctcccagcttgtggtttgtcttcccattcacctaacagcgtctttaaaatcaggagttttaggttttggcccggtttatcaatttgttttgtgaattgtctgatgtcatatctaataaatccttgcgtagcccaaagtcacagagaatagtttcagctcttacgtttgggaccatgatccattttgagttaatgtttgtacatagtgcgagatacggaccacagttcttttttagtgtgtgaatgtctaactttttagcactgttcgttgaaaagactcccttctccatcgaacagccctttggatctttgttgaaagtccgtcgactcctgaggggtcggctcctgggctctgctctgtcccattgctttccgtgtgccctttggctcattccatgcctgcttggttcctgggactctagggtaagcgtggacatgggggttcaggcccaggcagggaccagctggtgccaggcagcgatacggtgctggggcctgcaaggtgagtgtgagggctggctggctgctgggctgggaggaggagagactgtaggctcacgcccctttgctgggcctggggagccatgggggctgttaagtgtattctgagtgtaaagtctcggtttggctggggcatcctgagcagaatgacagggccatggcagcgagatcctcagctgccgtgcagagctgccagtggggtggccgcacagagtgcagtgcctgctgcaacagtgcccagggcagtgggcgggtgggggcatgttgtgaaaagaagtcagtgtgagtgatgagaaatacatcctagtctcagaccccaggaaaccgccgtcagtgctggtggcccctgccctgggccggctcccgcgttagtctcagaccccaggaaacctccacctccgtcagtgctagcggcccctgctctgggctgactcgcgcatctccacgatggctgcggcaccagctgtttcttcggtggctaaagctctctggtggaaataagatggggaccttgaaatcaaatgtgactggtctgttgagtctctgtccttatcgttgtccttcttagtaggatgtgctggttttgtccagtgccaccggccacagtcaccacgtaatatggacggaatgagcaaagcccggctcgctgaggctgcaggctgcaggcaagtgaggactgaaagggtaacgggctctgggctttgtcctctctttgttccggacatgtgagcaggacaagttctgtgtattcagaatctgtctgcacagtttgtagttcatgatgactgttcatccacagcattgctttgtgggcgtcctctcttttgatcttctcgaaacagcccctgcgatggggtcatattttgcactcacatacaagaacccatgagcctgcccacggtcacgcggctggtgagtgatgcacttcccaggagcacggtgacctcttcaatggccctcactagagaagatggacagtgcccccctagccttttttactggaacagatacaaggctgagaagctgaaatcaggagcagcccagggaccactgtctacaccgagggagtcatgagcagcccagggaccactgtctacacccagggagtcaggagcagcccggggactgctgtctacaccgaggatgtcaggagcagcccagggaccactgtctacactgagagcgtcaggagcagcccagggaccgccgtccacaccaagagcgccaaggagcagcccagggaccgccgtccacaccgagggcgccaaggagcagatagtagcccagagacccaggggaggctcagcttccccacgctggaatcagaactcctaggcgaacaggaaggagccccagacagatggcacagggagaggagtccccggctgaggagggggatccagagaccctgaagcttcagggttattgggcaagaaacctgagtgcaccaatccccgagtcttcagctaccgacggcaggttccctcgggtgccggggatgctccctcttctctaaggcagagcccacagtaggttccctcaggcgccaaggacattccctcttctctaaggcagagcccacagcaggttccctcaggcgccagggacgttccctcttctctaaggcagagcccacggcaggttccctcgggcgccggggacgctctctcttctctaaggcagagcccacggcagattccctcgggcgccggggacgctctctcttctctaaggcagagcctgacggcaggttccctcgggcgccagggatgttccctcttctctaaggcagagcatacggcagtttccctggggcgccggggacgctccctcttctctaaggcagaatcaaatatctgtgattttatccttgcctttaaatcaccagcagtgtgagttctttggtttggaaaaaagtaagtaaagtcacctcagcattaaatccaatatgccccacaaaaactccaaaatgcagcctcctgagccatgtttctagagggcacggtggaggagagctttcctcactctcaggctctaacccccaccctggtggccatggccttgacccttgggtcggctccagccacaggctctgagctcatgcttggcctcgctgctcagtgcactgtccgtgctcggaagagagagaagctgggtggagggtgagctctgtcgtgtgttatggttacaggcctgctccgtgcggttcctgtggagggagatgaataattcatggccgaccactgctgggcctcgtcacactctaattggaggttgagctcagaggtgctcacggctcctgggccactctgtggcattgacagggagctccagggcctcattggcggtttccgttccctgggtcccagtccccagtcagagttatcagggaggggctggctgacagcgattttagaggtgggctgtggcaggaaggcagtgccccccacctgcctgcagctgcgctcccatctacattggcctttgcggggccagcctctgtccactctcttgagctctcatgtccacactgtcacatgcccggggcacagcgagcggcacctggagtgtggggacccctccctcgagctctcacgggtggcacctggagtgtgggggcccctgcctcaagctttcatgggtggcacctggagtgtgggggcccctccctgaagctctcacgggcggcacctggagtgtgggggccactccttgagctctcatggacaataccactgcttggctgctgcagaatccagacaccatcccagagcctcttcagcctctgcagatggtgtgggacggccacacggcctccccacctgcggcccccgcccctaccccagccgtgccgtgtccttgcgctgcgtccccgccccagtagaggcatcaccaggaagaggcgaaaggccgcctgtgatggtcctcttcttatgaaacgcccagaacagaaaaaccacggacgcggacagcagacctggtgccaggtctggggagggagggtgtggcggtcgtgggctgtgcgggagttctgactaggggaagtggggggctgtgcaatgtgtgtgcggaacaccgccgtgccgcgcactgaaatgggaagtcatgtgttatgcgggtttcacccccatttaaaaatcttcagaagcaaaacataaaggaggagaaaggatggaagaaagggggctgaagctggccccgccacaccccccatagtggtgacacgggtttctgaccagagtggaggttcggggcgtctgcatacctggaaccacagagaactcccgaggtgacactccgcacaccacactagcccggcttcgcctgcaggaccccaggtgtggacaggcccagcaggatcagcaagaccgagccgggcaccgacagcccctcaccaagcgtctggaggccgggacgccccatggattgcagagttcactgcactgaccctcgatgctgacccttgaagtgccggaaatctcagcgtggactcagacatgataagcgttcaggcactcccctgacgcaggccagggcaaaggcctcacgccccgggatagacaggaagtcccacgtctgctctgcccctaggtcatgcccgtgctgacgccacatcgccagggccgcactccatgagcagcctctgccgtcccaccagcaacctaaaccacaggcagagcgaggctgcggcagccctgcgtgtgccggcgggacacgtctcgccacctgggctctgcccccaccccggccagtgtaagatatgattttagccacgttgagactgtgcaggtgggatggatacactgagcaaatcatgggtgtctaataaatgagccagtacaaagtgtggtccacctgccatgcagagttcaggacagcccctcctggggacatagggcagatcctgccttagcccgtcgtgtgccgggcacacacaggtcccctcatcgtggacagccccggggccatcagggcaaggcgccagccctccctggccagcaagtgtgtaaaagtgggaatgacaccagaatctgtgggcagctgtgaggctttgggaagtaactgggaaagtgatgtatgaggggcccagggcaggccaggcccagcgtgccacgtgagtgcctgctgtgccacatggccatcactgtggcatcggctgggcctgagcacaccgtgcttgccagccacgtatcgtgtggcttttcacctgctggtgcctacaccatcttctctctgggtcacagggcacgtcgctccctccacacagactcccgcacgtggcacacgggagctcagcgggatccgagctcagtgtgtgcttctctcctccaggttcctctcactccagcctccccttcagtgtttctcctctcctgtaggttccgtggggaccccactgcctggagtacaggtgcgcattgtctcagaaaacccacagagggaagcctgctcctacaccatccacgcagagggagacgagagggggaccaaggtaagccactctgctcttggcaggtgggcggccgtgtgtccagtctaggccccccagggtggttacactggtgcatctttcccctggaggcagactcccctccacgcaggggaccagccccctggacactgcaggtgctggctggtgttgcaagggcactggctggtgttctgggccctgcctgctgcgtgtccgtctgtgcgttcacagagcagtgggcagagggagcccagggcggaacgccaaagggactcacacccgggcacacagctcctcccaggggccctgtccacggggacaggctgacgtgggccatgatggccttggctaagcggaagagataaagagcagaggccgttgttgttgatgggaatctggttagaaatatgaactggcctgaccctggcacccgtcctgaggggacgctgaccacaggcccccatagtaggtgtggggagattcacggggccctgcacgcggaggtgggtgcctgtgcagtgctctgtggctgcctccttgtcttgtgcgttattctaaagctgacaagggtgaacaagaacaaaggacattgtctcatttctgtgaggattttaacatgagagtctgctcatcacacgtgaactcatcacagagaaaggtttagggattatggggaaatggaatcttgatttaaaaggaaattattttctctgaagccagtatccacacctgataccacacatgattgactgtgttgccctgaggttttcaaagatcgagggatcctgagtctcatctctgtgcatttccttctctgtgacaccatcttggccctcacgggcacaactgagctccctgtgcagaggctgaggggccgtgggccttgctctcgtgagtgaacagccacacgccctccttgtaccttggtttccacacatgaccacgtgagggttggagcgatggtcgtggttggacgttttagctccagcaaccaagtaggatgtgggtggctttcagtgtcattaaatgacactgaaaggtgcagtggccgcaccttgtgtggagggccacacggcgtgtcccgcctggcctgggccccccgcagtgggctgttatcccccgtggccctgaagtgggtattctgtttccccgtggaaacctctcacctggggccacctgcagtggccgcaccttgtgtggagggccgcacagtgtgtcccgcctggcctgggccacccgcagtgggctgttatcccccgtggccctgaagtgggtattctgtttccccatggaaacctctcacctggggccacctgcagtggccgcaccttgtgtggagggccgcacagtgtgtcccgcctggcctgggccccccgcagtgggctgttatccctgtggcccccacagagccatggggcaacttgctgaaacccacctgggtggctgccccttgctatacccacctcccctgccctctgtagggccccagcccatgctgttgtcctgacatgcctctcctgggattcctgcctctgccctgctggtactaggctgctggccacaccccacatctcaggttcctgaatacaccggcccttcctggctctcaagtctgtgccctgcagtgcccctgcccccaactcgaggacctcccagctcagccagttccaaccctgtctgcagggacggggctcagcctgtgcctgggttggggacaccatctagtcagaaatgtccccagcagagagcagaacgtgagtggcgtgtggaggagtgagacgccccgtggctgtgcagccctctccaggtgtcagtcagctgacactcctgcctctgagcacctgctctgccggaaatggcagaaatgttgccagagaaaggggcggagcgggggtggggagcatttctgtcttaaattaaaacaaaacttaactgcttcacacctgcattggctgccgcgccacctgattgctcctgcctgagtttctttaattatttgtgtctgctggtttcttccctgaagcagtcttgaaatagaagcagcagcctcagctacctgggcaccctgacagtcagagacaccgcacaggggcctctgcgacaggcatgcaggcagaccctgcaaggtgaagccgcacagatgctctggggctgcttaaatctcagcgtacggggggtttgcatctgctgacagcaggcccgggaacatttccagttcagccaaggagtcggtgcagcaggtggagtacagctgccctgcggggcctggctccaccaggggccaagacccttcgtggggaggagcacagcctgagggcctcagggtttgtgccctccgacacctgagattcagggctcccagaggggtgggtgggcgccccaggacaaccaggtgatgatgggcgctgtgaactctgaaaagccccagcatcagagacctgctgctctctcatgtgaagggactccccaccccacgctcacactcgcagacgcacttggtactttcatctgagtctcacgcagtagcccttctctccacagcatcccagaacccgagggtgcccctcactaccacggtcccggatccacgtggctcaagtgaggctgtggccgacagctgggctgtccgatccactcttgtctgtgccgaggcgtgggtcccggccagcgtccctccccagaaggtctccctcaggactagtcatgagaatggccatccctaggcctgtggagtgactcatgactgttcctgggcagatgatcagccaggccttcagagctgaattaagaggcttggtgtcatatttgtcaggaaacagaaagtacctgcagaaaggaatgtgccctgtggggatgggaggacaccttcccaggatcatccccggggccagagtatctggaccctccccaggtggcagctggcctgccaggcccagggctcagcctcctccatcacctcgctgaggggctggctcctaccactccctcacatcctgtgacatatcacaggtaccacacacacatgcagtgcgcgcacgggtatcacagatacacgcagtgtgcacacggatagcacacgtagtacgcatgggtatcacatgcagtgcacacacaggtatcacacgcacgcagtgtgcacactggtatcacacacatgcagtgcatgaacgggtatcacacacatgcctagtgtgcgcatgggtatcacacacatgcctagtgtgcgcatgggtatcacacacatgcagtgtccacacaagtatcacacacacatacacattgtgtgtgcacagctgttacacacataaatacagaaaaaaagacctgatggaaaccccagaagtcaatatggctgagctccaggccggactccctgacgatgtcataggacgagggggcgcgtgtgcacactgcatatatgtgtgtgtgagacccgtttgcacactacatgtatgtgtgtgatacccctgtgcacactgcatgtgtgtgatacctgtgtgtgcactgctcatgtgtgtgttacccgtgcgtgcactgtgcgtatgtgtgtgatacccgtgcgtactctgcgcatgtgtgatacccgtgcacacactgagtgtgtgttacctgtgcacatgctgcatgtatgtgtgtgtgttacccatctgctcactgtatgtatgtgtgtgagatacccatgcgcacactgtgtgtgtgatacccatgcatgcactgcgtgtatgtgtgtgatacctgtgcacataccatgtgtatgtgataactgtgcacgcactgcgtgtgtcacatatgcacacactgcatgtgtgtgtgatacccatgtgcgcactgcatatacgtgtgtgttacctgtgtgcaacactgcatgtgtatgtgacacctgtgcgcacactgcatgtgtgtgtgatatttgttgaaaagactaccctttctgcattgcattgccattgccactttgccaaagattaattggacatatttgagagggtctacatacaggttatctgttctgttcccttgatctatgtttccattcctctaccgacaccacattatcttgactgttgtggttttatagtaggtcttaacaattgtagtgtgatttcaccagctttattctttctcagagttgttttggtgcacatattaattttagaattagcttgtctagccgggcctggtggctcacacctgtaatcccaacactttgggaggccaaggtgggcagatcacctgaggtcaggagttcaagaccagcctgaccaagatgatgaaacccgtctctactaaaaatacaaaaattagccaggcatggtagtgggtgcctgtaatcccagctacttgggaggctgaggcaagagaatcacttgaaaccagaaggcggagtttgcactgagccgagatcacgccactgcactccagcctgggcaacaagagcaaaactctgtctcaaaaaaaaaaaaaaaagaattagcttgtctatatctacaaaaagttcttttgaggtcttgaatggaaagccaggtgtagtggctcatgcctgtattcccagcattttgggaggccaaggcaggctaatcaacttgagaccaggagctcaagaccagcctggccaacatggtaaaaccctgtctctactgaaaatacagttagccaggtgtggtggcacacgcctgtaatcccagctactcgggaggctgagtcacaagaattgtttgagcctgggaggtggaggttgaagtgagccaagactgcaccactgcactccagcctgggcaacagagtgagactgcctcaaaaaaaaaaagagagagagagagagagagatgttgattggaatttagccattctgatcggggagatcacttgggggagaattaacaattactatgctgagtcttccaatccatgaacatggtatgtctctccatttacttagatccgtgaacacggtgtgtctctccgtttacttagatccgtgaacacagtgtgtctctccgtttacttagatccgtgaacctggtgtgtctctccatttacgtagatccgtgaacacggtatgtctctccatttacttagatccgcaaacacggtatatctctccatttacttagatccgtgaacacggtatgtttctccatttacatagatctgtgaacacggtctgtctctccatttacttagatcagtgaacatggtgtgtctctccatttagatatactttggtttcttctgtgttgtattcagcatatagatgctgtacttgtgttaaatttataagtaaatgtttcttcttttctttattcctcctatttcttctcctccttttcctctcctttttaaactattgtaagtatggcaggtgggtatggggggagagttgtttgtttttttgagacagaatcttgtcctttcgcccaggctggagtgtagtggtacgatctcagctcactgcaacctctacttcctgggtctaagtgattctcatgcctcagcctccccagtagctgggattacagatgtgtgccaccacacctggctgattgttgtatttttaatagaggcagggtttcaccatgttggccaggctggtctcaaactcctgacctcaagtgatctgcccgcctcggcctcccaagatgctgagattacaggcatgagcctctgcacacagtcacgtttttgttgctgttgttagttttcaactgttcattgctagtaggtagaaatagaattgatttttgtgtgttggcctcaaatactttagttgttaccttgctaaattaacttactagttttaggagattttaatagacttcttgggaatttctacaaatacaatcatgttttctgcaaatacaaacagttttatttcttcctttccaacctgtatgaccaaagccctgactaggacttccaatacgatactgaacagaagcagtccgagtggaccttcttatttctgatcttagggaaaggattcagtctttcagcaagtgtgttagttactggctttttgcagattccattctatctataatgtgcttagactttttatcactaaatgtatgttgaatattttcaaaaagcttttcggtattgatggacttttctttattaggctgttaatatggtagattacattgaaccaagctttcattcccaggacaaaccccacttggtcctggtgggtcatttttttatatatagtactggatttgatttgctagcatattgctgagtatttttgcatctgtattcataagaaattttggtctgtagtttcccatttttgtactttctttgggttgtgtttgagggtgatgctggcctcattaaatgagttgggaagtgttctctcctctttttttttctggaagagattgtgtagaattggtattatttcttctttcaatgattggtggaattcaccaatgaaatcatctgggcctagaggttttcttttctattattattattttgtgtgtgggggataaggtctcgttctgtcacgcaggctggagtgcagtggtgcaatcatagctcactggagccttgaactcctgggctcaagtgatcctgcgtcagcctcccaagtagctgggaccacaggcatgtgccaacatgcccagctaattttttatttttatttttgtagagttgggggtctcactatattgcccaggctgatcttgaactcctggcctcaagtgattctccctcctcgcctcccaaagtgctagggttacaggtgtgagccactgtgccctaccaacgtttcttttttgaaagaaaaagaactatgaattcaatttctttagtgcttataggactgttcaggtcatctgttgcatcttgggtgatttttggtacatatcatttttgaggaattggttcatttaatctgttaagtttctttatgtagagtttcccttcaggccacgaaaccattaaaaggttgattaaaaggttaataagggaattcccatcttaaccttttaatggtttcagggcctgaagttatgtggctcccattcctcatgttggtaatttgtgtcttctgtttcttttttctttgttatccttgctagaagtttatctgttttatggctcttttttcaaagaagtcacttttggatacattgatttttctttactgtttttctgttttcagtttcactagttcttggtttcttctacttgcttctggcttttctctttttctagttgcttaaggtgaagctttagattattgatttgagacctttcctctttataatgtgtacatttaatgacgtacgttgcccttaagcattgctttagctgcatccccaaatttatatataatatatatatatttttttcttttttctttttttttttttgagacggagtttcgctctcgttgcccaggctggagtgcaatggcatgatcttggctcactgcaacctcagcctcccaggttcaagcaattctcctgcctcagcctcctgagtagctgggagtataggcatgcgccaccacgcccagctaattttttgtatttagtacagatggggtttcaccatgttggtcaggctggtttcgaactcctgacctcaagtgatccacccacctcggcttcccaaagtgctgagattacaggcatgagccaccacgcctgacctaaattttgatatatttttattttcatttagttcaaaatatttttaatgttccttaagacttcctctttgacttgtggattatttagaagtatagcacatattttccaaatagttggatatttttccattatctttctgttactgatttctagtttaagtccattacagtcaaaagacgcacttggtatatttcaattcttttaaatttgttaagttgtgttttgtggcccagaatgtggtttcttttcaggaatgttctggtgtacttgaaaagagtatatattctgcccaggcgcagtggctcacacctgtaatcccaacactttgggaggccaaggcaggagaatcactgcccaggagtttgagcccagcctgagcaacatagtgagaccccatctctacaaaaagttggaaaaaaaaaaatagctgggcatggtgttacatgcctttggtcccagctacacaggaggccgaggcgggaagatcgcctgaatctgggagtttgaggctgcagtgagctgtgatgatgccaccgcactccagcctgacagagcaagagtgtgtgtcctgctcgttttaggaaatgtctgttctgtaaattagatgaaggtgtttgatcgtgttgttcagttcttctatatccttgctggttttctcaccacttgttctgttactaagtgaggggttgaattttccaactataactgcctgtttctgctttcagtttttgcttcatatattttgaaagtctgttgtttggtacattcacatttataatgattgtgtcttattggtgaattgactcttattaacatttaatgctctggtaatgctctttgctcttaagtttactttgatattattatagctattttaatttctcggttggagtttgcatggtatttattgttctatccctttacttccaacctacctgtgtaattgtatttgaagcaagtttcttatacacagcatacagttggattatgtgtgttttttaaatccagcctgacaagctttgtaattggtatgtttagaccatttacatttaatgtaattattgatgtgcttgaatttaagcctaccattttactatgtgtttactattgttccctgagagttttattgctcaactttactgccttctttgaggttattttttcatattccattttaatttgtctcttaagtttttgaccataaatgtctttgcatagtttttttagtagtagttccagaaactacaatatacatacttccttttttacagtctacttaaagtcaacattttaacacttccagaagaatgtagagccacatccctgcctccacatcggttacttaccctctgcctttagagtgtagtcagtgtaatacctgtatttgttgtaaactccgttagacaaaatggtaatttttgctttcaacagtcaaaaatatttcagagaacttgagaagaaaggaactcaacttcattcatccaaatatttgccacttctgttgcttttcctgtattcccaatataccaagtctccttctgataccagtttctttctgtctgaaggacattctataggaattcttttagatcagatctgcttgcaacaaattaccttatttttcctcatctaagaatgtctttatcttccttcctgaaggatattttcattggattaggaattctgggttgacaactattttctttcagcactttaaaaatatgattcttggctggatgtggcagctcatgcctatagtcccagcactttgggaggccaaggtgggagtggatcacctgaggtcaagaatttgagaccagcctggccaacatggggaaaccctgtctctactaaaaatacaaaaattagccaggcatggtggcacacacctgtaatcccagctacttgggaggctgaggctggaggattgttttaacctgggaggtggaggttgcagtaagccgagatcatgccattgcactccagcctgggtgacagaatgagagtctgtctcaaaaaaatactactaataatataactccacttctttccggcctccattgtttccgtggagaaatcagtgggcgcaggaacccttgttcctctctgtgtgtcagtgattggattatgatgtgtctgggcttggacatcttttggtttgtcctgtttgggattctctcagcttctttagtttataggcttatgttttcaccaaattttgggtttttagccaaattttatcaaacgactttgtgcacctaagtgttatcttttcttctgtcactccagtagcatgaacgttagccctctgtgtgttgactttcctggtgatttttctctgctgttcagattttgggtcatttctgttgctctgtcttcaagttgtcacgttcgtttcttcatcgtcctgctcctgaaccaatccatgagattctttatttctgtatttttcagtttttaaattattgtttggttctgctttatatctgttatttctttgttgagactttctgtttttccatttatttccaagtgtttgccctttctttctttttctttttctttttcttttttttttttttttttttttttgagacagggtctcactccgtcacctaggctgaagtgcagggctgcagtcttggttcactgcaatctccacctcaagcgatcctcctacctcagcctcccaagtagctgggactacaagcactgaccaccacacctggctagtttttatcttttttgtagagacagggttttgccatgttgcccaggctgttctcaaacacccgagctcaagcagtctgcccgcctcagcctcccaaagtgtgcccttactttttggagcatttttataatagtgctttaaagtctttctcagataattccaataactgtgttgtctcagtgctgttgtattctttttctatatgagttgctatttttctggttttttcccgtgttgagtaactttgtattgtaccctggatatttttaatgttagggatgagattcttggtcttgttgacattctgtgaagatgttgaggtgtttgttttactgtgacttggttggcttaactctacaaagtctgaccctccttccctgggattggtctcattgtcattttatttgtagggcctttgccttgctgtctctacatgtcccacaagtgtactgaccagtggccagtctgaccacgtcagtggagcagataaaggacagcagtggaaaaattcacgaaattcagataaagtccgtggtttctttgaaaaaacaaacacaaggctctgagcagccaggagttaggctgggcactgcacggaaagccccgtcaccatgtggggcaggtgtttcacccccgtgggtggcgtcagcccctcctggaggagcccaggctggcgggttggcagccccgtcatcatgtggggcaggtgtttcacccccgtgggtggcgtcagcccctcctggaggagcccaggctggcgggttggcagcaggacgacacactcggcagaggctgccatggggcagtgttggccccacggcgtttgagcgccctttctccacatcagatcagtgtgttctgctatttcgcagctacttccctggcccctggttttctgaagtccattccagatggcaggtgatgagcctcagtgagactcttgtacgcatcccttgacctccggggtcacagccagtcactttcacagtagagaagagtgagggtcgtggagctggcagctgctcatctgaagcccctgctccttctctgccctccccagaccctcctgacctatgagccgagggctcggccggtgtcttcacagacccaccgtgtccagggcctcccgtgccatctgttcctggtgctgcagggacccccagcccaggctcatataacccagcctccctcccgccctctccatggtcacaatagaagaacagtgaggctgtgtttcctggggccatggcagtgcctgcatgcttaacaggggcctccagggaccctccaccctcaggccccaccttcccttcccacggagtcttccctcttgtaattggtcactcagccctgtggagggcgctgcccgctccaagctgccccagcccctgtgggcaaggtgtggacaggtgcccgctgctgtgttccctggtttgagaaacgcccccgaagatgggatttgggcacaggttttagacgtggacaggctgcctgaatccagcccaggctctgagtgctgaggcctgggccggtaacatgctcaagtctagaggatggggtaggagcacgttcttctgtggctgttctgggaggaatgaaaggacacccagctcccggccagggcaccagggcccacagaggacggcgggaatgcttagctcagcatggttggcttccacctgtcaaagctgcgttttccaagcattccaacaaagcgctcagtttcagaaagcacgcggccctgggtgggccctgggtgggcagggagcagcccacagtttcagaaagcaccaatcccaagagggtgtgcccagctctgacctccatgttcttcatcctccacaggtgaccccagggtttgaagaaaaggagggggagctgctggtgaggggaccctccgtgtttcgagaatactggaataaaccagaagaaactaagagtgcattcaccctggatggctggtttaagacaggtaggacccagccccatgggagtggaggagaccccgaggggacaggcaggaactcattgctgcccacgttgagtgacaccgaggctgggagttcccagaattttcagccaaaggcagaagatggggtggagtggggctgggggccactgttacggcactgcctcctgagcacccggcctccccaccggcttctagagtgggctccttggccctgtccctcagtgccaggggccccagtgccccatgacaaggcttctacactgtccctcagcgcgacagccgctccggcacgcacgcaccctgaccacagacgccgggccccacgcagcccttcctggtggccctgctgcccctcgtgggctggggcaccctccacctccgaggtgtacccctgtacccagagacctcaccacccccacgcttagccacacttgtgccctccacatccttctccccaccagagtcagaagtcagctgacgcagtgcggttggtttgcagtgcggctgtttgtttactgttccacaaattagcacattctctctgcctgccagaacaggcctgtgggtgagtgggaacctgcccacctgattgaggtggcccaggaagcctgtggcggtcaggagagacggcggcgcccctggagcctgctggcagcccccactgccaccctcctgctctccctgagcctgccctgagctgctgctgcctgacccccctcctttgtgagaagctggcttggtcccaggatcccacatcccgccccatggggcgtatttggacagtggatatttcgacatttggatagtggacgtatatggatggacatttggatagcggacgtatgtggatgtgttactagggggtccttgctcccagagctcccaagatggtagcgggcagcttccaaaatggcggcaggctgcttccaagatggtggcaagcgtcgtgttctctgacctggggttcttggccttatggattccaaggaatggaatcttgggccatgcggtaagtgttatagctctattagaagccgtgggccacagaaaagaaccatggaacccagtgactagtgttcagcttgattaggatgaacgtgggtgcttagccgtgcaggaacaatggcgagcctttaggccagtcgggagtggcagtgggtgcctcgctggatcaggagcacagtggacaccctgcgggatccggaggaatagaagtcagcggcgggtctgcaacggcggcaagcagcagtggtggacggcgagcgaaagctcaacttgagccgtaactaccacggaccagaagagagtgtagttgcaagatttaatagagtgaaaacagagctcccatacaaagggaggggacccagagagggcagccgttgccaggtttatatcccgatcattgtccctcctgctgtgctctgaggagatagatgattggctattgtttacctcctgttttagcctaattagcattttagtgagctcgctttactacctgactggtcgggtgtgagctaagttgcaagccccctgcttaaaggtggatgtggtcaccttcccagctaggcttagggattcttagtcggcctaggaaatccagctagtcctgtctctcagatggacatttggatagtggacgtatgtccatggatatttggatagcagacgtgcgtgggtggacatttggagagtggacacacgtggttgtgtggctgcaggtactcactgtagtgtatttatccggaagatgtgcacgttgctcctgacccctgggtggtgagattgcggtggtttttcttttcctggtttttttttttttttttttggcctgtctatattttatgctgaacatcattattttataataacctttaagtaatattttccaaaaaaaagaggcccattttcatgcatcagaatctgctggcccaaaatcagaaacgcatctgccccatgcccttccacagggagcagagcggggggctgcagcgtgcaggcgggatgggctccttgagggatgctggaaggggcaatgttggcctgcagcctctccgcctcatggcctgatcctgtgggtcccagaggccctggagcatgtgctgctgtgaggcaggtgtgctaggtgtgtggcagttccgcacgtttgcaaagtgaaggctccgtgagcccctagagcagaggccagtgccccacgcagcatctcataggcttcccaaggtaccctgggaggcaccttcgtgggctggacatcagcagaggacccagggctggggccctagaagcctctctgtgacaggacgtggtcagcacatcaaacactccctcccaatttatcttttttatacatccccattagcgcatgctgatctggggaaacagcctgtccatgacttcccttcaaatgcagaattacaggaaccggacttgagcaggtcttgctctgagcatccctccagtgccctctgaatgccccgaccccaatccgactcacgctgcagttgttttatttatttagttagttatttttgagacggagtctcgctctgtcgcccagtctgcagtgcagtggcacgatctcagctcactgcaacctctgcctctcgggttcaagcaattctcctgcctcagcctcccaagtagctgggattacaggcgcccgccaccacgcccggctaatttttgtatttttagtaaagacagggttttgccatgttggccaggctggtctcgagctcctggcctcaggtgatccgcccgcctcggcctcccacagtgctgggattgcaggcgtcagccactgcgtctggccggttcttgtatttttaaattcaggtaaaagctgaagacgttttcttctttgaaagcacaggaaccacagccctgtggattttgcgagtcgcggggctcccggagccgctgggagggcagccgtgtgagatgcggggctgcgagcgtggaaacactcgcagtcgccagtgctgaggcatgtttcagccggggcggaatcacatgcattaattattgtacagagatgtctttagtagaaaatgattttgaaattcagtttaatttcattgtaatgtgctgcaaacaggaagggagtatgtgtgtttaattggctctcgggggtaaggcctggaagccgcatgtctttgtcacaggccattagcgatgctgctgcataatgagagcctgcaatcagctcacagctgccgctcctgccgggagagcatgatattaaatagaaatcaggagaaattaaacttaaccctttccctggccagcccctcctgccacacggattctggcataagccggcgggcacaggggacagccagggatggctggacacagctgaggatggccgaggccggcctgcagctccccaacggcctcctccgggtcaggatgagaggagaggttgccagctttgatgccagccgctcctgcctcccccacctgcctctgtgcctacagcccgcttctgcctcaagatcacacagcgggcttgtgaggccaggggtctccgctgctgctcaaggagatggcaaaggtctgtttcaggtaactcctctgacggccacaacgatgtcttcagacgtcaaaggtctgtctcaggtaactcctctgacggccacaacgatgtcttcagacgtcaaaggtctgtctcaggtaactcctctgacggccacaatgatctctgcagatgctctgactccacgtgccctcgctcagagacacacgcgcacatttgccacctggggcgagtggaaggtgacgtggaggtgggcacctctgccgggcagatgcgggagcagcagcagcagcagcccctcctgggggcatccaggggtcaggagaggggcggtagggcagggcggcatccctgcaggggtgaatggcgtcttaggctccagccgggtgaggaaacctgataaccgaactccttagagaagagccagggatcccgggaggaccaccaggagcttgtggggaaggactgaggggaagagccccaggtctcgggaggaccaccaggagctcacggggaaggattgaggggaagagccccgggtctcgggaggaccaccaggagctcacggggaaggattgaggggaagagccccaggtcccgggaggaccaccaggagctcacggggaaggattgaggggaagagccccaggtctcgggaggaccaccaggagctcacggggaaagattgaggggaagagccccaggtctcgggaggaccaccaggagctcacggggaaagattgaggggaagagccccaggtctcgggaggaccaccaggagctcgtggggaaggattgaggggaagagccccaggtcccgggaggaccaccaggagctcacggggaaggactgaggggaagagccccaggtcccaggaggaccaccaggagctcacagggaaggatggggagaggggagtggggggctggagaacccccagactgagaaattctgctcggagcgagaagggagctgggcccaggtggccccatcccccaaggttgaacatcagcccagcctcccaggccctccacgtgctcatgggcaccactgccgggcactagcttacttgtcaccctgtctgaggcgtgttggggtaggagcaagagtccgctgcttccagggcccagctggggctccatgtgtccctgggcaccccagaaccctctgggtctcagccgttgggttcttacatctgggccagtggcaaagggttaaagggaccttgtgacttagttgggactcactggcctcaagaagcgaaaatcagagggacagcagccccagccgccggggattccctgtggcgccagagctccccggcaggcactgtggaggccaagtggggaccggcagtgtcgtggtcccggcccacagcctctcagcctcccacagcctctccctgtggtaacgaggtggacgctgagccccaggcctgatggcacatttgaggtcaggtgggggcacctgggctgttcctgtagctgtcccctcgtccaggggagggaccttttcagaagccctggggcctttgtctcattgaccaaaaccctcctggccatgctgccttcacaggacactgggcatctctgtggggcaagggaaggaacacaggcctcctggtggggccccaagacccaaccaaggctcgtctggctggtgccagcctctgcgccaagggtgccgaccaaggtcagagccgatcgcggggatgacaggtgccgaaatggccatgcttgccccagcccctttcatccggcagagggacctcgctgggcctgccacgctcagccaggctgtgctgtgaagcccctctcttcccttctcagagccatatgtccacgctgacagctcctgagagggaccatgttttgctgcctgcaggtgccaagctgactgatgggccatgctgaggagggtgccccagccctcctgcaagatgcccttctgtgcagcctgcagggccaccaggcccacgaggcggccatggtcttcagatgtgtcttagcctgggttccctagaaaacacatgaggactctgggcagaggctgagtgtttttacatttttatttttaagccaaagttacacacctgtggcttaaacacccaagtagttgtagcagtttgagaagaagaatcacagccgtgccccttccccagactcgccggctgctgcttctgtgcggtccccgcatcccgagggccgccagcaccgccacctccaggctcctttttgctgccatggcttgagtcccgcagaggaggcccctcctcaggcacggcccggctcagtcccgtatggcatctgcactattgagactatggagtcgccgctgagaactgagcccaggagacactgaggtttttcctctttctttgttttccagagtcgggaaagtcttggttttcttggtctcctggtgccaattcctcgtgggctgggctggtctccccatggcgcctccttccccatcaccaccaccccttccctcctaccgggtcaggacgtcggctcccagcccacagcatcctcgtcttccctcttccgcccccagctgtggggactgctttcccctggggcttcctgaggcgggtgtgtagggtccgtacttggagacttgcgtgtctctccgggtcttcgttctgccctcagccttgcttgtcggtttggctgcgtatagggttcagggttagaagtcgcttctctatcattttctggccttcagatttgctgctgccacagccgtgctgaatcctggcacttggtgaccccctcctttttttttctgtttttttttttttttttttcgagacagagtcttgctctgtcgccagactggagtgcagtggcgccatctcggctcagtgcaacctccgccttccgggttcaagcaattctcctgcttcagcctcccgagagtagctgggattacaggcgcccaccaccacacctggctgatttttgtatttttagtagagacggggtttcaccatgttggccaggatggtctcgatctcctgacctcgtgatctccccacctcagcgtcccaaagtgctggaattacaggcatgagccaccgcacccaaccatgaccccctctttttaacgtacagggtgtcctctgtccccagacccctgagcccaggttgaggagccaccagctgaggacggagccaaggtcacggagctgccgggtgagcgctgagcccaggtcagggagttgggtctcaggccgtcactgggactccctctgccttcaagaagcctctttcacccttggcccacagaggagacctggatggcactggggtccaggtgcagaagcctccagtgtccacgggcacctgagcttccagcaccttccctcctgctgggcggtggcctgtgcctggccgcaatggaggccgccttccccactgcccctctgagcctcagtctgtcctccctgcagccacctcccctggccaggtgccccggggtaactggtggaggctttcacgtaacttggtttccagctgcctctgtacacacacaggcacctgttccaggcttggcctctctgtacacacacacgggcacctgttccaggcttggaggctgagaacttgggggcagagatctcagggcatcggcttgggcggggtccttgggcagggccttgggcttccctcggcactttcctcaaggactggggccaagcttcacattctgttgctggcatcagtgccatttgggagcaaaagtccgacaggctgggtctgggcctctcttcaccttgtttcctgggatcgcgctttgggtgctggtgtcactccagatccaggctcgggaaccacatctgcacagcagaacaggcgctgttcttatcttgcgtgcgggtcaggacatccccccggccaggagtgcttcctccgaggcccacagacaagttctcgctgggggactggggaccacagcacctcactccacctacactctagagaattcaaatctgagtattggaagatttattttcagttacagtggaaggcagagacatgaaatagcaccaaattcaaaagcagctcataaatccaggtaataggagtttattgattgctacattgtatctgtcagaagaaaactcctttaatgaacacatcaggccgaggacatacacagcccattggcagccgactccgattccagaatcgatgcattttgataaataggttgttatggaaagtaaaggttatttaacttgtttgacttgcatttcacagtgatcgcaagttgccctggagccctctgaaccttctgagtcgccctcgctgccgcaggacctcctcccgcggggtgtccgacccgctcttgcttggctgagactttgtttaaaccctggctccgatgcctctgagcccttgatagcagcgtcccagcctggaagaacaaaaccagccacttttccccttggcaaaggcacagcaaggcgggtgaggcgggcgctgagtagtctgggaatgggcagggagatgtcgaccctcggagctgagactgctctgtgctgagaagctagaacaaagcctgacatgttccaaggggcaagctcagggctgggagggaagcagcggggccgcccctttgggtgggggtgcccaggccttgcagacaagacactggccagaggaggtggagcaggggtactggggcagaggggccatgtttgtgcagcaggatggaccctggagggccccggcctagagggggcctttgccaggaagatgccaggaacgtccaggccaaggcgtccgggcaaaggcatccaggcccgggagacgcatgtgggacttgggctttcctctgtgggcagtgggaagtctctccctacccctggaaggagctccaggcagcagtgaggatggggattctgacactggagtggggagccggccctgtggtgctggctgggctgagagcggcaccaccttctgatgcccagggtgggaaggacacacgactgccaccatgcactgagggccctgcacgccacacacgtgctctgagcactgagggtcccctcatgccacgcacaagttctgggcacagaagcacctctcagaatcatccccgagacaggcgtccatcacagagacaggtctcagtcctgcactgattggcttcgcccagtgctgctgggggagtctcagacacagcctttttccgacaggtatagctgccactttctccggcacagaagcctggggccctgggaatggcaccatgttgcgcgccgacccctacggttcttccctccgcatggctcagtggaaaccgtgcgtgcagcacagcaggcagctggggcctgtgacgaccctggggttggaggccaggcagggctatcactgagaagcagggatttggggcctggggcccagggaatggacaactccccaagctgcccccaccagtccttcctgagcactggctctggaagaagcatctcggggcagaggcagccaggcccaggcagggagagacccccaaacaaggcctacagcagggtctcagggcctgaccatgccagaaacagcccagagccagagaggatgggcagatactcagtgccaccactcctgggagatctcagcaccagggcttcgacctctggggatacacacccacacctgctgagatataacacatctgcagagacacagccacgcctgcagagacatacccacacctgcagacacacccacacctgcagacacacccacacctgcagacacacccacacctgcagagacacagccacacctgcagacacacccacacctgcagacacctacacctgcaggcacacccacacctgcagacagagccacacctgcagagacaccctcacctgcagagatacaggcacacctgcagagacacagccacacctatagacacacccacacctgcagagacacacccacacctacagagacacccacacctgcagacacacccacacctgcagacacacccacacctaaggagacggggtctcgcagtgggcggagaggttgggtcttgcatctaatcagccattgatgggcctctcctgtgaagggcactcattccttgtattcataaattaagctcatgtgagtttgttctttaacaagttattgcgcgatcataatccattgccgacgttggcgtgactcaccatgtcatgagcccactcggggctggtgctgctggagatggggaagaaaattgctccataaaccaaaaagcaacattttaaaacttataaaaaagattcgcaggaaattagaaataacacacaggggttccttgtgccgtccccccagtttctcccagcatcagcctggtgtgtaacggtggtacatcctcagtgccgtgcgtagctttggtgcagtctcagccccgtgcgtagctgtggtgcagcctcagccccgtgagtaactgtggtgcatccttggagccaggacacaggcagctcaagagggtgccggggacttgtcagccttgggggcaggcagtgatggcctctccggcaggaccagagcagggcagtggctccatgctgcgctgggtctctgggtggtgcaggccagggtggagccaggccagaagctgtatggagggccctgagcacctggcagcctccctggtgtcagcagctgtggcatccgtggggcaggagcagcctggacggggtggctcggtgcgattaagagatgctattggaagattggtggctgtctggtccagaggggacacacaagccaggctgcacagcaggagcaggagccatggcgggtcccacgggacttgggacaggctgtgtccaaccccgcccacagcccaacctgcacacccccttccagccgcccagactaccccaggggcgcagtgagaccactctcctgtcggggagcctctggtttttctgctacccatcagcacagagttccagagttccagagctccataaataagcctggagcccacctgggcacacccatccgtcttgtttaatagactgaggagcacgccatgggtctcaaggagtggtgaggtggatggatggggcctttctgcgtccaacagcatgatgtataatgaagtatttatgatttattccagctaataacccatgtggagtgcagggtatgtggaagcagacagttgaggcctcagcactgcccttacatgccctgcatgctcccacagccacggcacacatgtgtgcgtgcacatgctcacagtcacgcataccgcgccctcccagctgcacacacgctcgcaggcacgcacactatgggcccatgcgtcatgagacagcttcgggctgggagtacaggctctgaggctgcagcccgctcttcccgactccccaccctcagtggctggtggtgtctgtgttgagctactcgagaaaggaagaaaacgaaggaagcttggttcccacaggagctccaggaactgcacggggaggagcaagggccacgtcgtggctttgccttaggaaggaaaacgtggggcagccccggccattgttctaggaccagcatggtcaggtgtggagggcacaagatgggcaccagcaggaggctccaggcacccaggaaaggccctgtcctcctcagccaccagcccctccctgtggcctctgcgtgggccttggtgcctctcccatccagaggggctgggcattcactgctggagcccaccgtggtgggatgttgtaatgtgtctggttcacttcttttactgaatatttggcctggattcttttgtgggcctgagagaaatggcaggacagggcctggtgggcctcggcccctctcccagagcagcctgcctgcatgaggggcggcccctctatgctgcagtcccaggggctccgtctgggggcccttgcagcagtagcagcacagccaggaggcccagcacaccctggcacccatcctgagggagggtaaagcatcagaccctgtgcttgttgctcagaaaaggccacgcatcccacccatggccagtggttatcaatcactgtcacagaaacagggcctgagccggcttcctaatgcagggtgtctgcagaccacaggcccagcagggcttctggcacctcctgctcctggcaggctctggacccactgctgacctgcccctggaggaagtgcatacagctgagcatggggaagggaccccacaggaagggcagaccccacatcatgggcacagtcccaccttgggacgcacgtcgtgaccaccaggaatgtgggcttacctggcatagctgtttctccgttggggttgccacagggtagtaaccagagccccctttcctcagaggacaccgtggtgtttaaggacggccagttaaccagagccccttttcctcaggggacaccgtggtgtttaaggatggccagttaaccagagccccttttcctcaggggacaccgtggtgtttaaggatggccagtactggatccgaggccggacctcagtggacatcatcaagactggaggctacaaggtcagcgccctggaggtggagtggcacctgctggcccaccccagcatcacaggtgcgtggccggacttgggccagggaggccaggctagacgggtgctgccttccatgtttgagttttagacgactgcagatgagtcgacgccgtcccagctgcctgcaggggtccctgtgatgctcacctctggtccctgccctggccagggaacatggggctagtgggggtgcagcctgctcggtgttggagccactgaccccgtgcccaccagagctcccaggcctggccgggcgcagctcccatctgcatgattcccctgcaggaaggtggcagggagagtgcagagagccaaggggcgggaaggcagagcccctgtgagtgcccagtccccagatccaccgtggggagcccgtcctcactcccctccccacaggcccagccagcaccaggacgagtgattggagtggggcctgtccaaggacgggctccagggctgcggccagactgcgctcttcctgtgtgtccaggcactcttcggcctgtaagggtcactgaggcatccccatgttctcaaactgttcttctatccgcagatgtggctgtgattggagttccggatatgacatggggccagcgggtcactgctgtggtgaccctccgagaaggacactcactgtcccacagggagctcaaagagtgggccaggtagggctgggtggggcgggcagggagcactcatggggtcttgggggtccagtcttgagggccaccctaggtattggcatcgtccgtcttagaggtggagatgagggatcaagaaagaccagcagtgagggtccttagagacctgaaggccgcacacagcaggtagagacgagggcagggggcaggagccgtgctcagatttgacttggtggcaatattccgagggggcagaaactcacattcctgggacagggccctgtacggcctgtggtgggttccgtcctggtcccaggagagatcccggatgagccaggccaggcccatgcaggaggtgcatggagctgagatccagggttgacaccagctggccgcacgcgctgggcccttccccgccaggccacaggcagcctgtccacctgccgccccaaagccagtgctgggccccagcagaactgcaaggcccacccattctccgtcggcacctgcacggcctctccctctcctgccctgggggtgggtcctgaaggtgcctcacacacctccagtcagttccacggagaccccagcaccatcaccatcccctcagtcatttcactttcccctccatgtccagggcagggcctgttcctcagcggtggccaccacccagtccttaaactcacctgcattttttgttttgcctttaccttacccagaacctttccccaaggactttctcccacctgtctcacccccagtggtttctgatgcatgggatccacagaccctccacttttgccagcagtggtggtggtcacgcccagggctgaacctgagctatggccttgtcaaaggccgtcaggacggaagggtatcccataggaccgtcagggcagagccaggctgagctcagaaaggaagcttttagtttcacctacagtaatttcttttgtttttttaatttataaagaaacggggtataattggctcatggttccacaggctatacaggaagcgtggctggggaggcctcaggaaacttacagtcatggcagaaggcaaaggggaaacaggcacatcctacatggccggagcaggagggaggagggaggagccacagagtgagtgagggaggagggagggtccacagagggagggagggtccacagagtgagtgagagaggagggagggtccacagagtgagtgagggaggagggaggggtcacagagtgagtgagggaggagggaggggccacagtgtgagtgagggaggagggaggggtcacagagtgagcaagggggggaggggccacagagtgagcgggggaggggccacagagtgagtgagggaggagggaggggtcacagagtgagtgagggaggagggaggggtcacagagtgagtgagggaggagggaggggtcacagagtgagtgagggaggagggagggtccacagagtgagtgagggaggagggaggggtcacagagtgagcggggggggggggaggggccacagagcgaggagggggtgggaggagccacagagcgatgggagagggaggtgccacgcactctcaaacatgcaggtcttgtgagaactcactcactagcacgagaacagcaaggggaaaatccacccctgtgatgcagtcacctcccaccaggtcgctcctccaacagcggggatcacaattcaacatgagatttgggtggggacacagatccaaaccatatcgttcctccctggcccctcccaaatcttacgtcctttttacattgcaaaatacaatcctacttcccaacagtcccccaagtcttcactcatttcagcattaattcagaagtccacagtccaaagtctcgtctgagacaaggcaagtccttttcacctatgagcctgtaaaatcaaagacaagttacttcccagatacagtgggggtgcaggcattgggtaaatacaccagtgccaaaagagagccgccagccaaaacaaaggggctgcgagccccaggcaggtccaaaacctagcaaggcagtcactgaattgttttttggtttcttcttttttggtttttttttttttttttttttgagacggggtcttgctctgatgcccaggctggagtgcagtggcatgatctcagcttactatagcctctgcctgcaagcaattctcctacctcagcctccctaagtagctgggactataggcatgcaccaccacacccagctaatttttgtattttttagtagagatggggttttgccatgttgtccaggctggtctcgaactcctgacctcaagtgatccacctgcctcagattcccaaaatgctggaattacaggcgtgagcaaccccacccagcccaataaatcttaaagccccaaaataatctcctaagacccatgtctcacatccaggctacactgatgcatggaggtggctcccaaggccatgggtatctctgctcctgtggctctgtagggtacagcccccatgctgctttcataggctgctgttgtgtgcctgcaacttttctaggtgcaccacacagtgcaagctgtcggtgggttattctggggtctggagaacggtggccctcttctcacagctgcagtagccagggccccactggggactctgtgtgggggctccaaccccatctttctcctcttcactgccctggagcagtggcctgagctctatctggagcccttttagccccagagcaacagggatgcaggggccagtgtccctcagggcagtggcccacaaaaccattcttccctccgaggcctccaggcctatgatgagaggcacttccatgaaggtctctgacacgcctagagacattttcctcattgtcttggcgattaatattcagctcctctttacttacgcacatttctgcagccagcttgaattcctccccagaaaattgtttgtttgtttgttttctaccatgtgatcaggctgcaaattttccaaattttatgctctgcttaccttttaaatctaagttccggtttcaggtcatctctttgctcatgcttaacaaaagcaatctttgctccagttcccaataagttcctcatctccctccgagtctacctcagcctggacttcattgtccatatcgctattagcattttagtcacaacaatttaacaagtctttaggaagttccaaactttccctcatcttcctgtcttcttccgagctctccaaatcgttccagcctctgcctgttacccagttccaaagctgcttccacatttccagatgtcttaacagcagtgccccacttccctgtaccagttttctgtgttagtccagtcttgcattgctataaatgaagccagatttttctcagccactttgccaaccggggacctccgtggctggtgacacccccaacccaggcctgccacagaaggcacccacacactcgacccactgggccatgcttggcttatgcactggctcagcccacctgtgttatagcttatacctgcattcatcggttcccaagttcttgtcccgcgtccaagaagaatgaggttacactgacaattcaaagggtgaggagagtggagaagaattttattgagcaatgaaacagctctcagcggagagggtatgcgagggtgctgaaccgcccagagttgggtgtggctgggtctagggcttttctgggcacagaatggggaggggcaggctgtaggtagcactggaaaaggtaacctttggttggttaaaaagcattattcagaaagaaccagtgggaaagagtgggcaaacaggaatagaagttctcactccaggctgcaggtttcaggctgtttttggcttgaaggtggggtttcaccagggacccacccctgtctatctgggcatttgactgcttcctgttgctttcataaggaactacccaagatggtaatttataaagaaaagaggtttaagtggctcacagttccacaggctataaggaagcatggctggggaggcctcaggaaacttacagtcatgacagaaggggaggcaggcatgtcccacatggtggagcaggaggaagagctcacctacagcaaattatttaagaccgagcatttgtctctgttctgttccctctctggacgcaccctcctgcctccaccctgacttgccgtctcctgagcactgaagatatttttggcttgtccgatgtgactccacagacagcagaaacgcttgcttgatcagggcagcatcagggcaccacacatgcctgggcttgcacaacacagcgggagcactgccactcagcagcagctgctgctttcattaaacagttaccttgagaagaaaagataggtgtcgagggctgagagctgtgctagagtttcagggtccgagttggcaggaactgaagtcccgatgctcctcagcccttggctgtcctcagggctgccctctgcgtggggacaccaggccgcccctgcccagggacaccaggccgcctgctcctgctctgtgcatctctcacatcaggctcctcacccagcattgtttgggctatgacagtggctgtgacaagaccctaagacgggaagctgcgtgcagggcacttgagggcccgctgaggagaagccgcctgtgagggacaggactgggcagggaaggccaccagccatgcggtcacagcccaggactccgccagtcctgcaggagccctggagccaggcccttgctgtccaggccacttgctgtacctggcccacagctacctcccctgcagccctgagtcctgcttgctgtgcccggctcaggctgagactgcagtgcttgtccattcaccatgaaagaaagaagaacaggaagggaggcaggaggaagtaagttagaggattaatccaaatgttccaactgtctaatgggagttccaacaagaagatatccagggaggaaattcacagtcaaatttccccaaaccaaaggtcatgagttttcaggttgaaagaacacccaaccaagaggagagaaaacagcattctaaatatcggaaggaaacgaaacctcgcctcaggcatgcgggctctgacgggcaggatggcggcacggagggctgctgtatccagtgaagtcagcagttcagatgaaacagataactcccttaaaagacacaaattgccaagactgacgcaaacactgaaacagactgaacagttctgagttaccaatttaaaactgcaaagcaaatagcaggcccaaaaggcttcactgataaattatctcaaacattgaaggcaaaaaataaaaccagacacagcaaagtaagtctctgatgaaacagagtggggaggaacacttcctaactccccgtatgggaccagcactaccctgaaatcaaaaccagacaagaaaacgagaggacagtgttcccaatgggcagacacacaaaatcctaaacaaaacgttagcaaattaaatccagttaatgcacaaaaagacaacacgtcatgatcaagcagcatttaagccaggaatagagggttactttcatattcaaaaatcagtctgtgtaattcaccatatattttttttttttttggatggagtctcgctctgtcgcccaggctggagtgcagtggcacgatctccgctcactgcaacctccagctcccaggttcaagtgattctcctgcctcagcctcctgagtagctgggattacaggtgcgcaccaccatgcacagctaatttttgtatttttattagagacggggtttcaccgtgttggccaagctggtctcgaactcctgacttcaagtaatcctcccgcctcggcctcccgaagtcctggaattacaagcgtgagccactggtaattcaccatatttacagaatgaagaagaaagatcatatcatttcaatagatacagaaaaagcatttgcaaatgtcaaaacccttttataacaagcactcttagcaaactaggagaagaaggaaaatccttgaacctgatgagggagtctctcaaaagctaccagatgacatcctgctcgatggggagctgctgggcgttttcctcctgtgaccaggaaggggcgcctgccctcaccactgccacccagtctcattcaacacagagtttgtcccctgttagaaaccgagacgttggttacacgtggaggttgggagtggctcaggcaggcagaggggcttctgggaacctggccatgttccctttcagtctgggcgctacttagagcagggggcagttgcttcaataaaactttagattcccacacaggccaggcgtggtgctcacacctgtaatcccagcactttgggaggccgaggtgggcagatcacctgacgtcaggagttggagaccatcctggccaacatggtgaaaccccgtctctattaaaaatacaaaaattagccaggcatggtggtatgcgcctgtagtcccagctagttaggaggctgaggcaggagaatcgcttgaacccgggaggcggaggttgcggcaagccgagactgcaccactgcaatccagcctgggcgacagggcaagcctctgtctcaaaagaaaaaaaaatctacacatccctcaccacactgtacataggacagctgggtgtaaattacatctccatttaaatgcctgtcatagttttatacaactataaaatatatacgtgccaaaataaatttgataggaacattggaaccaggtaaggtgacgcatacctgtagcacttcgggaggatcctttgagcccaggaagtcgaggcttcagtgagccatgactgcaccactgcactctggcccaggcaacagtgagatcctgtcctagaaagaaaagagaaaaaaagaaaaatgcgatttggaaatgtggaggtcgaggttgacagcgacaccgaggtcgaagccagttgcccctggagagcgagagactgggctgggccgactcccacctctgtcgcgagaggcctacgggcaggggcaggtgggcagggggactgtgctgggtctctggccgcgtctggacggcaggcgacactttctccacaaaaagcgtcaagaaaccacgacacttggtttctggacttttccgcggaacagtaaccagaacaatcgccatgaaggttcgtttctgtcatggctcagtgcagcctggacgccctggaccagcccctcctgcgcctgggccacggccgctgccttcagggcatcactggtgggcggcacaaccatcctccctttggggggttaatttcatttctttcctcccttctttaatggtgaatggaggagcaccgagcaccactgcagtctcagtttcagatcccagcgcctcgtccctgcccactgccctcggccccgcccgcctgcattggcagtgccctggccccacccacccgtgtcagcaccgcccaccgccctggcaccacccaccgagttctcgcccatgaggaagggggaccctgagtggaggtttcaaaccttaggggccgtccctgccgtgcagggctctgtgaggcctcttgccacataggcttgtgtctgcaggactgtgcggcatttactcccatctcaaataccccatacagggcagactgcccctgccccacctgcccacccactccccagcctcttccgcacgcctcctctggaaggggaacgggccacagagtgaaatggggccttccagctccagtgcggggacttggaaggcctggcccggtgtgggggcccctctgccctgcaggccactctgtgcaggcctatcctcaggtgtgccctcgcccaaggcctgcacgcaccatggcttctgtggtaccagtgataacaccatgccgggcacctcctgcagtcaccacccctgggctgctagggcagagacagctgcggtggcccggtgcacctgcctggcctcaggatggccgaggcgcctggcaaggctgcagggtcccaggggcacctgtccgtactgctgggcgcctgagttcctcctgctgggcactgtcagggcagtgcgcctcaggctgtgcttgtctctgcagaaatgtcctggccccgtacgcggtgccctcggagctggtgctggtggaggagatcccgcggaaccagatgggcaagattgacaagaaggcgctcatcaggcacttccacccctcatgacccggcagactgggactgcgggtctggtggggagcagcagacgtccccttcacaccgagaaccacgggggcccgtccaagacctggcctcccttaaacctgaaccccccaaatcaggtcacgtagaatcaagaactgtttgggatgaaatcaccatgtggggtccccagcctcgggccagttgttgcagctcaaggagaccgtccctggtgtcacctctgcctggtcaccgccgacctcatctgtgcagcgcggtgcagccagcccctggccccacgtgctgaggcacctcccgccccacagtgccctgcagttgccaggctctccagggcaggtcccagaggtttcccacaaaaaacaaagactccactggaggaaacaa

SEQ ID NO: 15359 - DNA, 60707 bp, Homo sapiens
acgaccccgcgggacccggccggaacccggcccgaccccggcgcgcgcgcggcggaggacgaggaagagttgtggcgaggcagatcctgccccgtggccgcggccgtctcgtaggtgcgggcggcggggcccacgggaccgcggcggggtcggccgggcgcagagctctcgggggcgcgggctccggcgcccgcccctgggtcgcagctgggcttgagccgtggcccgtggcgcggtcgcttccccgcgagccgcctggggccgggcgtcggccttcccgggacgccgagcctctcgtgtccggtggggagcggggcccccgcgcggggtgcggggagagaagctgtgcggacgccgggcccggtgataccgtcgagccggcggggtccgtgttcaggcatcctcagaacgaatcgtctttggttgtgtttggaataaattcacttccatttctcattgggcttcagaagtcacccttgaagtactccccgttttagttgtttgctgcgtgcaccttgctgggcgcgtggggcacaggttcacagccggcctagcccctgagggcatgtagatctatgagcaagcaatggagacgtgcggccggccgtgaagtatttggaaggtactgcaggcagcccattccctggagagagggaaggtttaaaggggtgaggcccggtgcagtcaggagttgatgttgctgtcctgagtctaaattccaccaggcaggccaggtgcagtggctcatgcctgtaatcccagcgctttgggcagcagaggcaggaggatcacttgtggccaggagttcaaagccagcctgggcaacatggtgagacccctatctctacaaaaaaatgtaaaaattagctgggtgtggtggcgtacacctgcacttccagctactggttaggctgaggcacgaggatttcttgagcccaggaatcggaggctgcagtgagccatgacagcaccattgcactccagcctaggtggcagagcaagacactgtctcaataaataataaaactgaaaaagaagaggtgatatttgaactgggcttggaagaatgattaggaatttgctagaaagggaacacgtttagagataggaacacgaattgtgtctggggcatagttgttgctttcccatcctgggaggacagacattcgtgttagggcccaaggctgagaccttgttgaggagggggttcacatggtggacccaggagcacgggtgttactaccggtggaccctggggaccctgcgagctttgtagcgtgaagcctggctcaggctggtgtcctctccgcaggtgttggaggacataagatgaggcttcccttgctcttgctcctttggctctgaaccatctcctcaaggcagacagaaatggcggattaaactgtgggcttgggatagttgtaagtgtcacctttccagatggcatttttaaaatagtatttttcttcctaaaatggatatgggtttcaagtgtatttttcctttttggttttttttatttgaatgtactgctcatgaatgcaatgtgaatgtctgttacttaaaaatgtaattttgaaaataaccctccaaaccacaggtgtgatgctgaaacgcatcctgccccgcaggccgagcacagccctcctctgccccacgctctcatcggggcagccgacaggaggaagtgccggcatccacttcaaacacaaggtctgggggggcgggggtgtcaggtgtggtggtgaacaggtcaggtgtcgttttattcatgttgaaagcagcccttcatttgaatgcgagtgtcattctcatctagtaatttttgttgcgaggctccatggggagcaccctgctgagcacggcgcggccgtttgtcttctgcctggcctgtgccgggccattcgtacattctcacgtgaagcctgtgaggcaggtcttgttactgtgccatcttagcggtgggaagtgaagggctaggccagtgaggaaatgaggacaaaggcagcagccgttcaagtcgaagcctgtggtgactaactctgccattaaccagcactccagttaggagggaaaagatgcatcccgctgcgctgcatgtgtgttcccgagaagccccagtgccttagtggtctgatctcagaacctgatggctagaacaccgagaggtcctgcctccctccccgagggctggagagccactgttttcagtggttccagtacgccttcaccaaggaggctgtcctggctcaggcacctttctcagcttctgactagagtccttgcccagccacgtggtgacgccgctgacctcgggttatcagggtgctgcgtagcaggggtatgaagctggctgagggtggaagcccctgactgaactgcatttgtctggtgggcagtgtccctccacactgtgctcctggtggtgatggggagccccacggtagaaggggtcccagtggttgaaaggtgaggttctctctgaggaagctggggtgcctctggaccgggaggtgtgcaggaagaccgcgcacagccatctgccctgagtaggctctgtctgcgtgttcgaggcagggctctgatccgatgaccgtgaagattcaacctctgtgctgaagagaactgatgactgggcacttcattgtcccaagcctgagggactgaaaagctggtttgatggggctggttccgttttccacatgcttggtgggagaataaatcagcacctcgttggaggggactttgtcagtatttctcaaaattaaagatgacccagcaatgtgacttcccggcatctgtgccctagacaccccgagtgaacacagctgtaggtgccaggactccccccttccctcggccgactctggctaggccaggcccttctcaccctccataggaagcctccccaccaggcccccgtccgttcctcctgcccgtggcctctcctcatagcgcgtgggctctctgggagctgggaccatgtcacacggggccagtcacatctgtcacctcccaggggctggtggcaggagtgcccacccacaggcagcgctctggattccgcgcaggagaacagcagtttcttctcagcctgcactttgagtttgcccagcccagctgtgcacgtcagcatcaccagctctgctgagctctgggttttgtggggaatccactcttattcttccgtggcttcgccctgcggggtgactcaggaatttgtagaaatgccaaaaggggggctgtgctctggtagtgtgtgctgtgtgtgctcagcgtgtggttagcgtgtgctcagcgtgtggttaccgtgtgcacagcacgagcttgaactcgctttgtcagaactcggttctttgtggtctgcagaaaccttttctgagcagcagctttagttagagggaagccgtcatcccccttttatgtgcttctgtcatattgagaaacagctacacacaatgacaggcaccttctatattgagtgagtgtcgccggccgtcctagtgctccgctccttagcaccccagaaagcaccgtcccctgctccgagcacccaaggcactccctgtggctctcagcagcggaagtctggcctcggggccgtaacccagagcacccagtgcccagtcggttttctgtgtgtggattctccttgtttctgtgccctcacacctgtaaagcagtgcaggatcggttggaagtgaggaaggaagcgtggtggggccgccctggtttgctgctttctgaagctggcacagcccacgtgccgatctcgtgtcttgtgtctggtgaagcccagttgttttcttgccattctctgggtttctctatggtagcagagtccaggtgtgtgggcggaccagccactgccctgcctctgaacagctgtggagggcttctagaacatgggtgcctcgcgtcaggagatgatgtggcctgcaggactgaccgtttggtaggattcagagaagactcacacaggacgtccaagcagcccgcggagctgtgctgaggttcagggccctgcgtggctcgttttcctcctgcctgggccagaggcaggagatccctcagctggctgggacaggggacttcattaagagccccaggctacctgggaggcggagcttgcagtgagccgagatcgtgccactgcactccagcctgggtgacagagcgagactccgtctcaaaaaaaaaacaaaagagccccaggctagtggggaaaccagacacccaaatcaaacaagcaaaaaccaaggccagtagttgagggtctcaagcacaaaacatactttggctctgacaattttcattgtcatgaagtttgttttgttagacaactatgaagtgttgtgacggtttcaaactaagagcagaaaacaaaactgtttagtacaaaccacagacaataacacagtagctttcccctcacaagttaatgaaagagatgtgctggagagagagaacctgctgaacatgggcacagatcccacagagggggcgtggtgtgtgggaggagactcgacagggtcatggggtcactgctgcccgttgtcgggagataaggctcacagctttatttgataatgttgtctttagcttgtaaatgaacatgcttcccttcccccattgagtgttgagtgttgtgcctgtgggaagcgttatacacacagcctgggacctcagcacagatgcccgttgacaggtgtcccaccggccttccgggttccagcgccaggcctggtgcctgccccaggaggatgagcatttgcattgcctgcaccttatcgtgcccttccacctgctgaagcagctgtgcctgccgctcttgtgaactgcgaacttccccttacctcctctctctggctcgggagctgggtgagtttgaacttggcctcctttgcttttctgtgtgcgaacaagtggttgccttgtttgtttactgaacagagtgtggttgaggcaaaatgctgagatgaaacctaacctaatatgtgtgtattagacggtagcatcattgtcaaaataatacttgttcaaagtccctgaaaaccaaacggacaacttgactacgcttcggccacaggcctgggacgctgtcagaccgagggccgctgagtgcccagtggcagcagagcccagagggtgcttcccccaggaagggaggcagaccagcctattcttactgtgagtcgagcaaagctttgattataaagggccagggatgcaggagcctcgtggagagtgccaccccttcttctcgctctggaatgcgggggctgtgcccctggcctgtgtccgcatcctggggcggtgtcccgtgggcagtgtcctctggctgcagaatgcatgttgcagaattggaccagccctcacgcgtcaggagcgttgggcccacaggcggaggcaccctggcttcttctcggtctcctttctctgaatgaagaattccagtggacggcgggcccgcgcgacccctcccagggagccctcgcttcctgctgatttatttgttatttagtagttaagtttttggggggaaaggagagaattatagttcaacctaaaacacgttttctagctctgtgaattgcctgatttaaagcttggcttggctgggtgcagtggctcacacctgtaatttcaacactttgggaggccaaggtgagtggatcaccggaggtcaggagttggagaccagtctggtcaacatggtgaacccctcgtctctactaacaatacaaaaattagccaggcatggtggtgcgcacctataatcccagctagtcaggaggctgaggcaggagaatcacttgaacccaggaggcggaggttacagtgagcccagatcacactactgtactccagcctgggtgacagaccaagactgcatcttagatagatagatagatagacagagcgggtgagactccatcccagatagataataaagagagagagagaaaggaaaaaaaggtgagagagaggagagagagaaagaaaagaaaagaaggaaaaaagcatggcttacacctgccataaccccaggactttggaccagcctgggcaatacagtgagaccttgtctctaccaaaaaaaaaaaaaaaagctgggtgtggtatcacatgcttgtgggcccagctactcgggaggctgaggccacaggatggcatgagcccaggaagtcgaggctgcagtgagccatgattgcatcactacactccagcctgggcgacacagcaagaccctgtctcaaaaaaacgaaccttggcacctcaccacatttccactgcgcaccagtgtgggaagggtctgagagaggcagcgccgtgtctgccccgggggcggggtctccaggccatgcctgttgtgagcgggggctgtgctgagctcttctctgcacttccccctctcacgggtggttttccaggctcaggattctaaaacccattattcagatgtaccttaagtgtgttgaattttatatgcttctccttggttttacctagtttatttcattgtttagaattttgtgtggtttgggaatccttaaactcatgaagtgaaatagaaagctgagatgctgggcacgtacggaacgttccagcagtgtgggtgagaaaggctggacgtggcctgtctggtgcgctgcctcatgactgaaggtgcagcaggcgtacctggctgggtactggggaggtgttttaaatcctgtcttggccacgtttggatgggacagttgggcactcacgtcctgtgccttgcctttctccagctcggccgcctgtcagtgcaatgctgccccatgtggtgctcaccttccggcgcctgggctgcgccttggcgtcctgccggctggcgcctgcgagacacagaggaagtggtcttctgcacacagccccagtggcccgctcggacaggagcgccccggtgttcacccgtgccctggcctttggggacagaatcgccctggttgaccagcacggccgccacacgtacagggagctttattcccgcagccttcgcctgtcccaggagatctgcaggctctgcgggtgtgtcggcggggacctccgggaggagagggtctccttcctatgcgctaacgatgcctcctacgtcgtggcccagtgggcgtcatggatgagtggcggtgtggcagtccccctctacaggaagcatcccgcggcccagctggagtatgtcatctgcgactcccagagctctgtggtccttgccagccaggagtacctggagctcctgagcccggtggtcaggaagctgggggtcccgctgctgccgctcacaccagccatctacactggagcagtagaggaaccggcagaggtcccggtcccagagcagggatggaggaacaagggcgccatgatcatctacaccagtgggaccacggggaggcccaagggcgtgctgagcacgcaccaaaacatcagggctgtggtgagtgccgcctggcgccgtgatggtttcggtgaccgcacagcactccgggtgggctccgggccagaagcacatcttttcattcgcttttctgtggagtcattcacagttgtcaccatcctgcagacccgtgtgagatacagggacgcaggccctcggggtgtggccgctggcctcactggccacgcaggacggctctgggagcgtccaggtgtagagggattgaggggccgccgagtgaccctgccaggaccatgcggcatgaggtcagaagggaccactcactgcctgtgatgctgaggggcttttcggaggccagccacgtgttaggatgcgtggtcaggaccccacatacacccgggtcttactcgttttttgtgtgtcctgtgacctcagtcacatcttcacagaactctccaaccacatcacttacctggcatttgtacagtgtcataacgtctcctatgcacttgaagcaatcaagtaaaaatgaaaaccaaaagccaggaaggggaaggcaggaagtgtaccccacggagtcgtgggctgacgaggcgccatgagcacacagcaggctgggccctgggtggcctgcgccgtcactcctggaagcggcgcgcctgtcgggagggacgggctctggactcctctgtccttgctgaggggagtgacatgcacatgtgcttctccctggagcctgtgcaggcagcaggcagtgtcctccgtgagattggacagaggattcagtgggccgtgcctcacgctgcttctcagtaagagctgagggtgtgctctggagcctggcctgggttctgtcccggctgagcaggtgacgataattcacgaatcggcagagctctgtgtgggcagtgctgtcacctgagccagtggttgggctgggagtcgattccagcctgaatggcgctgggtccctgagtcccaggcttgggcaggggcggagctctgtcgacctggtgtctgcagagccactccccgaccttctaaattccctaaagcctctggctgtgtgtggcgctgtcctctgtccccagggtaagtgagtgacccagcagatctgctgtggttttgtcgtcatcttgagaggctgctaaaggggagcaacaaagagccagccttctccttccccttcctcagtggggaggcccagagctcctttccgtgagcccgaggtctgtgtgtgctgttgcgggccacagtcttgctcttgctctcagctgtgctctcgtcccctgcaggtgaccgggctggtccacaagtgggcatggaccaaagacgacgtgatcctccacgtgctcccgctgcaccacgtccatggtgtggtcaacgcgctgctctgtcctctctgggtgggagccacctgtgtgatgatgcctgagttcagccctcagcaggtgagttggggtcagggctctcggttgcaccctcagactaggcgcctttcccctgtcggggccagggctctcagccgcgccctcagcctaagcgcctttcgctggttggggtcagggctctcggccgcgccctcagactaggcatcttttcctggtgtgcagtcgcccctatccacaggggacgtgccaatgccgagaccctgggtagcatggaaccctgtacctacgatgctttttgctatacatacgtacctatgataaagcttaatttataagttaggcacagtaagaggttaacaataacagaacagttataaccatgtactgtaatcaagttatgtgaaagtgctctctctcttcaaaataccttccggtactgtgctcgtctgttgtgagactgcagtgggccacgcgtcattgaaaccgtgaatagtgagactggatgagcggaggtgactgtacaggccctgctgcccgcgagctcctgcggctgcggcgaatgctcacgcgcttggtttaaaataatgcgagtttgttcttacatgcttggaggccaggattctgagacgagtcttgcggagctgatgctgggtgtggtagggctgctccgtcaggaggctccagggcaaagtccgttcctgcctcttgcagctctggaggccgcctgtgcccttggctccagctgcttcacgtccagctctgcttctgcaggcacacggccttctctccgtagtcagggctccctcggcttccctttgtgcagcctatgcggatattccaagatcatctcccatcttgaggtccttcgcttcatccacctgcagttcccaccactgcgagaggtgacacattcggggtgtagggcgtagggcgtgaccctttgagctatgatgtggccactgtggcagccctcggttactccagagtactggcccagctggagagctgcttgctgcggagggttactttggagtattggcccagctgaagggctgctgtggagtctctgtctcccctctctgcatggcttcctctgtagcgtctcccttggagcaggcagggagggaaggacgcggtgctggtcacacagagcgctggggtgggagcagtcatcgccgagctgctgcgcgcagccttgcctgtgcagggctgtctccaggcagatcagggatgctgctttggagggaaaggacctgggctcgaggcgggaccctgtgcacagcatcgggcctcgcctgtcagttggggatggcggtggcttttaggagttgctgtggccctgtgtgcattctagctgactgcaggcaagagtcactcaccaggctgcagagggcatgaggggcaggccttgagcccacaggaaggacacggtgtgcgtatgtcacaggtgtggtgaagcagagccctccggtgaggccatggacgtttaccagcctctgcccgtataatgaatatgccttttattcacaggaaaaaaagtttaacacgtgaatgtatggaaaagcccttagaatttggatcgtatcatgatggttctcagcacagaggagcccatctctgaggccagatgcctgggactgggctcttggtctgtgcggggttgttctgcagggcagacgtcccggccagcagaggcacagccctaaagcccagagcacagcagccaccagtggccggccccacactcaccgctcttgccaggactcttcctgtctgaagtctttctggccccatcgaaggctgtgtggagctctgaggcctctgaccgggagctcaggacccaaaccctagtcaggtgtgaatttcgccaggaaggggtccctgcaagcagtcagccctgcccaccttccctctgcttctcctgccgctgagaggcccatcctcttctctgcagggcatccagccccacacggtggctggaggtggagagaaggcagcttttctggccctccacctctctgaccttcagtctcatccccggaaaataaggttggaggccggctcacagtgggcacaaacttggaaaagagaaggggctcttctctagcctccactggaggcaaggtctcacaagagaagccagtatgtagaacagctttgtacgagcaagtgagcctgtttcttcacagatgataacattgggctttagagaaagacctctttaaaatctagcagttactaccgtgccaaagagaggtggctgccagcacacttgcgtgattagccgtcagctccctccactgctcttcaggacgcctgtagccacagagcctccctgagggccccgtcgccagggtcacctcctgaagagcctccctgagggccccgtcgccagggtcaccccctgaagagcctccctgagggccccgtctccctaacacattccacattcttgttggcttcagtccttatttttcacagacatctcagccctgaccccagctgcgacacagcagtctgttaagatggcagacactgcggctgcctcatctgcgtggtccatcccggagacatctgcctggcgctctgctccaggccttcctggctcccctggtagggatctggctcagtgacccgaccctccttgcggctctctctggggtgcgccctgcatggacacagctgtccttggtgaacgtctgctgagtcaaagtggttttgctgcagtgagttccccgtgagtgcactgtgtgggtggtgcagcgcctggtgtgtagggaacttccatgcctttgctgtgtctctgggggctcctctgacggggcagctccctcctctccgccttaagctcctcctttcctttggcggtcagctctgtccagggtgtcagtttctgtgcctgtgactgggccccctcaacctgccccaccttggcctctgctccttggcagcctggccctgaacctctgttgggggctgcccgggcgctgacggtggctggtctaccatggtcacttgggcagaggcagcaacggccattgtcgtggaccgtgccagggcgagatgcagctggcaggggcagaggcagaacatctcccagggagctgagggcaggttggttccatcgtcccggagggcaggttggttccatcctcccaagtaaagagtgtgttaccctcagggcgagaggcaggtgggtgtgggtgctggcgcaggccagctgtcaaggatctgggctttctggtcttgctgcttctccagcactgcatgaatgacaccacctggccctttccagtgcccacaggcacacggcttgggagctgctgctgcggcgtctctgcccaggggcatctgccagggggtccctgccttggggtctgtgtcccaagggcgtctgcccagggatttctgctccgagagtgtctaccctggggtctctgcctggggatctgctgtcatcttccagacactgcagactggctcattaatggacacgggaaagcctcagaccttcaacggacacgggaaagcctcagaccttcaccgtttttgacacttacttgggatttttctttaaactatgctgtgaaaacttaattttttttttttttgagatggagtctcgcactgttagccgggctggagtgcagtggcacgatctcggctcactgcaacctccgcctcctgggttcaagcgattctcctgcctcagcctcctgagtagctgggattacaggcacctgccaccacagccagctaattttttgtatttttagtagagacggggtttcactatgttggccaggctggtctagaactccggacctcatgatccacctgcctcagcctcccaaagtgctgggattacagacgtaagccactatgcccagctgaaaacttaatatttaaacaaatttgatgctgtggctacaaaggattgcaactcttttccataaactccaagtttcagggttttccaactttaggaatttctatgtgtaaaatccagctgtcagcgttattgaactttgggattttgtctaagattgtgtggaagaatgtgtaggatacaagtgtggggtgaccagacacctgcggtggtgctgaacgatctcagacgcggtgtcttcaagtcatcctgcacagagggccgtgggtgtcagtgcctgcaggtgacggatggggttgggggagaggaggaggatgccggaagatggatgtgcagccacagcctctggagatcaaagtcaccactgacgagacagccagaggctcagatcagtcactcgtctccaacagcactgccctggccgacttcctcaggatcgcagcatggactcaggagggctgccatctggcagggtctgtgctgtggcagctcaggttagagcaacaggcctgctcctgccacctcagaagcacttgctagttagtcaaatgttatggcgcccttcagggggcctccaggtctttcacgtcttggaagtgtggcaacacattgggatgtgctggaggaagaaggtcaccctcggctctcagtgcccttctttagggcagcagctgccctctgaagatttggatgaattccaagaaagaccgtccttcgtgtctttcacctccgcgcctgctccctgcccctcagccttgtcccgttgcgtgcatgctgtccccgcctcagcaccatcctgctacacgcatgctctccccacctcggcaccatcctgctacacgcgtgctctccccgcctcggcaccatcctgctacacgcgtgctccgttttccgtgcctcagtgtcacgtttgtgtttctggttcactgtgctgttgatctgtgtgttacatcaaatgcagtttgttctttttacgttgctgtgttgtatttcctggtgtgcagaagccacagtgcgcttatccattctgctcttgaaggacttgagattgttttcagtttgtggctattagaagtcacggttgctatgaacattctcacacagatgtccctgtggacagttcccttggatccgcaactcccagtgccggctcacaggctagatgtatgtttcatttcagtggaaactgcggaagagttctcaaacgtggctgcatgtttcacacaccccagccccaaatgtggctgcatgtttcatacgcccccagccccattctgctggtaccaatttactgtattagtccgtgtgcacactactgataaagacatacccaagacagggaagaaaaagaggtttaattggactcgcagttccacatggctggggaggcctcagaatcatggtgggaggcaaaaggcacttcttacatggcggtggcaagagaaaatgaggaagaagcaaaagcggaaacccttgataaacccatcagatctcatgagacttattcactatcatgagaatagcacaggaaagaccggcccccataattcaattacctccccctgggcacctcccacaacacgtgggaattctgggagatacagttcaagttgagatttgggtggggatgccatcaaaccatatcaggagtccttaaatttgttaaattccccacatgtctcctcttctggtgccttcatttgtccctacagaggttctccgcgaagcactgtgcttcccccaacttgtttcccttcagcctggagaacttcttttcaatagttcttgtagtgcagctttgctgacaacaaatccctcaattttgtttcactgaaaatgtttttattgcaccttcccttttcaaaaacagctctatcgagatacagttcacacaccgcaaaattcattattgtaaattttgaattaagtagccattacctcaaaccagtgtccatttccccccattcccagcccctggcaaccacgaatctgctttctgcctctaggatttccttgtttgagatggcagcgtgtgcaaatggggcgtgtcacactcagtcttttattccagcttctttcacttgcaggatggttctgagtttcatccatgttctactgtgtgtattaataacttgttcctgaatagtacttcatcatatggatataccacattttcctcatccattcaccatctgatgggcatttggactgtttcagtttggagctattatgaataatgctgctatgaacatttacatataaatctctgtagacattcattcatcttacatagacacagagggatagaattgatgggttgtatggtgactttctgtttaatgttttaagaaactgtcaaactggccgggcacggtggctcacacctgaaatcctagcactttgggaggccgaggcaggtggatcacttgaggtcaggagtttgagaccagcctgaccaacagggtgaaaccctgtctatactaaaaatacaaaattagccaggcaccgtggttcacacctgtaatcccagctactcgggaggctgaggtaggagaattgcttgaacccagggggcggcgattgcagtgagccaagatcacaccactgcactccagcctgggcaacagagcaagactgtctcaaaaaaaaaaaaaaaaaaaaagaaaagaaaagaaactggcaaactgttttccaaaatggctgtgttgctgtacgttctcatcagcagcgtatgagagttttcatttctttacgtcctgccaacacttgtcactggcttcagtttgcgtttccctaatgactactgatgttaagcttttttttttttttttttttttttttgagatggagtctcactctgtcgctcaggctggagtgcagtggctcagtctcggctcactgcaatctccgcctcctgggttcaagcgcttctcctgcctcagccatctcagcagctgggattacaggcgcacagctccaggtccagctaattttttgtatttttatagagaccaggtttcaccgtgttggccaggctggtcttgaactcctgacctcaagtaacctgcctgcctcagcctcccaaaatgctgtgattatagccgtgagcccgccgcacccggccagatgttgagcattttttgtgtttatttttacttttttccttttaaattatttttgcagaaacagagcctccctatgttgcccaggctggcctcacactcctgagctcaagggatcctcccgcctcagcctcccaaagtgccgggattacgggcatgagcactgcacccagtgctgttttttacgttcttgtttgcatccgtatgtaatctttggtgaactgtctaatgaaatctttggccatttttaaattgggctgtttgtcttcttactgagttgtaagagttctatgtgtattccggatacgagtctcttttcagatgtacggtttacaaatatttcctccaactgcagcttgtctttttattttcttaatgtgtcttttggagcacacattaattttgatgaaattcattttataaaaaaaattttaaaaataaattcattttatcaatttttaaactttatagattgtgcttttggtatctcatctgagaagtctttgccaaaccacaggtcatgtcatgaagatattcccttttgttttttcttagaagttttctagttttagctcatacgtggaggtttctgacccactttgggttaattttgcatatggtgtgaggtagggtctaggagtcaccttctgcatggagatattcagtgtgtcagtgccatttgtgagaaagattatccttttgtccttttccctattggggacttggtttctttgccaagaatcacttgaccagatatctgtgcattcgtttatttctggactctccattgtgttttgtgggtctcttgtctaatcttacacagcatcacactgtgttcgttacttctggtttacgtcagttttggagttgggaactgtgtgttctcacctttaatctgccttttgaaatttattttggatcttctgggtcctttgccttttcgtgtaaaacgtaggataagtgtatcaatttctgcaaaataaagcttgccggaattttgggaagattgctttgaagctggagctcagtgtgggaagaactgccatcttcacaacatggagtgttcccgtctgcgagcctggcctctctccacccgcttatctgttcccctccctccctcgatggcagtgttgtgggtgctgctccgcggtgctgctgtctcccgcactctggtcgcctgtgtctttgctttcccgtctgtgggtcagcctagatcacccccgttgactgtgtctgacttttttcctcttttctgctgcgtcttgtttgttattaggtctattgaatgaattcattttggatcttgtgtttttcagttttatgattttttgcagttccacttctctttgcaattctccatcttccccacgttgttcatcttttctttgaaattccttaatctgcttattgcagtgatttgaagggccttgtctggtgattcggacgtttggatttcctgagacttcttcccttcagttggggatcacatctttgtgtccttacatgctttgtgactttgaagggttccagtctttgtctttgaaagaatgatattatttcttccccggagattcctgcctttctctgccaggcagctgcggtgaggcactcgtcactgcagtccagtgaggagatgagatgggctggggctggactgtggcatcggcatccgtcgaccccagtttcaacgccgtgtgggcgagatctgtcctgtgtgtcctgggcctcccttaggtgctgaccccacagcacgaagagtgccctcctccctccgccacacccttcggtgctccgtgtggaacaccgcgggtagagagggccatggaaggaatgcggctcaccagctcttcctgaagctttatgggcgacgcgagaacccgctaacgagtgaggaacttaaaacgtatttatatgtaagcaagaaatgtttattatggagtaaaatataaaattcacatgactcttttaaataaaagacttcacccgttcgctagtcactgcatgcctgtccatactgggaagcatgctgacttcaggtctgcgggcagccaggccctcctgccagcttccccaaggtgtacatccgccctctctgtgtagctggaagagcctgaccactcacgtctctccaggccacagatcccgaagcccttttctagctctgttcacgattgctcttcccctcacaggccagacgcagctgtcccgcgcaacatggcttctgtgggaaggggtcagagtttgaggcaccccttttagaagggaggcgctgcagactcttgaatgtgaaccatgagaacgctgtgcctggagccaggagcctccgccacgggccccagtgcctgctcatcttcctaccgagtgcttcctttccttcgtaggtttgggaaaagttcttaagttctgaaacgccgcggatcaatgtctttatggcagtgcctacaatatacaccaagctgatggagtactacgacaggcattttacccagccgcacgcccaggatttcttgcgtgcagtttgtgaagaaaaaattaggtaagtgaaaagagcccactttctcgttcagaaagtcttaaagatcaacagatacgacttatttctaataaatcactcctactaagttctgggaagcagtgctttccatttcctttcaatgttccctctctctctacccgtctccgtctctacctctctaactgtctctctctctctctacccgtctgtatgtatatctgtaatctcttccacgtcgatagctgcctggattctgtatcgctctctctgtcacactctgtctctctatctctctctgtctctctttgtctctctctctccatctctccatctatctgtcttctctgtctctcttgtcagactctccatctctgtcttctctctgtctctctccatcgctcttcatctgtctctccgtcttctctttctctatctctcctgtctctccatctgtctctatctctccatctgtctttgtctccgtctgtctgtctgctctctctcctgtccgtctctctctctctctgtcatggcgtctgaaggacaagggtgaggacagtgagctgacccgcttgctcctgcttcatctgcccacatgtcccacggcgcctgcctctcctatgcagtctctctgccttcgtgggcagccctgtgaggcctcctgcctggggcacgttctgctgcttttcctctcagccccgctcctcccctcccagctccctggataaacccctccctcccaggacaagctggtcttttgggccacccaggggcgtgtttgctctgcactctcccatgaacctgcaggcgtgggaacgtttcttttccctcgtggctgttgaggtgtggttcactaactggaaacgcacacgtgtggctcagtgagtcttcacacgcatcacaggcccgcacctccagcagagtcgtgggtggggtattttttctttttgtgagagggaggggtggcgtggagggtgcactgcaggaactgaaggctccactgccatccagtttccagtgggatgtgtgtgtctgtggctgccgcgcgctcctcccagtccccaggaagtgcacagggaagcggcacctttgttcctggagagaattccgggttgtccaaggcacatgtctgaaccgcttcgctctctttgccgttcccttgccccttttctgtgaggccaccggagcccatggttttgctgctgctactgctgggataccctggggctgggcaggccccaagctgagcagggtgagcacaacgttttaccaaatctaaggaaccaagggcaagaacgaggtcagtgaaggagaggatcaggtgatttctggggtgacagaggcaatgagacctcggccatctggatctcccagcgggggtcctgtcagtggtgcctcctcgtaaagcaggggcagcagcagggaccactccgctcagaccgcaaacaaaagcgccttccctactgcccgtgaggctgcgggaaatgctgtgtgagagcgcggggactcggagttctcagggcccgtgttctcctgccaagcctgagctgaccctgtgggccaagatggctgcagttctgcgggtggttctgagccccttgggtgtgcccggccccaccccttgggtgccgcggccattcacccatgtccgcgttctgctgcagagcctgcaagctgagccggctgtagtccccggatgtgcctggccgcagcctgcagcgccgtggctgttcacccgtgatcagctccgtggtcggcagctgcacggtcactgctgttcttgagcgtggttgtgaacagcgcaggaactttgcaggggacaccgcggaccctaagcacattgtttaccctcattagctgttggacctgcttccttctaaaatacacccaacagatcgttttcaaaaaacaaagtcacgccgtagcgcagactgcagcgttggtcccgggtgtcgcacagtggtgctgtacccacggcctggggctcctgcactcgtgaaggagctgccacttttgcaagcaagggccgcctcctgaggggctaaacctgccacctttgcacgcgagagccacgtcccaaggggctaaacctgcctttggttgtgccgcgtaggctgatggtctcaggctcagctgccctgcccctcccagtgctggagaagtggaagaacatcacgggccacaccctgctggagcggtatggcatgaccgagatcggcatggctctgtccgggcccctgaccactgccgtgcgcctgccaggtacgagcacttcccacagctgcgttcctcttccactgtgctctgagccccccaaggtgggccagtctcgaaccacccacattcggactgaagggcggcatggaggatgctcccccgtgggacaggccactcggccaggagagcactcaggatgcactgcgacctgtcccctctgggtagatcagccttctcccaagtctcagtcgggtggatgggggaggtgtctgtgctggcccctggctgtatgactggggagacaatgggaagaacagcaatgcctggaatgcaggcgtcagtgcatgtctcagaggaaggcggggggccatgctgttggctccagaccacatcagcagtggtggcagcctccgtctgtctggagtccgggtgccacacagcgccagcagcagtgccaggagaggtgggtgtggtgggcagggtgggatgagtcaagcacctgtcttccttctctagatgtgggctcctgataccgggcccctcttgtccagccttccctaacacatcccattctgactttcatctgacccaaccatttgagccctgggtcctccgctgggacttctgggaacagagcccacagctggggggccaccctgctgctttctgcgcagcccttccagtctgtctagagtagaagagagatctcagtgcagacttaaagtgagaccatcccgcacatctgtctgtgcagctgcttacctgcagacccagtaaaaattcacccctctggcgtgcagctctgtgtgtcttaagaaacatcatcacagtcaaaatagagaagggttcctcgcctcagaaactcccttcctagtgctcagcacctcctccacccccgaggcctggccccttgttcctgtttctcttcttgtggttttgctttttctgggaggccacgtggctaaatcctgcaggacgtggcctctgagcctgtctgcttccgcccggcttccgcccacagtcaactgcctgtgctgtgtgcgtcagagcccgcgcctttccctgctgagtggcatccgtggtgtgggtgcggcaccgcttgtgaccctgttttaagcaatgacacgtgagatgttatcaacatttgtgtgcaggtttctgtgcgaacgtggttttttatttcacctgggcagatacctaggagagagattgctgtgttgtctgaagctttcaagctgttctccagagcggctacaccatccccttccccctgcaatgggtgggaggtcacgagcacctgctgctccagcgggcggtggtggtgtctcgttgagttcatgattctctcatgatgggtggcgttgagcacctcttcctgttcgtgtcattccgttttcaactggggcctttgttttcttgagttttgagagcttttaaaattcgggacccaagtgtcagctgtgcgattttaaatatcatctcccagcttgtggtttgtcttcccattcacctaacagcgtctttaaaatcaggagttttaggttttggcccggtttatcaatttgttttgtgaattgtctgatgtcatatctaataaatccttgcgtagcccaaagtcacagagaatagtttcagctcttacgtttgggaccatgatccattttgagttaatgtttgtacatagtgcgagatacggaccacagttcttttttagtgtgtgaatgtctaactttttagcactgttcgttgaaaagactcccttctccatcgaacagccctttggatctttgttgaaagtccgtcgactcctgaggggtcggctcctgggctctgctctgtcccattgctttccgtgtgccctttggctcattccatgcctgcttggttcctgggactctagggtaagcgtggacatgggggttcaggcccaggcagggaccagctggtgccaggcagcgatacggtgctggggcctgcaaggtgagtgtgagggctggctggctgctgggctgggaggaggagagactgtaggctcacgcccctttgctgggcctggggagccatgggggctgttaagtgtattctgagtgtaaagtctcggtttggctggggcatcctgagcagaatgacagggccatggcagcgagatcctcagctgccgtgcagagctgccagtggggtggccgcacagagtgcagtgcctgctgcaacagtgcccagggcagtgggcgggtgggggcatgttgtgaaaagaagtcagtgtgagtgatgagaaatacatcctagtctcagaccccaggaaaccgccgtcagtgctggtggcccctgccctgggccggctcccgcgttagtctcagaccccaggaaacctccacctccgtcagtgctagcggcccctgctctgggctgactcgcgcatctccacgatggctgcggcaccagctgtttcttcggtggctaaagctctctggtggaaataagatggggaccttgaaatcaaatgtgactggtctgttgagtctctgtccttatcgttgtccttcttagtaggatgtgctggttttgtccagtgccaccggccacagtcaccacgtaatatggacggaatgagcaaagcccggctcgctgaggctgcaggctgcaggcaagtgaggactgaaagggtaacgggctctgggctttgtcctctctttgttccggacatgtgagcaggacaagttctgtgtattcagaatctgtctgcacagtttgtagttcatgatgactgttcatccacagcattgctttgtgggcgtcctctcttttgatcttctcgaaacagcccctgcgatggggtcatattttgcactcacatacaagaacccatgagcctgcccacggtcacgcggctggtgagtgatgcacttcccaggagcacggtgacctcttcaatggccctcactagagaagatggacagtgcccccctagccttttttactggaacagatacaaggctgagaagctgaaatcaggagcagcccagggaccactgtctacaccgagggagtcatgagcagcccagggaccactgtctacacccagggagtcaggagcagcccggggactgctgtctacaccgaggatgtcaggagcagcccagggaccactgtctacactgagagcgtcaggagcagcccagggaccgccgtccacaccaagagcgccaaggagcagcccagggaccgccgtccacaccgagggcgccaaggagcagatagtagcccagagacccaggggaggctcagcttccccacgctggaatcagaactcctaggcgaacaggaaggagccccagacagatggcacagggagaggagtccccggctgaggagggggatccagagaccctgaagcttcagggttattgggcaagaaacctgagtgcaccaatccccgagtcttcagctaccgacggcaggttccctcgggtgccggggatgctccctcttctctaaggcagagcccacagtaggttccctcaggcgccaaggacattccctcttctctaaggcagagcccacagcaggttccctcaggcgccagggacgttccctcttctctaaggcagagcccacggcaggttccctcgggcgccggggacgctctctcttctctaaggcagagcccacggcagattccctcgggcgccggggacgctctctcttctctaaggcagagcctgacggcaggttccctcgggcgccagggatgttccctcttctctaaggcagagcatacggcagtttccctggggcgccggggacgctccctcttctctaaggcagaatcaaatatctgtgattttatccttgcctttaaatcaccagcagtgtgagttctttggtttggaaaaaagtaagtaaagtcacctcagcattaaatccaatatgccccacaaaaactccaaaatgcagcctcctgagccatgtttctagagggcacggtggaggagagctttcctcactctcaggctctaacccccaccctggtggccatggccttgacccttgggtcggctccagccacaggctctgagctcatgcttggcctcgctgctcagtgcactgtccgtgctcggaagagagagaagctgggtggagggtgagctctgtcgtgtgttatggttacaggcctgctccgtgcggttcctgtggagggagatgaataattcatggccgaccactgctgggcctcgtcacactctaattggaggttgagctcagaggtgctcacggctcctgggccactctgtggcattgacagggagctccagggcctcattggcggtttccgttccctgggtcccagtccccagtcagagttatcagggaggggctggctgacagcgattttagaggtgggctgtggcaggaaggcagtgccccccacctgcctgcagctgcgctcccatctacattggcctttgcggggccagcctctgtccactctcttgagctctcatgtccacactgtcacatgcccggggcacagcgagcggcacctggagtgtggggacccctccctcgagctctcacgggtggcacctggagtgtgggggcccctgcctcaagctttcatgggtggcacctggagtgtgggggcccctccctgaagctctcacgggcggcacctggagtgtgggggccactccttgagctctcatggacaataccactgcttggctgctgcagaatccagacaccatcccagagcctcttcagcctctgcagatggtgtgggacggccacacggcctccccacctgcggcccccgcccctaccccagccgtgccgtgtccttgcgctgcgtccccgccccagtagaggcatcaccaggaagaggcgaaaggccgcctgtgatggtcctcttcttatgaaacgcccagaacagaaaaaccacggacgcggacagcagacctggtgccaggtctggggagggagggtgtggcggtcgtgggctgtgcgggagttctgactaggggaagtggggggctgtgcaatgtgtgtgcggaacaccgccgtgccgcgcactgaaatgggaagtcatgtgttatgcgggtttcacccccatttaaaaatcttcagaagcaaaacataaaggaggagaaaggatggaagaaagggggctgaagctggccccgccacaccccccatagtggtgacacgggtttctgaccagagtggaggttcggggcgtctgcatacctggaaccacagagaactcccgaggtgacactccgcacaccacactagcccggcttcgcctgcaggaccccaggtgtggacaggcccagcaggatcagcaagaccgagccgggcaccgacagcccctcaccaagcgtctggaggccgggacgccccatggattgcagagttcactgcactgaccctcgatgctgacccttgaagtgccggaaatctcagcgtggactcagacatgataagcgttcaggcactcccctgacgcaggccagggcaaaggcctcacgccccgggatagacaggaagtcccacgtctgctctgcccctaggtcatgcccgtgctgacgccacatcgccagggccgcactccatgagcagcctctgccgtcccaccagcaacctaaaccacaggcagagcgaggctgcggcagccctgcgtgtgccggcgggacacgtctcgccacctgggctctgcccccaccccggccagtgtaagatatgattttagccacgttgagactgtgcaggtgggatggatacactgagcaaatcatgggtgtctaataaatgagccagtacaaagtgtggtccacctgccatgcagagttcaggacagcccctcctggggacatagggcagatcctgccttagcccgtcgtgtgccgggcacacacaggtcccctcatcgtggacagccccggggccatcagggcaaggcgccagccctccctggccagcaagtgtgtaaaagtgggaatgacaccagaatctgtgggcagctgtgaggctttgggaagtaactgggaaagtgatgtatgaggggcccagggcaggccaggcccagcgtgccacgtgagtgcctgctgtgccacatggccatcactgtggcatcggctgggcctgagcacaccgtgcttgccagccacgtatcgtgtggcttttcacctgctggtgcctacaccatcttctctctgggtcacagggcacgtcgctccctccacacagactcccgcacgtggcacacgggagctcagcgggatccgagctcagtgtgtgcttctctcctccaggttcctctcactccagcctccccttcagtgtttctcctctcctgtaggttccgtggggaccccactgcctggagtacaggtgcgcattgtctcagaaaacccacagagggaagcctgctcctacaccatccacgcagagggagacgagagggggaccaaggtaagccactctgctcttggcaggtgggcggccgtgtgtccagtctaggccccccagggtggttacactggtgcatctttcccctggaggcagactcccctccacgcaggggaccagccccctggacactgcaggtgctggctggtgttgcaagggcactggctggtgttctgggccctgcctgctgcgtgtccgtctgtgcgttcacagagcagtgggcagagggagcccagggcggaacgccaaagggactcacacccgggcacacagctcctcccaggggccctgtccacggggacaggctgacgtgggccatgatggccttggctaagcggaagagataaagagcagaggccgttgttgttgatgggaatctggttagaaatatgaactggcctgaccctggcacccgtcctgaggggacgctgaccacaggcccccatagtaggtgtggggagattcacggggccctgcacgcggaggtgggtgcctgtgcagtgctctgtggctgcctccttgtcttgtgcgttattctaaagctgacaagggtgaacaagaacaaaggacattgtctcatttctgtgaggattttaacatgagagtctgctcatcacacgtgaactcatcacagagaaaggtttagggattatggggaaatggaatcttgatttaaaaggaaattattttctctgaagccagtatccacacctgataccacacatgattgactgtgttgccctgaggttttcaaagatcgagggatcctgagtctcatctctgtgcatttccttctctgtgacaccatcttggccctcacgggcacaactgagctccctgtgcagaggctgaggggccgtgggccttgctctcgtgagtgaacagccacacgccctccttgtaccttggtttccacacatgaccacgtgagggttggagcgatggtcgtggttggacgttttagctccagcaaccaagtaggatgtgggtggctttcagtgtcattaaatgacactgaaaggtgcagtggccgcaccttgtgtggagggccacacggcgtgtcccgcctggcctgggccccccgcagtgggctgttatcccccgtggccctgaagtgggtattctgtttccccgtggaaacctctcacctggggccacctgcagtggccgcaccttgtgtggagggccgcacagtgtgtcccgcctggcctgggccacccgcagtgggctgttatcccccgtggccctgaagtgggtattctgtttccccatggaaacctctcacctggggccacctgcagtggccgcaccttgtgtggagggccgcacagtgtgtcccgcctggcctgggccccccgcagtgggctgttatccctgtggcccccacagagccatggggcaacttgctgaaacccacctgggtggctgccccttgctatacccacctcccctgccctctgtagggccccagcccatgctgttgtcctgacatgcctctcctgggattcctgcctctgccctgctggtactaggctgctggccacaccccacatctcaggttcctgaatacaccggcccttcctggctctcaagtctgtgccctgcagtgcccctgcccccaactcgaggacctcccagctcagccagttccaaccctgtctgcagggacggggctcagcctgtgcctgggttggggacaccatctagtcagaaatgtccccagcagagagcagaacgtgagtggcgtgtggaggagtgagacgccccgtggctgtgcagccctctccaggtgtcagtcagctgacactcctgcctctgagcacctgctctgccggaaatggcagaaatgttgccagagaaaggggcggagcgggggtggggagcatttctgtcttaaattaaaacaaaacttaactgcttcacacctgcattggctgccgcgccacctgattgctcctgcctgagtttctttaattatttgtgtctgctggtttcttccctgaagcagtcttgaaatagaagcagcagcctcagctacctgggcaccctgacagtcagagacaccgcacaggggcctctgcgacaggcatgcaggcagaccctgcaaggtgaagccgcacagatgctctggggctgcttaaatctcagcgtacggggggtttgcatctgctgacagcaggcccgggaacatttccagttcagccaaggagtcggtgcagcaggtggagtacagctgccctgcggggcctggctccaccaggggccaagacccttcgtggggaggagcacagcctgagggcctcagggtttgtgccctccgacacctgagattcagggctcccagaggggtgggtgggcgccccaggacaaccaggtgatgatgggcgctgtgaactctgaaaagccccagcatcagagacctgctgctctctcatgtgaagggactccccaccccacgctcacactcgcagacgcacttggtactttcatctgagtctcacgcagtagcccttctctccacagcatcccagaacccgagggtgcccctcactaccacggtcccggatccacgtggctcaagtgaggctgtggccgacagctgggctgtccgatccactcttgtctgtgccgaggcgtgggtcccggccagcgtccctccccagaaggtctccctcaggactagtcatgagaatggccatccctaggcctgtggagtgactcatgactgttcctgggcagatgatcagccaggccttcagagctgaattaagaggcttggtgtcatatttgtcaggaaacagaaagtacctgcagaaaggaatgtgccctgtggggatgggaggacaccttcccaggatcatccccggggccagagtatctggaccctccccaggtggcagctggcctgccaggcccagggctcagcctcctccatcacctcgctgaggggctggctcctaccactccctcacatcctgtgacatatcacaggtaccacacacacatgcagtgcgcgcacgggtatcacagatacacgcagtgtgcacacggatagcacacgtagtacgcatgggtatcacatgcagtgcacacacaggtatcacacgcacgcagtgtgcacactggtatcacacacatgcagtgcatgaacgggtatcacacacatgcctagtgtgcgcatgggtatcacacacatgcctagtgtgcgcatgggtatcacacacatgcagtgtccacacaagtatcacacacacatacacattgtgtgtgcacagctgttacacacataaatacagaaaaaaagacctgatggaaaccccagaagtcaatatggctgagctccaggccggactccctgacgatgtcataggacgagggggcgcgtgtgcacactgcatatatgtgtgtgtgagacccgtttgcacactacatgtatgtgtgtgatacccctgtgcacactgcatgtgtgtgatacctgtgtgtgcactgctcatgtgtgtgttacccgtgcgtgcactgtgcgtatgtgtgtgatacccgtgcgtactctgcgcatgtgtgatacccgtgcacacactgagtgtgtgttacctgtgcacatgctgcatgtatgtgtgtgtgttacccatctgctcactgtatgtatgtgtgtgagatacccatgcgcacactgtgtgtgtgatacccatgcatgcactgcgtgtatgtgtgtgatacctgtgcacataccatgtgtatgtgataactgtgcacgcactgcgtgtgtcacatatgcacacactgcatgtgtgtgtgatacccatgtgcgcactgcatatacgtgtgtgttacctgtgtgcaacactgcatgtgtatgtgacacctgtgcgcacactgcatgtgtgtgtgatatttgttgaaaagactaccctttctgcattgcattgccattgccactttgccaaagattaattggacatatttgagagggtctacatacaggttatctgttctgttcccttgatctatgtttccattcctctaccgacaccacattatcttgactgttgtggttttatagtaggtcttaacaattgtagtgtgatttcaccagctttattctttctcagagttgttttggtgcacatattaattttagaattagcttgtctagccgggcctggtggctcacacctgtaatcccaacactttgggaggccaaggtgggcagatcacctgaggtcaggagttcaagaccagcctgaccaagatgatgaaacccgtctctactaaaaatacaaaaattagccaggcatggtagtgggtgcctgtaatcccagctacttgggaggctgaggcaagagaatcacttgaaaccagaaggcggagtttgcactgagccgagatcacgccactgcactccagcctgggcaacaagagcaaaactctgtctcaaaaaaaaaaaaaaaagaattagcttgtctatatctacaaaaagttcttttgaggtcttgaatggaaagccaggtgtagtggctcatgcctgtattcccagcattttgggaggccaaggcaggctaatcaacttgagaccaggagctcaagaccagcctggccaacatggtaaaaccctgtctctactgaaaatacagttagccaggtgtggtggcacacgcctgtaatcccagctactcgggaggctgagtcacaagaattgtttgagcctgggaggtggaggttgaagtgagccaagactgcaccactgcactccagcctgggcaacagagtgagactgcctcaaaaaaaaaaagagagagagagagagagagatgttgattggaatttagccattctgatcggggagatcacttgggggagaattaacaattactatgctgagtcttccaatccatgaacatggtatgtctctccatttacttagatccgtgaacacggtgtgtctctccgtttacttagatccgtgaacacagtgtgtctctccgtttacttagatccgtgaacctggtgtgtctctccatttacgtagatccgtgaacacggtatgtctctccatttacttagatccgcaaacacggtatatctctccatttacttagatccgtgaacacggtatgtttctccatttacatagatctgtgaacacggtctgtctctccatttacttagatcagtgaacatggtgtgtctctccatttagatatactttggtttcttctgtgttgtattcagcatatagatgctgtacttgtgttaaatttataagtaaatgtttcttcttttctttattcctcctatttcttctcctccttttcctctcctttttaaactattgtaagtatggcaggtgggtatggggggagagttgtttgtttttttgagacagaatcttgtcctttcgcccaggctggagtgtagtggtacgatctcagctcactgcaacctctacttcctgggtctaagtgattctcatgcctcagcctccccagtagctgggattacagatgtgtgccaccacacctggctgattgttgtatttttaatagaggcagggtttcaccatgttggccaggctggtctcaaactcctgacctcaagtgatctgcccgcctcggcctcccaagatgctgagattacaggcatgagcctctgcacacagtcacgtttttgttgctgttgttagttttcaactgttcattgctagtaggtagaaatagaattgatttttgtgtgttggcctcaaatactttagttgttaccttgctaaattaacttactagttttaggagattttaatagacttcttgggaatttctacaaatacaatcatgttttctgcaaatacaaacagttttatttcttcctttccaacctgtatgaccaaagccctgactaggacttccaatacgatactgaacagaagcagtccgagtggaccttcttatttctgatcttagggaaaggattcagtctttcagcaagtgtgttagttactggctttttgcagattccattctatctataatgtgcttagactttttatcactaaatgtatgttgaatattttcaaaaagcttttcggtattgatggacttttctttattaggctgttaatatggtagattacattgaaccaagctttcattcccaggacaaaccccacttggtcctggtgggtcatttttttatatatagtactggatttgatttgctagcatattgctgagtatttttgcatctgtattcataagaaattttggtctgtagtttcccatttttgtactttctttgggttgtgtttgagggtgatgctggcctcattaaatgagttgggaagtgttctctcctctttttttttctggaagagattgtgtagaattggtattatttcttctttcaatgattggtggaattcaccaatgaaatcatctgggcctagaggttttcttttctattattattattttgtgtgtgggggataaggtctcgttctgtcacgcaggctggagtgcagtggtgcaatcatagctcactggagccttgaactcctgggctcaagtgatcctgcgtcagcctcccaagtagctgggaccacaggcatgtgccaacatgcccagctaattttttatttttatttttgtagagttgggggtctcactatattgcccaggctgatcttgaactcctggcctcaagtgattctccctcctcgcctcccaaagtgctagggttacaggtgtgagccactgtgccctaccaacgtttcttttttgaaagaaaaagaactatgaattcaatttctttagtgcttataggactgttcaggtcatctgttgcatcttgggtgatttttggtacatatcatttttgaggaattggttcatttaatctgttaagtttctttatgtagagtttcccttcaggccacgaaaccattaaaaggttgattaaaaggttaataagggaattcccatcttaaccttttaatggtttcagggcctgaagttatgtggctcccattcctcatgttggtaatttgtgtcttctgtttcttttttctttgttatccttgctagaagtttatctgttttatggctcttttttcaaagaagtcacttttggatacattgatttttctttactgtttttctgttttcagtttcactagttcttggtttcttctacttgcttctggcttttctctttttctagttgcttaaggtgaagctttagattattgatttgagacctttcctctttataatgtgtacatttaatgacgtacgttgcccttaagcattgctttagctgcatccccaaatttatatataatatatatatatttttttcttttttctttttttttttttgagacggagtttcgctctcgttgcccaggctggagtgcaatggcatgatcttggctcactgcaacctcagcctcccaggttcaagcaattctcctgcctcagcctcctgagtagctgggagtataggcatgcgccaccacgcccagctaattttttgtatttagtacagatggggtttcaccatgttggtcaggctggtttcgaactcctgacctcaagtgatccacccacctcggcttcccaaagtgctgagattacaggcatgagccaccacgcctgacctaaattttgatatatttttattttcatttagttcaaaatatttttaatgttccttaagacttcctctttgacttgtggattatttagaagtatagcacatattttccaaatagttggatatttttccattatctttctgttactgatttctagtttaagtccattacagtcaaaagacgcacttggtatatttcaattcttttaaatttgttaagttgtgttttgtggcccagaatgtggtttcttttcaggaatgttctggtgtacttgaaaagagtatatattctgcccaggcgcagtggctcacacctgtaatcccaacactttgggaggccaaggcaggagaatcactgcccaggagtttgagcccagcctgagcaacatagtgagaccccatctctacaaaaagttggaaaaaaaaaaatagctgggcatggtgttacatgcctttggtcccagctacacaggaggccgaggcgggaagatcgcctgaatctgggagtttgaggctgcagtgagctgtgatgatgccaccgcactccagcctgacagagcaagagtgtgtgtcctgctcgttttaggaaatgtctgttctgtaaattagatgaaggtgtttgatcgtgttgttcagttcttctatatccttgctggttttctcaccacttgttctgttactaagtgaggggttgaattttccaactataactgcctgtttctgctttcagtttttgcttcatatattttgaaagtctgttgtttggtacattcacatttataatgattgtgtcttattggtgaattgactcttattaacatttaatgctctggtaatgctctttgctcttaagtttactttgatattattatagctattttaatttctcggttggagtttgcatggtatttattgttctatccctttacttccaacctacctgtgtaattgtatttgaagcaagtttcttatacacagcatacagttggattatgtgtgttttttaaatccagcctgacaagctttgtaattggtatgtttagaccatttacatttaatgtaattattgatgtgcttgaatttaagcctaccattttactatgtgtttactattgttccctgagagttttattgctcaactttactgccttctttgaggttattttttcatattccattttaatttgtctcttaagtttttgaccataaatgtctttgcatagtttttttagtagtagttccagaaactacaatatacatacttccttttttacagtctacttaaagtcaacattttaacacttccagaagaatgtagagccacatccctgcctccacatcggttacttaccctctgcctttagagtgtagtcagtgtaatacctgtatttgttgtaaactccgttagacaaaatggtaatttttgctttcaacagtcaaaaatatttcagagaacttgagaagaaaggaactcaacttcattcatccaaatatttgccacttctgttgcttttcctgtattcccaatataccaagtctccttctgataccagtttctttctgtctgaaggacattctataggaattcttttagatcagatctgcttgcaacaaattaccttatttttcctcatctaagaatgtctttatcttccttcctgaaggatattttcattggattaggaattctgggttgacaactattttctttcagcactttaaaaatatgattcttggctggatgtggcagctcatgcctatagtcccagcactttgggaggccaaggtgggagtggatcacctgaggtcaagaatttgagaccagcctggccaacatggggaaaccctgtctctactaaaaatacaaaaattagccaggcatggtggcacacacctgtaatcccagctacttgggaggctgaggctggaggattgttttaacctgggaggtggaggttgcagtaagccgagatcatgccattgcactccagcctgggtgacagaatgagagtctgtctcaaaaaaatactactaataatataactccacttctttccggcctccattgtttccgtggagaaatcagtgggcgcaggaacccttgttcctctctgtgtgtcagtgattggattatgatgtgtctgggcttggacatcttttggtttgtcctgtttgggattctctcagcttctttagtttataggcttatgttttcaccaaattttgggtttttagccaaattttatcaaacgactttgtgcacctaagtgttatcttttcttctgtcactccagtagcatgaacgttagccctctgtgtgttgactttcctggtgatttttctctgctgttcagattttgggtcatttctgttgctctgtcttcaagttgtcacgttcgtttcttcatcgtcctgctcctgaaccaatccatgagattctttatttctgtatttttcagtttttaaattattgtttggttctgctttatatctgttatttctttgttgagactttctgtttttccatttatttccaagtgtttgccctttctttctttttctttttctttttcttttttttttttttttttttttttgagacagggtctcactccgtcacctaggctgaagtgcagggctgcagtcttggttcactgcaatctccacctcaagcgatcctcctacctcagcctcccaagtagctgggactacaagcactgaccaccacacctggctagtttttatcttttttgtagagacagggttttgccatgttgcccaggctgttctcaaacacccgagctcaagcagtctgcccgcctcagcctcccaaagtgtgcccttactttttggagcatttttataatagtgctttaaagtctttctcagataattccaataactgtgttgtctcagtgctgttgtattctttttctatatgagttgctatttttctggttttttcccgtgttgagtaactttgtattgtaccctggatatttttaatgttagggatgagattcttggtcttgttgacattctgtgaagatgttgaggtgtttgttttactgtgacttggttggcttaactctacaaagtctgaccctccttccctgggattggtctcattgtcattttatttgtagggcctttgccttgctgtctctacatgtcccacaagtgtactgaccagtggccagtctgaccacgtcagtggagcagataaaggacagcagtggaaaaattcacgaaattcagataaagtccgtggtttctttgaaaaaacaaacacaaggctctgagcagccaggagttaggctgggcactgcacggaaagccccgtcaccatgtggggcaggtgtttcacccccgtgggtggcgtcagcccctcctggaggagcccaggctggcgggttggcagccccgtcatcatgtggggcaggtgtttcacccccgtgggtggcgtcagcccctcctggaggagcccaggctggcgggttggcagcaggacgacacactcggcagaggctgccatggggcagtgttggccccacggcgtttgagcgccctttctccacatcagatcagtgtgttctgctatttcgcagctacttccctggcccctggttttctgaagtccattccagatggcaggtgatgagcctcagtgagactcttgtacgcatcccttgacctccggggtcacagccagtcactttcacagtagagaagagtgagggtcgtggagctggcagctgctcatctgaagcccctgctccttctctgccctccccagaccctcctgacctatgagccgagggctcggccggtgtcttcacagacccaccgtgtccagggcctcccgtgccatctgttcctggtgctgcagggacccccagcccaggctcatataacccagcctccctcccgccctctccatggtcacaatagaagaacagtgaggctgtgtttcctggggccatggcagtgcctgcatgcttaacaggggcctccagggaccctccaccctcaggccccaccttcccttcccacggagtcttccctcttgtaattggtcactcagccctgtggagggcgctgcccgctccaagctgccccagcccctgtgggcaaggtgtggacaggtgcccgctgctgtgttccctggtttgagaaacgcccccgaagatgggatttgggcacaggttttagacgtggacaggctgcctgaatccagcccaggctctgagtgctgaggcctgggccggtaacatgctcaagtctagaggatggggtaggagcacgttcttctgtggctgttctgggaggaatgaaaggacacccagctcccggccagggcaccagggcccacagaggacggcgggaatgcttagctcagcatggttggcttccacctgtcaaagctgcgttttccaagcattccaacaaagcgctcagtttcagaaagcacgcggccctgggtgggccctgggtgggcagggagcagcccacagtttcagaaagcaccaatcccaagagggtgtgcccagctctgacctccatgttcttcatcctccacaggtgaccccagggtttgaagaaaaggagggggagctgctggtgaggggaccctccgtgtttcgagaatactggaataaaccagaagaaactaagagtgcattcaccctggatggctggtttaagacaggtaggacccagccccatgggagtggaggagaccccgaggggacaggcaggaactcattgctgcccacgttgagtgacaccgaggctgggagttcccagaattttcagccaaaggcagaagatggggtggagtggggctgggggccactgttacggcactgcctcctgagcacccggcctccccaccggcttctagagtgggctccttggccctgtccctcagtgccaggggccccagtgccccatgacaaggcttctacactgtccctcagcgcgacagccgctccggcacgcacgcaccctgaccacagacgccgggccccacgcagcccttcctggtggccctgctgcccctcgtgggctggggcaccctccacctccgaggtgtacccctgtacccagagacctcaccacccccacgcttagccacacttgtgccctccacatccttctccccaccagagtcagaagtcagctgacgcagtgcggttggtttgcagtgcggctgtttgtttactgttccacaaattagcacattctctctgcctgccagaacaggcctgtgggtgagtgggaacctgcccacctgattgaggtggcccaggaagcctgtggcggtcaggagagacggcggcgcccctggagcctgctggcagcccccactgccaccctcctgctctccctgagcctgccctgagctgctgctgcctgacccccctcctttgtgagaagctggcttggtcccaggatcccacatcccgccccatggggcgtatttggacagtggatatttcgacatttggatagtggacgtatatggatggacatttggatagcggacgtatgtggatgtgttactagggggtccttgctcccagagctcccaagatggtagcgggcagcttccaaaatggcggcaggctgcttccaagatggtggcaagcgtcgtgttctctgacctggggttcttggccttatggattccaaggaatggaatcttgggccatgcggtaagtgttatagctctattagaagccgtgggccacagaaaagaaccatggaacccagtgactagtgttcagcttgattaggatgaacgtgggtgcttagccgtgcaggaacaatggcgagcctttaggccagtcgggagtggcagtgggtgcctcgctggatcaggagcacagtggacaccctgcgggatccggaggaatagaagtcagcggcgggtctgcaacggcggcaagcagcagtggtggacggcgagcgaaagctcaacttgagccgtaactaccacggaccagaagagagtgtagttgcaagatttaatagagtgaaaacagagctcccatacaaagggaggggacccagagagggcagccgttgccaggtttatatcccgatcattgtccctcctgctgtgctctgaggagatagatgattggctattgtttacctcctgttttagcctaattagcattttagtgagctcgctttactacctgactggtcgggtgtgagctaagttgcaagccccctgcttaaaggtggatgtggtcaccttcccagctaggcttagggattcttagtcggcctaggaaatccagctagtcctgtctctcagatggacatttggatagtggacgtatgtccatggatatttggatagcagacgtgcgtgggtggacatttggagagtggacacacgtggttgtgtggctgcaggtactcactgtagtgtatttatccggaagatgtgcacgttgctcctgacccctgggtggtgagattgcggtggtttttcttttcctggtttttttttttttttttttggcctgtctatattttatgctgaacatcattattttataataacctttaagtaatattttccaaaaaaaagaggcccattttcatgcatcagaatctgctggcccaaaatcagaaacgcatctgccccatgcccttccacagggagcagagcggggggctgcagcgtgcaggcgggatgggctccttgagggatgctggaaggggcaatgttggcctgcagcctctccgcctcatggcctgatcctgtgggtcccagaggccctggagcatgtgctgctgtgaggcaggtgtgctaggtgtgtggcagttccgcacgtttgcaaagtgaaggctccgtgagcccctagagcagaggccagtgccccacgcagcatctcataggcttcccaaggtaccctgggaggcaccttcgtgggctggacatcagcagaggacccagggctggggccctagaagcctctctgtgacaggacgtggtcagcacatcaaacactccctcccaatttatcttttttatacatccccattagcgcatgctgatctggggaaacagcctgtccatgacttcccttcaaatgcagaattacaggaaccggacttgagcaggtcttgctctgagcatccctccagtgccctctgaatgccccgaccccaatccgactcacgctgcagttgttttatttatttagttagttatttttgagacggagtctcgctctgtcgcccagtctgcagtgcagtggcacgatctcagctcactgcaacctctgcctctcgggttcaagcaattctcctgcctcagcctcccaagtagctgggattacaggcgcccgccaccacgcccggctaatttttgtatttttagtaaagacagggttttgccatgttggccaggctggtctcgagctcctggcctcaggtgatccgcccgcctcggcctcccacagtgctgggattgcaggcgtcagccactgcgtctggccggttcttgtatttttaaattcaggtaaaagctgaagacgttttcttctttgaaagcacaggaaccacagccctgtggattttgcgagtcgcggggctcccggagccgctgggagggcagccgtgtgagatgcggggctgcgagcgtggaaacactcgcagtcgccagtgctgaggcatgtttcagccggggcggaatcacatgcattaattattgtacagagatgtctttagtagaaaatgattttgaaattcagtttaatttcattgtaatgtgctgcaaacaggaagggagtatgtgtgtttaattggctctcgggggtaaggcctggaagccgcatgtctttgtcacaggccattagcgatgctgctgcataatgagagcctgcaatcagctcacagctgccgctcctgccgggagagcatgatattaaatagaaatcaggagaaattaaacttaaccctttccctggccagcccctcctgccacacggattctggcataagccggcgggcacaggggacagccagggatggctggacacagctgaggatggccgaggccggcctgcagctccccaacggcctcctccgggtcaggatgagaggagaggttgccagctttgatgccagccgctcctgcctcccccacctgcctctgtgcctacagcccgcttctgcctcaagatcacacagcgggcttgtgaggccaggggtctccgctgctgctcaaggagatggcaaaggtctgtttcaggtaactcctctgacggccacaacgatgtcttcagacgtcaaaggtctgtctcaggtaactcctctgacggccacaacgatgtcttcagacgtcaaaggtctgtctcaggtaactcctctgacggccacaatgatctctgcagatgctctgactccacgtgccctcgctcagagacacacgcgcacatttgccacctggggcgagtggaaggtgacgtggaggtgggcacctctgccgggcagatgcgggagcagcagcagcagcagcccctcctgggggcatccaggggtcaggagaggggcggtagggcagggcggcatccctgcaggggtgaatggcgtcttaggctccagccgggtgaggaaacctgataaccgaactccttagagaagagccagggatcccgggaggaccaccaggagcttgtggggaaggactgaggggaagagccccaggtctcgggaggaccaccaggagctcacggggaaggattgaggggaagagccccgggtctcgggaggaccaccaggagctcacggggaaggattgaggggaagagccccaggtcccgggaggaccaccaggagctcacggggaaggattgaggggaagagccccaggtctcgggaggaccaccaggagctcacggggaaagattgaggggaagagccccaggtctcgggaggaccaccaggagctcacggggaaagattgaggggaagagccccaggtctcgggaggaccaccaggagctcgtggggaaggattgaggggaagagccccaggtcccgggaggaccaccaggagctcacggggaaggactgaggggaagagccccaggtcccaggaggaccaccaggagctcacagggaaggatggggagaggggagtggggggctggagaacccccagactgagaaattctgctcggagcgagaagggagctgggcccaggtggccccatcccccaaggttgaacatcagcccagcctcccaggccctccacgtgctcatgggcaccactgccgggcactagcttacttgtcaccctgtctgaggcgtgttggggtaggagcaagagtccgctgcttccagggcccagctggggctccatgtgtccctgggcaccccagaaccctctgggtctcagccgttgggttcttacatctgggccagtggcaaagggttaaagggaccttgtgacttagttgggactcactggcctcaagaagcgaaaatcagagggacagcagccccagccgccggggattccctgtggcgccagagctccccggcaggcactgtggaggccaagtggggaccggcagtgtcgtggtcccggcccacagcctctcagcctcccacagcctctccctgtggtaacgaggtggacgctgagccccaggcctgatggcacatttgaggtcaggtgggggcacctgggctgttcctgtagctgtcccctcgtccaggggagggaccttttcagaagccctggggcctttgtctcattgaccaaaaccctcctggccatgctgccttcacaggacactgggcatctctgtggggcaagggaaggaacacaggcctcctggtggggccccaagacccaaccaaggctcgtctggctggtgccagcctctgcgccaagggtgccgaccaaggtcagagccgatcgcggggatgacaggtgccgaaatggccatgcttgccccagcccctttcatccggcagagggacctcgctgggcctgccacgctcagccaggctgtgctgtgaagcccctctcttcccttctcagagccatatgtccacgctgacagctcctgagagggaccatgttttgctgcctgcaggtgccaagctgactgatgggccatgctgaggagggtgccccagccctcctgcaagatgcccttctgtgcagcctgcagggccaccaggcccacgaggcggccatggtcttcagatgtgtcttagcctgggttccctagaaaacacatgaggactctgggcagaggctgagtgtttttacatttttatttttaagccaaagttacacacctgtggcttaaacacccaagtagttgtagcagtttgagaagaagaatcacagccgtgccccttccccagactcgccggctgctgcttctgtgcggtccccgcatcccgagggccgccagcaccgccacctccaggctcctttttgctgccatggcttgagtcccgcagaggaggcccctcctcaggcacggcccggctcagtcccgtatggcatctgcactattgagactatggagtcgccgctgagaactgagcccaggagacactgaggtttttcctctttctttgttttccagagtcgggaaagtcttggttttcttggtctcctggtgccaattcctcgtgggctgggctggtctccccatggcgcctccttccccatcaccaccaccccttccctcctaccgggtcaggacgtcggctcccagcccacagcatcctcgtcttccctcttccgcccccagctgtggggactgctttcccctggggcttcctgaggcgggtgtgtagggtccgtacttggagacttgcgtgtctctccgggtcttcgttctgccctcagccttgcttgtcggtttggctgcgtatagggttcagggttagaagtcgcttctctatcattttctggccttcagatttgctgctgccacagccgtgctgaatcctggcacttggtgaccccctcctttttttttctgtttttttttttttttttttcgagacagagtcttgctctgtcgccagactggagtgcagtggcgccatctcggctcagtgcaacctccgccttccgggttcaagcaattctcctgcttcagcctcccgagagtagctgggattacaggcgcccaccaccacacctggctgatttttgtatttttagtagagacggggtttcaccatgttggccaggatggtctcgatctcctgacctcgtgatctccccacctcagcgtcccaaagtgctggaattacaggcatgagccaccgcacccaaccatgaccccctctttttaacgtacagggtgtcctctgtccccagacccctgagcccaggttgaggagccaccagctgaggacggagccaaggtcacggagctgccgggtgagcgctgagcccaggtcagggagttgggtctcaggccgtcactgggactccctctgccttcaagaagcctctttcacccttggcccacagaggagacctggatggcactggggtccaggtgcagaagcctccagtgtccacgggcacctgagcttccagcaccttccctcctgctgggcggtggcctgtgcctggccgcaatggaggccgccttccccactgcccctctgagcctcagtctgtcctccctgcagccacctcccctggccaggtgccccggggtaactggtggaggctttcacgtaacttggtttccagctgcctctgtacacacacaggcacctgttccaggcttggcctctctgtacacacacacgggcacctgttccaggcttggaggctgagaacttgggggcagagatctcagggcatcggcttgggcggggtccttgggcagggccttgggcttccctcggcactttcctcaaggactggggccaagcttcacattctgttgctggcatcagtgccatttgggagcaaaagtccgacaggctgggtctgggcctctcttcaccttgtttcctgggatcgcgctttgggtgctggtgtcactccagatccaggctcgggaaccacatctgcacagcagaacaggcgctgttcttatcttgcgtgcgggtcaggacatccccccggccaggagtgcttcctccgaggcccacagacaagttctcgctgggggactggggaccacagcacctcactccacctacactctagagaattcaaatctgagtattggaagatttattttcagttacagtggaaggcagagacatgaaatagcaccaaattcaaaagcagctcataaatccaggtaataggagtttattgattgctacattgtatctgtcagaagaaaactcctttaatgaacacatcaggccgaggacatacacagcccattggcagccgactccgattccagaatcgatgcattttgataaataggttgttatggaaagtaaaggttatttaacttgtttgacttgcatttcacagtgatcgcaagttgccctggagccctctgaaccttctgagtcgccctcgctgccgcaggacctcctcccgcggggtgtccgacccgctcttgcttggctgagactttgtttaaaccctggctccgatgcctctgagcccttgatagcagcgtcccagcctggaagaacaaaaccagccacttttccccttggcaaaggcacagcaaggcgggtgaggcgggcgctgagtagtctgggaatgggcagggagatgtcgaccctcggagctgagactgctctgtgctgagaagctagaacaaagcctgacatgttccaaggggcaagctcagggctgggagggaagcagcggggccgcccctttgggtgggggtgcccaggccttgcagacaagacactggccagaggaggtggagcaggggtactggggcagaggggccatgtttgtgcagcaggatggaccctggagggccccggcctagagggggcctttgccaggaagatgccaggaacgtccaggccaaggcgtccgggcaaaggcatccaggcccgggagacgcatgtgggacttgggctttcctctgtgggcagtgggaagtctctccctacccctggaaggagctccaggcagcagtgaggatggggattctgacactggagtggggagccggccctgtggtgctggctgggctgagagcggcaccaccttctgatgcccagggtgggaaggacacacgactgccaccatgcactgagggccctgcacgccacacacgtgctctgagcactgagggtcccctcatgccacgcacaagttctgggcacagaagcacctctcagaatcatccccgagacaggcgtccatcacagagacaggtctcagtcctgcactgattggcttcgcccagtgctgctgggggagtctcagacacagcctttttccgacaggtatagctgccactttctccggcacagaagcctggggccctgggaatggcaccatgttgcgcgccgacccctacggttcttccctccgcatggctcagtggaaaccgtgcgtgcagcacagcaggcagctggggcctgtgacgaccctggggttggaggccaggcagggctatcactgagaagcagggatttggggcctggggcccagggaatggacaactccccaagctgcccccaccagtccttcctgagcactggctctggaagaagcatctcggggcagaggcagccaggcccaggcagggagagacccccaaacaaggcctacagcagggtctcagggcctgaccatgccagaaacagcccagagccagagaggatgggcagatactcagtgccaccactcctgggagatctcagcaccagggcttcgacctctggggatacacacccacacctgctgagatataacacatctgcagagacacagccacgcctgcagagacatacccacacctgcagacacacccacacctgcagacacacccacacctgcagacacacccacacctgcagagacacagccacacctgcagacacacccacacctgcagacacctacacctgcaggcacacccacacctgcagacagagccacacctgcagagacaccctcacctgcagagatacaggcacacctgcagagacacagccacacctatagacacacccacacctgcagagacacacccacacctacagagacacccacacctgcagacacacccacacctgcagacacacccacacctaaggagacggggtctcgcagtgggcggagaggttgggtcttgcatctaatcagccattgatgggcctctcctgtgaagggcactcattccttgtattcataaattaagctcatgtgagtttgttctttaacaagttattgcgcgatcataatccattgccgacgttggcgtgactcaccatgtcatgagcccactcggggctggtgctgctggagatggggaagaaaattgctccataaaccaaaaagcaacattttaaaacttataaaaaagattcgcaggaaattagaaataacacacaggggttccttgtgccgtccccccagtttctcccagcatcagcctggtgtgtaacggtggtacatcctcagtgccgtgcgtagctttggtgcagtctcagccccgtgcgtagctgtggtgcagcctcagccccgtgagtaactgtggtgcatccttggagccaggacacaggcagctcaagagggtgccggggacttgtcagccttgggggcaggcagtgatggcctctccggcaggaccagagcagggcagtggctccatgctgcgctgggtctctgggtggtgcaggccagggtggagccaggccagaagctgtatggagggccctgagcacctggcagcctccctggtgtcagcagctgtggcatccgtggggcaggagcagcctggacggggtggctcggtgcgattaagagatgctattggaagattggtggctgtctggtccagaggggacacacaagccaggctgcacagcaggagcaggagccatggcgggtcccacgggacttgggacaggctgtgtccaaccccgcccacagcccaacctgcacacccccttccagccgcccagactaccccaggggcgcagtgagaccactctcctgtcggggagcctctggtttttctgctacccatcagcacagagttccagagttccagagctccataaataagcctggagcccacctgggcacacccatccgtcttgtttaatagactgaggagcacgccatgggtctcaaggagtggtgaggtggatggatggggcctttctgcgtccaacagcatgatgtataatgaagtatttatgatttattccagctaataacccatgtggagtgcagggtatgtggaagcagacagttgaggcctcagcactgcccttacatgccctgcatgctcccacagccacggcacacatgtgtgcgtgcacatgctcacagtcacgcataccgcgccctcccagctgcacacacgctcgcaggcacgcacactatgggcccatgcgtcatgagacagcttcgggctgggagtacaggctctgaggctgcagcccgctcttcccgactccccaccctcagtggctggtggtgtctgtgttgagctactcgagaaaggaagaaaacgaaggaagcttggttcccacaggagctccaggaactgcacggggaggagcaagggccacgtcgtggctttgccttaggaaggaaaacgtggggcagccccggccattgttctaggaccagcatggtcaggtgtggagggcacaagatgggcaccagcaggaggctccaggcacccaggaaaggccctgtcctcctcagccaccagcccctccctgtggcctctgcgtgggccttggtgcctctcccatccagaggggctgggcattcactgctggagcccaccgtggtgggatgttgtaatgtgtctggttcacttcttttactgaatatttggcctggattcttttgtgggcctgagagaaatggcaggacagggcctggtgggcctcggcccctctcccagagcagcctgcctgcatgaggggcggcccctctatgctgcagtcccaggggctccgtctgggggcccttgcagcagtagcagcacagccaggaggcccagcacaccctggcacccatcctgagggagggtaaagcatcagaccctgtgcttgttgctcagaaaaggccacgcatcccacccatggccagtggttatcaatcactgtcacagaaacagggcctgagccggcttcctaatgcagggtgtctgcagaccacaggcccagcagggcttctggcacctcctgctcctggcaggctctggacccactgctgacctgcccctggaggaagtgcatacagctgagcatggggaagggaccccacaggaagggcagaccccacatcatgggcacagtcccaccttgggacgcacgtcgtgaccaccaggaatgtgggcttacctggcatagctgtttctccgttggggttgccacagggtagtaaccagagccccctttcctcagaggacaccgtggtgtttaaggacggccagttaaccagagccccttttcctcaggggacaccgtggtgtttaaggatggccagttaaccagagccccttttcctcaggggacaccgtggtgtttaaggatggccagtactggatccgaggccggacctcagtggacatcatcaagactggaggctacaaggtcagcgccctggaggtggagtggcacctgctggcccaccccagcatcacaggtgcgtggccggacttgggccagggaggccaggctagacgggtgctgccttccatgtttgagttttagacgactgcagatgagtcgacgccgtcccagctgcctgcaggggtccctgtgatgctcacctctggtccctgccctggccagggaacatggggctagtgggggtgcagcctgctcggtgttggagccactgaccccgtgcccaccagagctcccaggcctggccgggcgcagctcccatctgcatgattcccctgcaggaaggtggcagggagagtgcagagagccaaggggcgggaaggcagagcccctgtgagtgcccagtccccagatccaccgtggggagcccgtcctcactcccctccccacaggcccagccagcaccaggacgagtgattggagtggggcctgtccaaggacgggctccagggctgcggccagactgcgctcttcctgtgtgtccaggcactcttcggcctgtaagggtcactgaggcatccccatgttctcaaactgttcttctatccgcagatgtggctgtgattggagttccggatatgacatggggccagcgggtcactgctgtggtgaccctccgagaaggacactcactgtcccacagggagctcaaagagtgggccaggtagggctgggtggggcgggcagggagcactcatggggtcttgggggtccagtcttgagggccaccctaggtattggcatcgtccgtcttagaggtggagatgagggatcaagaaagaccagcagtgagggtccttagagacctgaaggccgcacacagcaggtagagacgagggcagggggcaggagccgtgctcagatttgacttggtggcaatattccgagggggcagaaactcacattcctgggacagggccctgtacggcctgtggtgggttccgtcctggtcccaggagagatcccggatgagccaggccaggcccatgcaggaggtgcatggagctgagatccagggttgacaccagctggccgcacgcgctgggcccttccccgccaggccacaggcagcctgtccacctgccgccccaaagccagtgctgggccccagcagaactgcaaggcccacccattctccgtcggcacctgcacggcctctccctctcctgccctgggggtgggtcctgaaggtgcctcacacacctccagtcagttccacggagaccccagcaccatcaccatcccctcagtcatttcactttcccctccatgtccagggcagggcctgttcctcagcggtggccaccacccagtccttaaactcacctgcattttttgttttgcctttaccttacccagaacctttccccaaggactttctcccacctgtctcacccccagtggtttctgatgcatgggatccacagaccctccacttttgccagcagtggtggtggtcacgcccagggctgaacctgagctatggccttgtcaaaggccgtcaggacggaagggtatcccataggaccgtcagggcagagccaggctgagctcagaaaggaagcttttagtttcacctacagtaatttcttttgtttttttaatttataaagaaacggggtataattggctcatggttccacaggctatacaggaagcgtggctggggaggcctcaggaaacttacagtcatggcagaaggcaaaggggaaacaggcacatcctacatggccggagcaggagggaggagggaggagccacagagtgagtgagggaggagggagggtccacagagggagggagggtccacagagtgagtgagagaggagggagggtccacagagtgagtgagggaggagggaggggtcacagagtgagtgagggaggagggaggggccacagtgtgagtgagggaggagggaggggtcacagagtgagcaagggggggaggggccacagagtgagcgggggaggggccacagagtgagtgagggaggagggaggggtcacagagtgagtgagggaggagggaggggtcacagagtgagtgagggaggagggaggggtcacagagtgagtgagggaggagggagggtccacagagtgagtgagggaggagggaggggtcacagagtgagcggggggggggggaggggccacagagcgaggagggggtgggaggagccacagagcgatgggagagggaggtgccacgcactctcaaacatgcaggtcttgtgagaactcactcactagcacgagaacagcaaggggaaaatccacccctgtgatgcagtcacctcccaccaggtcgctcctccaacagcggggatcacaattcaacatgagatttgggtggggacacagatccaaaccatatcgttcctccctggcccctcccaaatcttacgtcctttttacattgcaaaatacaatcctacttcccaacagtcccccaagtcttcactcatttcagcattaattcagaagtccacagtccaaagtctcgtctgagacaaggcaagtccttttcacctatgagcctgtaaaatcaaagacaagttacttcccagatacagtgggggtgcaggcattgggtaaatacaccagtgccaaaagagagccgccagccaaaacaaaggggctgcgagccccaggcaggtccaaaacctagcaaggcagtcactgaattgttttttggtttcttcttttttggtttttttttttttttttttttgagacggggtcttgctctgatgcccaggctggagtgcagtggcatgatctcagcttactatagcctctgcctgcaagcaattctcctacctcagcctccctaagtagctgggactataggcatgcaccaccacacccagctaatttttgtattttttagtagagatggggttttgccatgttgtccaggctggtctcgaactcctgacctcaagtgatccacctgcctcagattcccaaaatgctggaattacaggcgtgagcaaccccacccagcccaataaatcttaaagccccaaaataatctcctaagacccatgtctcacatccaggctacactgatgcatggaggtggctcccaaggccatgggtatctctgctcctgtggctctgtagggtacagcccccatgctgctttcataggctgctgttgtgtgcctgcaacttttctaggtgcaccacacagtgcaagctgtcggtgggttattctggggtctggagaacggtggccctcttctcacagctgcagtagccagggccccactggggactctgtgtgggggctccaaccccatctttctcctcttcactgccctggagcagtggcctgagctctatctggagcccttttagccccagagcaacagggatgcaggggccagtgtccctcagggcagtggcccacaaaaccattcttccctccgaggcctccaggcctatgatgagaggcacttccatgaaggtctctgacacgcctagagacattttcctcattgtcttggcgattaatattcagctcctctttacttacgcacatttctgcagccagcttgaattcctccccagaaaattgtttgtttgtttgttttctaccatgtgatcaggctgcaaattttccaaattttatgctctgcttaccttttaaatctaagttccggtttcaggtcatctctttgctcatgcttaacaaaagcaatctttgctccagttcccaataagttcctcatctccctccgagtctacctcagcctggacttcattgtccatatcgctattagcattttagtcacaacaatttaacaagtctttaggaagttccaaactttccctcatcttcctgtcttcttccgagctctccaaatcgttccagcctctgcctgttacccagttccaaagctgcttccacatttccagatgtcttaacagcagtgccccacttccctgtaccagttttctgtgttagtccagtcttgcattgctataaatgaagccagatttttctcagccactttgccaaccggggacctccgtggctggtgacacccccaacccaggcctgccacagaaggcacccacacactcgacccactgggccatgcttggcttatgcactggctcagcccacctgtgttatagcttatacctgcattcatcggttcccaagttcttgtcccgcgtccaagaagaatgaggttacactgacaattcaaagggtgaggagagtggagaagaattttattgagcaatgaaacagctctcagcggagagggtatgcgagggtgctgaaccgcccagagttgggtgtggctgggtctagggcttttctgggcacagaatggggaggggcaggctgtaggtagcactggaaaaggtaacctttggttggttaaaaagcattattcagaaagaaccagtgggaaagagtgggcaaacaggaatagaagttctcactccaggctgcaggtttcaggctgtttttggcttgaaggtggggtttcaccagggacccacccctgtctatctgggcatttgactgcttcctgttgctttcataaggaactacccaagatggtaatttataaagaaaagaggtttaagtggctcacagttccacaggctataaggaagcatggctggggaggcctcaggaaacttacagtcatgacagaaggggaggcaggcatgtcccacatggtggagcaggaggaagagctcacctacagcaaattatttaagaccgagcatttgtctctgttctgttccctctctggacgcaccctcctgcctccaccctgacttgccgtctcctgagcactgaagatatttttggcttgtccgatgtgactccacagacagcagaaacgcttgcttgatcagggcagcatcagggcaccacacatgcctgggcttgcacaacacagcgggagcactgccactcagcagcagctgctgctttcattaaacagttaccttgagaagaaaagataggtgtcgagggctgagagctgtgctagagtttcagggtccgagttggcaggaactgaagtcccgatgctcctcagcccttggctgtcctcagggctgccctctgcgtggggacaccaggccgcccctgcccagggacaccaggccgcctgctcctgctctgtgcatctctcacatcaggctcctcacccagcattgtttgggctatgacagtggctgtgacaagaccctaagacgggaagctgcgtgcagggcacttgagggcccgctgaggagaagccgcctgtgagggacaggactgggcagggaaggccaccagccatgcggtcacagcccaggactccgccagtcctgcaggagccctggagccaggcccttgctgtccaggccacttgctgtacctggcccacagctacctcccctgcagccctgagtcctgcttgctgtgcccggctcaggctgagactgcagtgcttgtccattcaccatgaaagaaagaagaacaggaagggaggcaggaggaagtaagttagaggattaatccaaatgttccaactgtctaatgggagttccaacaagaagatatccagggaggaaattcacagtcaaatttccccaaaccaaaggtcatgagttttcaggttgaaagaacacccaaccaagaggagagaaaacagcattctaaatatcggaaggaaacgaaacctcgcctcaggcatgcgggctctgacgggcaggatggcggcacggagggctgctgtatccagtgaagtcagcagttcagatgaaacagataactcccttaaaagacacaaattgccaagactgacgcaaacactgaaacagactgaacagttctgagttaccaatttaaaactgcaaagcaaatagcaggcccaaaaggcttcactgataaattatctcaaacattgaaggcaaaaaataaaaccagacacagcaaagtaagtctctgatgaaacagagtggggaggaacacttcctaactccccgtatgggaccagcactaccctgaaatcaaaaccagacaagaaaacgagaggacagtgttcccaatgggcagacacacaaaatcctaaacaaaacgttagcaaattaaatccagttaatgcacaaaaagacaacacgtcatgatcaagcagcatttaagccaggaatagagggttactttcatattcaaaaatcagtctgtgtaattcaccatatattttttttttttttggatggagtctcgctctgtcgcccaggctggagtgcagtggcacgatctccgctcactgcaacctccagctcccaggttcaagtgattctcctgcctcagcctcctgagtagctgggattacaggtgcgcaccaccatgcacagctaatttttgtatttttattagagacggggtttcaccgtgttggccaagctggtctcgaactcctgacttcaagtaatcctcccgcctcggcctcccgaagtcctggaattacaagcgtgagccactggtaattcaccatatttacagaatgaagaagaaagatcatatcatttcaatagatacagaaaaagcatttgcaaatgtcaaaacccttttataacaagcactcttagcaaactaggagaagaaggaaaatccttgaacctgatgagggagtctctcaaaagctaccagatgacatcctgctcgatggggagctgctgggcgttttcctcctgtgaccaggaaggggcgcctgccctcaccactgccacccagtctcattcaacacagagtttgtcccctgttagaaaccgagacgttggttacacgtggaggttgggagtggctcaggcaggcagaggggcttctgggaacctggccatgttccctttcagtctgggcgctacttagagcagggggcagttgcttcaataaaactttagattcccacacaggccaggcgtggtgctcacacctgtaatcccagcactttgggaggccgaggtgggcagatcacctgacgtcaggagttggagaccatcctggccaacatggtgaaaccccgtctctattaaaaatacaaaaattagccaggcatggtggtatgcgcctgtagtcccagctagttaggaggctgaggcaggagaatcgcttgaacccgggaggcggaggttgcggcaagccgagactgcaccactgcaatccagcctgggcgacagggcaagcctctgtctcaaaagaaaaaaaaatctacacatccctcaccacactgtacataggacagctgggtgtaaattacatctccatttaaatgcctgtcatagttttatacaactataaaatatatacgtgccaaaataaatttgataggaacattggaaccaggtaaggtgacgcatacctgtagcacttcgggaggatcctttgagcccaggaagtcgaggcttcagtgagccatgactgcaccactgcactctggcccaggcaacagtgagatcctgtcctagaaagaaaagagaaaaaaagaaaaatgcgatttggaaatgtggaggtcgaggttgacagcgacaccgaggtcgaagccagttgcccctggagagcgagagactgggctgggccgactcccacctctgtcgcgagaggcctacgggcaggggcaggtgggcagggggactgtgctgggtctctggccgcgtctggacggcaggcgacactttctccacaaaaagcgtcaagaaaccacgacacttggtttctggacttttccgcggaacagtaaccagaacaatcgccatgaaggttcgtttctgtcatggctcagtgcagcctggacgccctggaccagcccctcctgcgcctgggccacggccgctgccttcagggcatcactggtgggcggcacaaccatcctccctttggggggttaatttcatttctttcctcccttctttaatggtgaatggaggagcaccgagcaccactgcagtctcagtttcagatcccagcgcctcgtccctgcccactgccctcggccccgcccgcctgcattggcagtgccctggccccacccacccgtgtcagcaccgcccaccgccctggcaccacccaccgagttctcgcccatgaggaagggggaccctgagtggaggtttcaaaccttaggggccgtccctgccgtgcagggctctgtgaggcctcttgccacataggcttgtgtctgcaggactgtgcggcatttactcccatctcaaataccccatacagggcagactgcccctgccccacctgcccacccactccccagcctcttccgcacgcctcctctggaaggggaacgggccacagagtgaaatggggccttccagctccagtgcggggacttggaaggcctggcccggtgtgggggcccctctgccctgcaggccactctgtgcaggcctatcctcaggtgtgccctcgcccaaggcctgcacgcaccatggcttctgtggtaccagtgataacaccatgccgggcacctcctgcagtcaccacccctgggctgctagggcagagacagctgcggtggcccggtgcacctgcctggcctcaggatggccgaggcgcctggcaaggctgcagggtcccaggggcacctgtccgtactgctgggcgcctgagttcctcctgctgggcactgtcagggcagtgcgcctcaggctgtgcttgtctctgcagaaatgtcctggccccgtacgcggtgccctcggagctggtgctggtggaggagatcccgcggaaccagatgggcaagattgacaagaaggcgctcatcaggcacttccacccctcatgacccggcagactgggactgcgggtctggtggggagcagcagacgtccccttcacaccgagaaccacgggggcccgtccaagacctggcctcccttaaacctgaaccccccaaatcaggtcacgtagaatcaagaactgtttgggatgaaatcaccatgtggggtccccagcctcgggccagttgttgcagctcaaggagaccgtccctggtgtcacctctgcctggtcaccgccgacctcatctgtgcagcgcggtgcagccagcccctggccccacgtgctgaggcacctcccgccccacagtgccctgcagttgccaggctctccagggcaggtcccagaggtttcccacaaaaaacaaagactccactggaggaaacaag

SEQ ID NO: 15360 - DNA, 39395 bp, Homo sapiens
ggtccggcccgactcacgaccccgcgggacccggccggaacccggcccgaccccggcgcgcgcgcggcggaggacgaggaagagttgtggcgaggcagatcctgccccgtggccgcggccgtctcgtaggtgcgggcggcggggcccacgggaccgcggcggggtcggccgggcgcagagctctcgggggcgcgggctccggcgcccgcccctgggtcgcagctgggcttgagccgtggcccgtggcgcggtcgcttccccgcgagccgcctggggccgggcgtcggccttcccgggacgccgagcctctcgtgtccggtggggagcggggcccccgcgcggggtgcggggagagaagctgtgcggacgccgggcccggtgataccgtcgagccggcggggtccgtgttcaggcatcctcagaacgaatcgtctttggttgtgtttggaataaattcacttccatttctcattgggcttcagaagtcacccttgaagtactccccgttttagttgtttgctgcgtgcaccttgctgggcgcgtggggcacaggttcacagccggcctagcccctgagggcatgtagatctatgagcaagcaatggagacgtgcggccggccgtgaagtatttggaaggtactgcaggcagcccattccctggagagagggaaggtttaaaggggtgaggcccggtgcagtcaggagttgatgttgctgtcctgagtctaaattccaccaggcaggccaggtgcagtggctcatgcctgtaatcccagcgctttgggcagcagaggcaggaggatcacttgtggccaggagttcaaagccagcctgggcaacatggtgagacccctatctctacaaaaaaatgtaaaaattagctgggtgtggtggcgtacacctgcacttccagctactggttaggctgaggcacgaggatttcttgagcccaggaatcggaggctgcagtgagccatgacagcaccattgcactccagcctaggtggcagagcaagacactgtctcaataaataataaaactgaaaaagaagaggtgatatttgaactgggcttggaagaatgattaggaatttgctagaaagggaacacgtttagagataggaacacgaattgtgtctggggcatagttgttgctttcccatcctgggaggacagacattcgtgttagggcccaaggctgagaccttgttgaggagggggttcacatggtggacccaggagcacgggtgttactaccggtggaccctggggaccctgcgagctttgtagcgtgaagcctggctcaggctggtgtcctctccgcaggtgttggaggacataagatgaggcttcccttgctcttgctcctttggctctgaaccatctcctcaaggcagacagaaatggcggattaaactgtgggcttgggatagttgtaagtgtcacctttccagatggcatttttaaaatagtatttttcttcctaaaatggatatgggtttcaagtgtatttttcctttttggttttttttatttgaatgtactgctcatgaatgcaatgtgaatgtctgttacttaaaaatgtaattttgaaaataaccctccaaaccacaggtgtgatgctgaaacgcatcctgccccgcaggccgagcacagccctcctctgccccacgctctcatcggggcagccgacaggaggaagtgccggcatccacttcaaacacaaggtctgggggggcgggggtgtcaggtgtggtggtgaacaggtcaggtgtcgttttattcatgttgaaagcagcccttcatttgaatgcgagtgtcattctcatctagtaatttttgttgcgaggctccatggggagcaccctgctgagcacggcgcggccgtttgtcttctgcctggcctgtgccgggccattcgtacattctcacgtgaagcctgtgaggcaggtcttgttactgtgccatcttagcggtgggaagtgaagggctaggccagtgaggaaatgaggacaaaggcagcagccgttcaagtcgaagcctgtggtgactaactctgccattaaccagcactccagttaggagggaaaagatgcatcccgctgcgctgcatgtgtgttcccgagaagccccagtgccttagtggtctgatctcagaacctgatggctagaacaccgagaggtcctgcctccctccccgagggctggagagccactgttttcagtggttccagtacgccttcaccaaggaggctgtcctggctcaggcacctttctcagcttctgactagagtccttgcccagccacgtggtgacgccgctgacctcgggttatcagggtgctgcgtagcaggggtatgaagctggctgagggtggaagcccctgactgaactgcatttgtctggtgggcagtgtccctccacactgtgctcctggtggtgatggggagccccacggtagaaggggtcccagtggttgaaaggtgaggttctctctgaggaagctggggtgcctctggaccgggaggtgtgcaggaagaccgcgcacagccatctgccctgagtaggctctgtctgcgtgttcgaggcagggctctgatccgatgaccgtgaagattcaacctctgtgctgaagagaactgatgactgggcacttcattgtcccaagcctgagggactgaaaagctggtttgatggggctggttccgttttccacatgcttggtgggagaataaatcagcacctcgttggaggggactttgtcagtatttctcaaaattaaagatgacccagcaatgtgacttcccggcatctgtgccctagacaccccgagtgaacacagctgtaggtgccaggactccccccttccctcggccgactctggctaggccaggcccttctcaccctccataggaagcctccccaccaggcccccgtccgttcctcctgcccgtggcctctcctcatagcgcgtgggctctctgggagctgggaccatgtcacacggggccagtcacatctgtcacctcccaggggctggtggcaggagtgcccacccacaggcagcgctctggattccgcgcaggagaacagcagtttcttctcagcctgcactttgagtttgcccagcccagctgtgcacgtcagcatcaccagctctgctgagctctgggttttgtggggaatccactcttattcttccgtggcttcgccctgcggggtgactcaggaatttgtagaaatgccaaaaggggggctgtgctctggtagtgtgtgctgtgtgtgctcagcgtgtggttagcgtgtgctcagcgtgtggttaccgtgtgcacagcacgagcttgaactcgctttgtcagaactcggttctttgtggtctgcagaaaccttttctgagcagcagctttagttagagggaagccgtcatcccccttttatgtgcttctgtcatattgagaaacagctacacacaatgacaggcaccttctatattgagtgagtgtcgccggccgtcctagtgctccgctccttagcaccccagaaagcaccgtcccctgctccgagcacccaaggcactccctgtggctctcagcagcggaagtctggcctcggggccgtaacccagagcacccagtgcccagtcggttttctgtgtgtggattctccttgtttctgtgccctcacacctgtaaagcagtgcaggatcggttggaagtgaggaaggaagcgtggtggggccgccctggtttgctgctttctgaagctggcacagcccacgtgccgatctcgtgtcttgtgtctggtgaagcccagttgttttcttgccattctctgggtttctctatggtagcagagtccaggtgtgtgggcggaccagccactgccctgcctctgaacagctgtggagggcttctagaacatgggtgcctcgcgtcaggagatgatgtggcctgcaggactgaccgtttggtaggattcagagaagactcacacaggacgtccaagcagcccgcggagctgtgctgaggttcagggccctgcgtggctcgttttcctcctgcctgggccagaggcaggagatccctcagctggctgggacaggggacttcattaagagccccaggctacctgggaggcggagcttgcagtgagccgagatcgtgccactgcactccagcctgggtgacagagcgagactccgtctcaaaaaaaaaacaaaagagccccaggctagtggggaaaccagacacccaaatcaaacaagcaaaaaccaaggccagtagttgagggtctcaagcacaaaacatactttggctctgacaattttcattgtcatgaagtttgttttgttagacaactatgaagtgttgtgacggtttcaaactaagagcagaaaacaaaactgtttagtacaaaccacagacaataacacagtagctttcccctcacaagttaatgaaagagatgtgctggagagagagaacctgctgaacatgggcacagatcccacagagggggcgtggtgtgtgggaggagactcgacagggtcatggggtcactgctgcccgttgtcgggagataaggctcacagctttatttgataatgttgtctttagcttgtaaatgaacatgcttcccttcccccattgagtgttgagtgttgtgcctgtgggaagcgttatacacacagcctgggacctcagcacagatgcccgttgacaggtgtcccaccggccttccgggttccagcgccaggcctggtgcctgccccaggaggatgagcatttgcattgcctgcaccttatcgtgcccttccacctgctgaagcagctgtgcctgccgctcttgtgaactgcgaacttccccttacctcctctctctggctcgggagctgggtgagtttgaacttggcctcctttgcttttctgtgtgcgaacaagtggttgccttgtttgtttactgaacagagtgtggttgaggcaaaatgctgagatgaaacctaacctaatatgtgtgtattagacggtagcatcattgtcaaaataatacttgttcaaagtccctgaaaaccaaacggacaacttgactacgcttcggccacaggcctgggacgctgtcagaccgagggccgctgagtgcccagtggcagcagagcccagagggtgcttcccccaggaagggaggcagaccagcctattcttactgtgagtcgagcaaagctttgattataaagggccagggatgcaggagcctcgtggagagtgccaccccttcttctcgctctggaatgcgggggctgtgcccctggcctgtgtccgcatcctggggcggtgtcccgtgggcagtgtcctctggctgcagaatgcatgttgcagaattggaccagccctcacgcgtcaggagcgttgggcccacaggcggaggcaccctggcttcttctcggtctcctttctctgaatgaagaattccagtggacggcgggcccgcgcgacccctcccagggagccctcgcttcctgctgatttatttgttatttagtagttaagtttttggggggaaaggagagaattatagttcaacctaaaacacgttttctagctctgtgaattgcctgatttaaagcttggcttggctgggtgcagtggctcacacctgtaatttcaacactttgggaggccaaggtgagtggatcaccggaggtcaggagttggagaccagtctggtcaacatggtgaacccctcgtctctactaacaatacaaaaattagccaggcatggtggtgcgcacctataatcccagctagtcaggaggctgaggcaggagaatcacttgaacccaggaggcggaggttacagtgagcccagatcacactactgtactccagcctgggtgacagaccaagactgcatcttagatagatagatagatagacagagcgggtgagactccatcccagatagataataaagagagagagagaaaggaaaaaaaggtgagagagaggagagagagaaagaaaagaaaagaaggaaaaaagcatggcttacacctgccataaccccaggactttggaccagcctgggcaatacagtgagaccttgtctctaccaaaaaaaaaaaaaaaagctgggtgtggtatcacatgcttgtgggcccagctactcgggaggctgaggccacaggatggcatgagcccaggaagtcgaggctgcagtgagccatgattgcatcactacactccagcctgggcgacacagcaagaccctgtctcaaaaaaacgaaccttggcacctcaccacatttccactgcgcaccagtgtgggaagggtctgagagaggcagcgccgtgtctgccccgggggcggggtctccaggccatgcctgttgtgagcgggggctgtgctgagctcttctctgcacttccccctctcacgggtggttttccaggctcaggattctaaaacccattattcagatgtaccttaagtgtgttgaattttatatgcttctccttggttttacctagtttatttcattgtttagaattttgtgtggtttgggaatccttaaactcatgaagtgaaatagaaagctgagatgctgggcacgtacggaacgttccagcagtgtgggtgagaaaggctggacgtggcctgtctggtgcgctgcctcatgactgaaggtgcagcaggcgtacctggctgggtactggggaggtgttttaaatcctgtcttggccacgtttggatgggacagttgggcactcacgtcctgtgccttgcctttctccagctcggccgcctgtcagtgcaatgctgccccatgtggtgctcaccttccggcgcctgggctgcgccttggcgtcctgccggctggcgcctgcgagacacagaggaagtggtcttctgcacacagccccagtggcccgctcggacaggagcgccccggtgttcacccgtgccctggcctttggggacagaatcgccctggttgaccagcacggccgccacacgtacagggagctttattcccgcagccttcgcctgtcccaggagatctgcaggctctgcgggtgtgtcggcggggacctccgggaggagagggtctccttcctatgcgctaacgatgcctcctacgtcgtggcccagtgggcgtcatggatgagtggcggtgtggcagtccccctctacaggaagcatcccgcggcccagctggagtatgtcatctgcgactcccagagctctgtggtccttgccagccaggagtacctggagctcctgagcccggtggtcaggaagctgggggtcccgctgctgccgctcacaccagccatctacactggagcagtagaggaaccggcagaggtcccggtcccagagcagggatggaggaacaagggcgccatgatcatctacaccagtgggaccacggggaggcccaagggcgtgctgagcacgcaccaaaacatcagggctgtggtgagtgccgcctggcgccgtgatggtttcggtgaccgcacagcactccgggtgggctccgggccagaagcacatcttttcattcgcttttctgtggagtcattcacagttgtcaccatcctgcagacccgtgtgagatacagggacgcaggccctcggggtgtggccgctggcctcactggccacgcaggacggctctgggagcgtccaggtgtagagggattgaggggccgccgagtgaccctgccaggaccatgcggcatgaggtcagaagggaccactcactgcctgtgatgctgaggggcttttcggaggccagccacgtgttaggatgcgtggtcaggaccccacatacacccgggtcttactcgttttttgtgtgtcctgtgacctcagtcacatcttcacagaactctccaaccacatcacttacctggcatttgtacagtgtcataacgtctcctatgcacttgaagcaatcaagtaaaaatgaaaaccaaaagccaggaaggggaaggcaggaagtgtaccccacggagtcgtgggctgacgaggcgccatgagcacacagcaggctgggccctgggtggcctgcgccgtcactcctggaagcggcgcgcctgtcgggagggacgggctctggactcctctgtccttgctgaggggagtgacatgcacatgtgcttctccctggagcctgtgcaggcagcaggcagtgtcctccgtgagattggacagaggattcagtgggccgtgcctcacgctgcttctcagtaagagctgagggtgtgctctggagcctggcctgggttctgtcccggctgagcaggtgacgataattcacgaatcggcagagctctgtgtgggcagtgctgtcacctgagccagtggttgggctgggagtcgattccagcctgaatggcgctgggtccctgagtcccaggcttgggcaggggcggagctctgtcgacctggtgtctgcagagccactccccgaccttctaaattccctaaagcctctggctgtgtgtggcgctgtcctctgtccccagggtaagtgagtgacccagcagatctgctgtggttttgtcgtcatcttgagaggctgctaaaggggagcaacaaagagccagccttctccttccccttcctcagtggggaggcccagagctcctttccgtgagcccgaggtctgtgtgtgctgttgcgggccacagtcttgctcttgctctcagctgtgctctcgtcccctgcaggtgaccgggctggtccacaagtgggcatggaccaaagacgacgtgatcctccacgtgctcccgctgcaccacgtccatggtgtggtcaacgcgctgctctgtcctctctgggtgggagccacctgtgtgatgatgcctgagttcagccctcagcaggtgagttggggtcagggctctcggttgcaccctcagactaggcgcctttcccctgtcggggccagggctctcagccgcgccctcagcctaagcgcctttcgctggttggggtcagggctctcggccgcgccctcagactaggcatcttttcctggtgtgcagtcgcccctatccacaggggacgtgccaatgccgagaccctgggtagcatggaaccctgtacctacgatgctttttgctatacatacgtacctatgataaagcttaatttataagttaggcacagtaagaggttaacaataacagaacagttataaccatgtactgtaatcaagttatgtgaaagtgctctctctcttcaaaataccttccggtactgtgctcgtctgttgtgagactgcagtgggccacgcgtcattgaaaccgtgaatagtgagactggatgagcggaggtgactgtacaggccctgctgcccgcgagctcctgcggctgcggcgaatgctcacgcgcttggtttaaaataatgcgagtttgttcttacatgcttggaggccaggattctgagacgagtcttgcggagctgatgctgggtgtggtagggctgctccgtcaggaggctccagggcaaagtccgttcctgcctcttgcagctctggaggccgcctgtgcccttggctccagctgcttcacgtccagctctgcttctgcaggcacacggccttctctccgtagtcagggctccctcggcttccctttgtgcagcctatgcggatattccaagatcatctcccatcttgaggtccttcgcttcatccacctgcagttcccaccactgcgagaggtgacacattcggggtgtagggcgtagggcgtgaccctttgagctatgatgtggccactgtggcagccctcggttactccagagtactggcccagctggagagctgcttgctgcggagggttactttggagtattggcccagctgaagggctgctgtggagtctctgtctcccctctctgcatggcttcctctgtagcgtctcccttggagcaggcagggagggaaggacgcggtgctggtcacacagagcgctggggtgggagcagtcatcgccgagctgctgcgcgcagccttgcctgtgcagggctgtctccaggcagatcagggatgctgctttggagggaaaggacctgggctcgaggcgggaccctgtgcacagcatcgggcctcgcctgtcagttggggatggcggtggcttttaggagttgctgtggccctgtgtgcattctagctgactgcaggcaagagtcactcaccaggctgcagagggcatgaggggcaggccttgagcccacaggaaggacacggtgtgcgtatgtcacaggtgtggtgaagcagagccctccggtgaggccatggacgtttaccagcctctgcccgtataatgaatatgccttttattcacaggaaaaaaagtttaacacgtgaatgtatggaaaagcccttagaatttggatcgtatcatgatggttctcagcacagaggagcccatctctgaggccagatgcctgggactgggctcttggtctgtgcggggttgttctgcagggcagacgtcccggccagcagaggcacagccctaaagcccagagcacagcagccaccagtggccggccccacactcaccgctcttgccaggactcttcctgtctgaagtctttctggccccatcgaaggctgtgtggagctctgaggcctctgaccgggagctcaggacccaaaccctagtcaggtgtgaatttcgccaggaaggggtccctgcaagcagtcagccctgcccaccttccctctgcttctcctgccgctgagaggcccatcctcttctctgcagggcatccagccccacacggtggctggaggtggagagaaggcagcttttctggccctccacctctctgaccttcagtctcatccccggaaaataaggttggaggccggctcacagtgggcacaaacttggaaaagagaaggggctcttctctagcctccactggaggcaaggtctcacaagagaagccagtatgtagaacagctttgtacgagcaagtgagcctgtttcttcacagatgataacattgggctttagagaaagacctctttaaaatctagcagttactaccgtgccaaagagaggtggctgccagcacacttgcgtgattagccgtcagctccctccactgctcttcaggacgcctgtagccacagagcctccctgagggccccgtcgccagggtcacctcctgaagagcctccctgagggccccgtcgccagggtcaccccctgaagagcctccctgagggccccgtctccctaacacattccacattcttgttggcttcagtccttatttttcacagacatctcagccctgaccccagctgcgacacagcagtctgttaagatggcagacactgcggctgcctcatctgcgtggtccatcccggagacatctgcctggcgctctgctccaggccttcctggctcccctggtagggatctggctcagtgacccgaccctccttgcggctctctctggggtgcgccctgcatggacacagctgtccttggtgaacgtctgctgagtcaaagtggttttgctgcagtgagttccccgtgagtgcactgtgtgggtggtgcagcgcctggtgtgtagggaacttccatgcctttgctgtgtctctgggggctcctctgacggggcagctccctcctctccgccttaagctcctcctttcctttggcggtcagctctgtccagggtgtcagtttctgtgcctgtgactgggccccctcaacctgccccaccttggcctctgctccttggcagcctggccctgaacctctgttgggggctgcccgggcgctgacggtggctggtctaccatggtcacttgggcagaggcagcaacggccattgtcgtggaccgtgccagggcgagatgcagctggcaggggcagaggcagaacatctcccagggagctgagggcaggttggttccatcgtcccggagggcaggttggttccatcctcccaagtaaagagtgtgttaccctcagggcgagaggcaggtgggtgtgggtgctggcgcaggccagctgtcaaggatctgggctttctggtcttgctgcttctccagcactgcatgaatgacaccacctggccctttccagtgcccacaggcacacggcttgggagctgctgctgcggcgtctctgcccaggggcatctgccagggggtccctgccttggggtctgtgtcccaagggcgtctgcccagggatttctgctccgagagtgtctaccctggggtctctgcctggggatctgctgtcatcttccagacactgcagactggctcattaatggacacgggaaagcctcagaccttcaacggacacgggaaagcctcagaccttcaccgtttttgacacttacttgggatttttctttaaactatgctgtgaaaacttaattttttttttttttgagatggagtctcgcactgttagccgggctggagtgcagtggcacgatctcggctcactgcaacctccgcctcctgggttcaagcgattctcctgcctcagcctcctgagtagctgggattacaggcacctgccaccacagccagctaattttttgtatttttagtagagacggggtttcactatgttggccaggctggtctagaactccggacctcatgatccacctgcctcagcctcccaaagtgctgggattacagacgtaagccactatgcccagctgaaaacttaatatttaaacaaatttgatgctgtggctacaaaggattgcaactcttttccataaactccaagtttcagggttttccaactttaggaatttctatgtgtaaaatccagctgtcagcgttattgaactttgggattttgtctaagattgtgtggaagaatgtgtaggatacaagtgtggggtgaccagacacctgcggtggtgctgaacgatctcagacgcggtgtcttcaagtcatcctgcacagagggccgtgggtgtcagtgcctgcaggtgacggatggggttgggggagaggaggaggatgccggaagatggatgtgcagccacagcctctggagatcaaagtcaccactgacgagacagccagaggctcagatcagtcactcgtctccaacagcactgccctggccgacttcctcaggatcgcagcatggactcaggagggctgccatctggcagggtctgtgctgtggcagctcaggttagagcaacaggcctgctcctgccacctcagaagcacttgctagttagtcaaatgttatggcgcccttcagggggcctccaggtctttcacgtcttggaagtgtggcaacacattgggatgtgctggaggaagaaggtcaccctcggctctcagtgcccttctttagggcagcagctgccctctgaagatttggatgaattccaagaaagaccgtccttcgtgtctttcacctccgcgcctgctccctgcccctcagccttgtcccgttgcgtgcatgctgtccccgcctcagcaccatcctgctacacgcatgctctccccacctcggcaccatcctgctacacgcgtgctctccccgcctcggcaccatcctgctacacgcgtgctccgttttccgtgcctcagtgtcacgtttgtgtttctggttcactgtgctgttgatctgtgtgttacatcaaatgcagtttgttctttttacgttgctgtgttgtatttcctggtgtgcagaagccacagtgcgcttatccattctgctcttgaaggacttgagattgttttcagtttgtggctattagaagtcacggttgctatgaacattctcacacagatgtccctgtggacagttcccttggatccgcaactcccagtgccggctcacaggctagatgtatgtttcatttcagtggaaactgcggaagagttctcaaacgtggctgcatgtttcacacaccccagccccaaatgtggctgcatgtttcatacgcccccagccccattctgctggtaccaatttactgtattagtccgtgtgcacactactgataaagacatacccaagacagggaagaaaaagaggtttaattggactcgcagttccacatggctggggaggcctcagaatcatggtgggaggcaaaaggcacttcttacatggcggtggcaagagaaaatgaggaagaagcaaaagcggaaacccttgataaacccatcagatctcatgagacttattcactatcatgagaatagcacaggaaagaccggcccccataattcaattacctccccctgggcacctcccacaacacgtgggaattctgggagatacagttcaagttgagatttgggtggggatgccatcaaaccatatcaggagtccttaaatttgttaaattccccacatgtctcctcttctggtgccttcatttgtccctacagaggttctccgcgaagcactgtgcttcccccaacttgtttcccttcagcctggagaacttcttttcaatagttcttgtagtgcagctttgctgacaacaaatccctcaattttgtttcactgaaaatgtttttattgcaccttcccttttcaaaaacagctctatcgagatacagttcacacaccgcaaaattcattattgtaaattttgaattaagtagccattacctcaaaccagtgtccatttccccccattcccagcccctggcaaccacgaatctgctttctgcctctaggatttccttgtttgagatggcagcgtgtgcaaatggggcgtgtcacactcagtcttttattccagcttctttcacttgcaggatggttctgagtttcatccatgttctactgtgtgtattaataacttgttcctgaatagtacttcatcatatggatataccacattttcctcatccattcaccatctgatgggcatttggactgtttcagtttggagctattatgaataatgctgctatgaacatttacatataaatctctgtagacattcattcatcttacatagacacagagggatagaattgatgggttgtatggtgactttctgtttaatgttttaagaaactgtcaaactggccgggcacggtggctcacacctgaaatcctagcactttgggaggccgaggcaggtggatcacttgaggtcaggagtttgagaccagcctgaccaacagggtgaaaccctgtctatactaaaaatacaaaattagccaggcaccgtggttcacacctgtaatcccagctactcgggaggctgaggtaggagaattgcttgaacccagggggcggcgattgcagtgagccaagatcacaccactgcactccagcctgggcaacagagcaagactgtctcaaaaaaaaaaaaaaaaaaaaagaaaagaaaagaaactggcaaactgttttccaaaatggctgtgttgctgtacgttctcatcagcagcgtatgagagttttcatttctttacgtcctgccaacacttgtcactggcttcagtttgcgtttccctaatgactactgatgttaagcttttttttttttttttttttttttttgagatggagtctcactctgtcgctcaggctggagtgcagtggctcagtctcggctcactgcaatctccgcctcctgggttcaagcgcttctcctgcctcagccatctcagcagctgggattacaggcgcacagctccaggtccagctaattttttgtatttttatagagaccaggtttcaccgtgttggccaggctggtcttgaactcctgacctcaagtaacctgcctgcctcagcctcccaaaatgctgtgattatagccgtgagcccgccgcacccggccagatgttgagcattttttgtgtttatttttacttttttccttttaaattatttttgcagaaacagagcctccctatgttgcccaggctggcctcacactcctgagctcaagggatcctcccgcctcagcctcccaaagtgccgggattacgggcatgagcactgcacccagtgctgttttttacgttcttgtttgcatccgtatgtaatctttggtgaactgtctaatgaaatctttggccatttttaaattgggctgtttgtcttcttactgagttgtaagagttctatgtgtattccggatacgagtctcttttcagatgtacggtttacaaatatttcctccaactgcagcttgtctttttattttcttaatgtgtcttttggagcacacattaattttgatgaaattcattttataaaaaaaattttaaaaataaattcattttatcaatttttaaactttatagattgtgcttttggtatctcatctgagaagtctttgccaaaccacaggtcatgtcatgaagatattcccttttgttttttcttagaagttttctagttttagctcatacgtggaggtttctgacccactttgggttaattttgcatatggtgtgaggtagggtctaggagtcaccttctgcatggagatattcagtgtgtcagtgccatttgtgagaaagattatccttttgtccttttccctattggggacttggtttctttgccaagaatcacttgaccagatatctgtgcattcgtttatttctggactctccattgtgttttgtgggtctcttgtctaatcttacacagcatcacactgtgttcgttacttctggtttacgtcagttttggagttgggaactgtgtgttctcacctttaatctgccttttgaaatttattttggatcttctgggtcctttgccttttcgtgtaaaacgtaggataagtgtatcaatttctgcaaaataaagcttgccggaattttgggaagattgctttgaagctggagctcagtgtgggaagaactgccatcttcacaacatggagtgttcccgtctgcgagcctggcctctctccacccgcttatctgttcccctccctccctcgatggcagtgttgtgggtgctgctccgcggtgctgctgtctcccgcactctggtcgcctgtgtctttgctttcccgtctgtgggtcagcctagatcacccccgttgactgtgtctgacttttttcctcttttctgctgcgtcttgtttgttattaggtctattgaatgaattcattttggatcttgtgtttttcagttttatgattttttgcagttccacttctctttgcaattctccatcttccccacgttgttcatcttttctttgaaattccttaatctgcttattgcagtgatttgaagggccttgtctggtgattcggacgtttggatttcctgagacttcttcccttcagttggggatcacatctttgtgtccttacatgctttgtgactttgaagggttccagtctttgtctttgaaagaatgatattatttcttccccggagattcctgcctttctctgccaggcagctgcggtgaggcactcgtcactgcagtccagtgaggagatgagatgggctggggctggactgtggcatcggcatccgtcgaccccagtttcaacgccgtgtgggcgagatctgtcctgtgtgtcctgggcctcccttaggtgctgaccccacagcacgaagagtgccctcctccctccgccacacccttcggtgctccgtgtggaacaccgcgggtagagagggccatggaaggaatgcggctcaccagctcttcctgaagctttatgggcgacgcgagaacccgctaacgagtgaggaacttaaaacgtatttatatgtaagcaagaaatgtttattatggagtaaaatataaaattcacatgactcttttaaataaaagacttcacccgttcgctagtcactgcatgcctgtccatactgggaagcatgctgacttcaggtctgcgggcagccaggccctcctgccagcttccccaaggtgtacatccgccctctctgtgtagctggaagagcctgaccactcacgtctctccaggccacagatcccgaagcccttttctagctctgttcacgattgctcttcccctcacaggccagacgcagctgtcccgcgcaacatggcttctgtgggaaggggtcagagtttgaggcaccccttttagaagggaggcgctgcagactcttgaatgtgaaccatgagaacgctgtgcctggagccaggagcctccgccacgggccccagtgcctgctcatcttcctaccgagtgcttcctttccttcgtaggtttgggaaaagttcttaagttctgaaacgccgcggatcaatgtctttatggcagtgcctacaatatacaccaagctgatggagtactacgacaggcattttacccagccgcacgcccaggatttcttgcgtgcagtttgtgaagaaaaaattaggtaagtgaaaagagcccactttctcgttcagaaagtcttaaagatcaacagatacgacttatttctaataaatcactcctactaagttctgggaagcagtgctttccatttcctttcaatgttccctctctctctacccgtctccgtctctacctctctaactgtctctctctctctctacccgtctgtatgtatatctgtaatctcttccacgtcgatagctgcctggattctgtatcgctctctctgtcacactctgtctctctatctctctctgtctctctttgtctctctctctccatctctccatctatctgtcttctctgtctctcttgtcagactctccatctctgtcttctctctgtctctctccatcgctcttcatctgtctctccgtcttctctttctctatctctcctgtctctccatctgtctctatctctccatctgtctttgtctccgtctgtctgtctgctctctctcctgtccgtctctctctctctctgtcatggcgtctgaaggacaagggtgaggacagtgagctgacccgcttgctcctgcttcatctgcccacatgtcccacggcgcctgcctctcctatgcagtctctctgccttcgtgggcagccctgtgaggcctcctgcctggggcacgttctgctgcttttcctctcagccccgctcctcccctcccagctccctggataaacccctccctcccaggacaagctggtcttttgggccacccaggggcgtgtttgctctgcactctcccatgaacctgcaggcgtgggaacgtttcttttccctcgtggctgttgaggtgtggttcactaactggaaacgcacacgtgtggctcagtgagtcttcacacgcatcacaggcccgcacctccagcagagtcgtgggtggggtattttttctttttgtgagagggaggggtggcgtggagggtgcactgcaggaactgaaggctccactgccatccagtttccagtgggatgtgtgtgtctgtggctgccgcgcgctcctcccagtccccaggaagtgcacagggaagcggcacctttgttcctggagagaattccgggttgtccaaggcacatgtctgaaccgcttcgctctctttgccgttcccttgccccttttctgtgaggccaccggagcccatggttttgctgctgctactgctgggataccctggggctgggcaggccccaagctgagcagggtgagcacaacgttttaccaaatctaaggaaccaagggcaagaacgaggtcagtgaaggagaggatcaggtgatttctggggtgacagaggcaatgagacctcggccatctggatctcccagcgggggtcctgtcagtggtgcctcctcgtaaagcaggggcagcagcagggaccactccgctcagaccgcaaacaaaagcgccttccctactgcccgtgaggctgcgggaaatgctgtgtgagagcgcggggactcggagttctcagggcccgtgttctcctgccaagcctgagctgaccctgtgggccaagatggctgcagttctgcgggtggttctgagccccttgggtgtgcccggccccaccccttgggtgccgcggccattcacccatgtccgcgttctgctgcagagcctgcaagctgagccggctgtagtccccggatgtgcctggccgcagcctgcagcgccgtggctgttcacccgtgatcagctccgtggtcggcagctgcacggtcactgctgttcttgagcgtggttgtgaacagcgcaggaactttgcaggggacaccgcggaccctaagcacattgtttaccctcattagctgttggacctgcttccttctaaaatacacccaacagatcgttttcaaaaaacaaagtcacgccgtagcgcagactgcagcgttggtcccgggtgtcgcacagtggtgctgtacccacggcctggggctcctgcactcgtgaaggagctgccacttttgcaagcaagggccgcctcctgaggggctaaacctgccacctttgcacgcgagagccacgtcccaaggggctaaacctgcctttggttgtgccgcgtaggctgatggtctcaggctcagctgccctgcccctcccagtgctggagaagtggaagaacatcacgggccacaccctgctggagcggtatggcatgaccgagatcggcatggctctgtccgggcccctgaccactgccgtgcgcctgccaggtacgagcacttcccacagctgcgttcctcttccactgtgctctgagccccccaaggtgggccagtctcgaaccacccacattcggactgaagggcggcatggaggatgctcccccgtgggacaggccactcggccaggagagcactcaggatgcactgcgacctgtcccctctgggtagatcagccttctcccaagtctcagtcgggtggatgggggaggtgtctgtgctggcccctggctgtatgactggggagacaatgggaagaacagcaatgcctggaatgcaggcgtcagtgcatgtctcagaggaaggcggggggccatgctgttggctccagaccacatcagcagtggtggcagcctccgtctgtctggagtccgggtgccacacagcgccagcagcagtgccaggagaggtgggtgtggtgggcagggtgggatgagtcaagcacctgtcttccttctctagatgtgggctcctgataccgggcccctcttgtccagccttccctaacacatcccattctgactttcatctgacccaaccatttgagccctgggtcctccgctgggacttctgggaacagagcccacagctggggggccaccctgctgctttctgcgcagcccttccagtctgtctagagtagaagagagatctcagtgcagacttaaagtgagaccatcccgcacatctgtctgtgcagctgcttacctgcagacccagtaaaaattcacccctctggcgtgcagctctgtgtgtcttaagaaacatcatcacagtcaaaatagagaagggttcctcgcctcagaaactcccttcctagtgctcagcacctcctccacccccgaggcctggccccttgttcctgtttctcttcttgtggttttgctttttctgggaggccacgtggctaaatcctgcaggacgtggcctctgagcctgtctgcttccgcccggcttccgcccacagtcaactgcctgtgctgtgtgcgtcagagcccgcgcctttccctgctgagtggcatccgtggtgtgggtgcggcaccgcttgtgaccctgttttaagcaatgacacgtgagatgttatcaacatttgtgtgcaggtttctgtgcgaacgtggttttttatttcacctgggcagatacctaggagagagattgctgtgttgtctgaagctttcaagctgttctccagagcggctacaccatccccttccccctgcaatgggtgggaggtcacgagcacctgctgctccagcgggcggtggtggtgtctcgttgagttcatgattctctcatgatgggtggcgttgagcacctcttcctgttcgtgtcattccgttttcaactggggcctttgttttcttgagttttgagagcttttaaaattcgggacccaagtgtcagctgtgcgattttaaatatcatctcccagcttgtggtttgtcttcccattcacctaacagcgtctttaaaatcaggagttttaggttttggcccggtttatcaatttgttttgtgaattgtctgatgtcatatctaataaatccttgcgtagcccaaagtcacagagaatagtttcagctcttacgtttgggaccatgatccattttgagttaatgtttgtacatagtgcgagatacggaccacagttcttttttagtgtgtgaatgtctaactttttagcactgttcgttgaaaagactcccttctccatcgaacagccctttggatctttgttgaaagtccgtcgactcctgaggggtcggctcctgggctctgctctgtcccattgctttccgtgtgccctttggctcattccatgcctgcttggttcctgggactctagggtaagcgtggacatgggggttcaggcccaggcagggaccagctggtgccaggcagcgatacggtgctggggcctgcaaggtgagtgtgagggctggctggctgctgggctgggaggaggagagactgtaggctcacgcccctttgctgggcctggggagccatgggggctgttaagtgtattctgagtgtaaagtctcggtttggctggggcatcctgagcagaatgacagggccatggcagcgagatcctcagctgccgtgcagagctgccagtggggtggccgcacagagtgcagtgcctgctgcaacagtgcccagggcagtgggcgggtgggggcatgttgtgaaaagaagtcagtgtgagtgatgagaaatacatcctagtctcagaccccaggaaaccgccgtcagtgctggtggcccctgccctgggccggctcccgcgttagtctcagaccccaggaaacctccacctccgtcagtgctagcggcccctgctctgggctgactcgcgcatctccacgatggctgcggcaccagctgtttcttcggtggctaaagctctctggtggaaataagatggggaccttgaaatcaaatgtgactggtctgttgagtctctgtccttatcgttgtccttcttagtaggatgtgctggttttgtccagtgccaccggccacagtcaccacgtaatatggacggaatgagcaaagcccggctcgctgaggctgcaggctgcaggcaagtgaggactgaaagggtaacgggctctgggctttgtcctctctttgttccggacatgtgagcaggacaagttctgtgtattcagaatctgtctgcacagtttgtagttcatgatgactgttcatccacagcattgctttgtgggcgtcctctcttttgatcttctcgaaacagcccctgcgatggggtcatattttgcactcacatacaagaacccatgagcctgcccacggtcacgcggctggtgagtgatgcacttcccaggagcacggtgacctcttcaatggccctcactagagaagatggacagtgcccccctagccttttttactggaacagatacaaggctgagaagctgaaatcaggagcagcccagggaccactgtctacaccgagggagtcatgagcagcccagggaccactgtctacacccagggagtcaggagcagcccggggactgctgtctacaccgaggatgtcaggagcagcccagggaccactgtctacactgagagcgtcaggagcagcccagggaccgccgtccacaccaagagcgccaaggagcagcccagggaccgccgtccacaccgagggcgccaaggagcagatagtagcccagagacccaggggaggctcagcttccccacgctggaatcagaactcctaggcgaacaggaaggagccccagacagatggcacagggagaggagtccccggctgaggagggggatccagagaccctgaagcttcagggttattgggcaagaaacctgagtgcaccaatccccgagtcttcagctaccgacggcaggttccctcgggtgccggggatgctccctcttctctaaggcagagcccacagtaggttccctcaggcgccaaggacattccctcttctctaaggcagagcccacagcaggttccctcaggcgccagggacgttccctcttctctaaggcagagcccacggcaggttccctcgggcgccggggacgctctctcttctctaaggcagagcccacggcagattccctcgggcgccggggacgctctctcttctctaaggcagagcctgacggcaggttccctcgggcgccagggatgttccctcttctctaaggcagagcatacggcagtttccctggggcgccggggacgctccctcttctctaaggcagaatcaaatatctgtgattttatccttgcctttaaatcaccagcagtgtgagttctttggtttggaaaaaagtaagtaaagtcacctcagcattaaatccaatatgccccacaaaaactccaaaatgcagcctcctgagccatgtttctagagggcacggtggaggagagctttcctcactctcaggctctaacccccaccctggtggccatggccttgacccttgggtcggctccagccacaggctctgagctcatgcttggcctcgctgctcagtgcactgtccgtgctcggaagagagagaagctgggtggagggtgagctctgtcgtgtgttatggttacaggcctgctccgtgcggttcctgtggagggagatgaataattcatggccgaccactgctgggcctcgtcacactctaattggaggttgagctcagaggtgctcacggctcctgggccactctgtggcattgacagggagctccagggcctcattggcggtttccgttccctgggtcccagtccccagtcagagttatcagggaggggctggctgacagcgattttagaggtgggctgtggcaggaaggcagtgccccccacctgcctgcagctgcgctcccatctacattggcctttgcggggccagcctctgtccactctcttgagctctcatgtccacactgtcacatgcccggggcacagcgagcggcacctggagtgtggggacccctccctcgagctctcacgggtggcacctggagtgtgggggcccctgcctcaagctttcatgggtggcacctggagtgtgggggcccctccctgaagctctcacgggcggcacctggagtgtgggggccactccttgagctctcatggacaataccactgcttggctgctgcagaatccagacaccatcccagagcctcttcagcctctgcagatggtgtgggacggccacacggcctccccacctgcggcccccgcccctaccccagccgtgccgtgtccttgcgctgcgtccccgccccagtagaggcatcaccaggaagaggcgaaaggccgcctgtgatggtcctcttcttatgaaacgcccagaacagaaaaaccacggacgcggacagcagacctggtgccaggtctggggagggagggtgtggcggtcgtgggctgtgcgggagttctgactaggggaagtggggggctgtgcaatgtgtgtgcggaacaccgccgtgccgcgcactgaaatgggaagtcatgtgttatgcgggtttcacccccatttaaaaatcttcagaagcaaaacataaaggaggagaaaggatggaagaaagggggctgaagctggccccgccacaccccccatagtggtgacacgggtttctgaccagagtggaggttcggggcgtctgcatacctggaaccacagagaactcccgaggtgacactccgcacaccacactagcccggcttcgcctgcaggaccccaggtgtggacaggcccagcaggatcagcaagaccgagccgggcaccgacagcccctcaccaagcgtctggaggccgggacgccccatggattgcagagttcactgcactgaccctcgatgctgacccttgaagtgccggaaatctcagcgtggactcagacatgataagcgttcaggcactcccctgacgcaggccagggcaaaggcctcacgccccgggatagacaggaagtcccacgtctgctctgcccctaggtcatgcccgtgctgacgccacatcgccagggccgcactccatgagcagcctctgccgtcccaccagcaacctaaaccacaggcagagcgaggctgcggcagccctgcgtgtgccggcgggacacgtctcgccacctgggctctgcccccaccccggccagtgtaagatatgattttagccacgttgagactgtgcaggtgggatggatacactgagcaaatcatgggtgtctaataaatgagccagtacaaagtgtggtccacctgccatgcagagttcaggacagcccctcctggggacatagggcagatcctgccttagcccgtcgtgtgccgggcacacacaggtcccctcatcgtggacagccccggggccatcagggcaaggcgccagccctccctggccagcaagtgtgtaaaagtgggaatgacaccagaatctgtgggcagctgtgaggctttgggaagtaactgggaaagtgatgtatgaggggcccagggcaggccaggcccagcgtgccacgtgagtgcctgctgtgccacatggccatcactgtggcatcggctgggcctgagcacaccgtgcttgccagccacgtatcgtgtggcttttcacctgctggtgcctacaccatcttctctctgggtcacagggcacgtcgctccctccacacagactcccgcacgtggcacacgggagctcagcgggatccgagctcagtgtgtgcttctctcctccaggttcctctcactccagcctccccttcagtgtttctcctctcctgtaggttccgtggggaccccactgcctggagtacaggtgcgcattgtctcagaaaacccacagagggaagcctgctcctacaccatccacgcagagggagacgagagggggaccaaggtaagccactctgctcttggcaggtgggcggccgtgtgtccagtctaggccccccagggtggttacactggtgcatctttcccctggaggcagactcccctccacgcaggggaccagccccctggacactgcaggtgctggctggtgttgcaagggcactggctggtgttctgggccctgcctgctgcgtgtccgtctgtgcgttcacagagcagtgggcagagggagcccagggcggaacgccaaagggactcacacccgggcacacagctcctcccaggggccctgtccacggggacaggctgacgtgggccatgatggccttggctaagcggaagagataaagagcagaggccgttgttgttgatgggaatctggttagaaatatgaactggcctgaccctggcacccgtcctgaggggacgctgaccacaggcccccatagtaggtgtggggagattcacggggccctgcacgcggaggtgggtgcctgtgcagtgctctgtggctgcctccttgtcttgtgcgttattctaaagctgacaagggtgaacaagaacaaaggacattgtctcatttctgtgaggattttaacatgagagtctgctcatcacacgtgaactcatcacagagaaaggtttagggattatggggaaatggaatcttgatttaaaaggaaattattttctctgaagccagtatccacacctgataccacacatgattgactgtgttgccctgaggttttcaaagatcgagggatcctgagtctcatctctgtgcatttccttctctgtgacaccatcttggccctcacgggcacaactgagctccctgtgcagaggctgaggggccgtgggccttgctctcgtgagtgaacagccacacgccctccttgtaccttggtttccacacatgaccacgtgagggttggagcgatggtcgtggttggacgttttagctccagcaaccaagtaggatgtgggtggctttcagtgtcattaaatgacactgaaaggtgcagtggccgcaccttgtgtggagggccacacggcgtgtcccgcctggcctgggccccccgcagtgggctgttatcccccgtggccctgaagtgggtattctgtttccccgtggaaacctctcacctggggccacctgcagtggccgcaccttgtgtggagggccgcacagtgtgtcccgcctggcctgggccacccgcagtgggctgttatcccccgtggccctgaagtgggtattctgtttccccatggaaacctctcacctggggccacctgcagtggccgcaccttgtgtggagggccgcacagtgtgtcccgcctggcctgggccccccgcagtgggctgttatccctgtggcccccacagagccatggggcaacttgctgaaacccacctgggtggctgccccttgctatacccacctcccctgccctctgtagggccccagcccatgctgttgtcctgacatgcctctcctgggattcctgcctctgccctgctggtactaggctgctggccacaccccacatctcaggttcctgaatacaccggcccttcctggctctcaagtctgtgccctgcagtgcccctgcccccaactcgaggacctcccagctcagccagttccaaccctgtctgcagggacggggctcagcctgtgcctgggttggggacaccatctagtcagaaatgtccccagcagagagcagaacgtgagtggcgtgtggaggagtgagacgccccgtggctgtgcagccctctccaggtgtcagtcagctgacactcctgcctctgagcacctgctctgccggaaatggcagaaatgttgccagagaaaggggcggagcgggggtggggagcatttctgtcttaaattaaaacaaaacttaactgcttcacacctgcattggctgccgcgccacctgattgctcctgcctgagtttctttaattatttgtgtctgctggtttcttccctgaagcagtcttgaaatagaagcagcagcctcagctacctgggcaccctgacagtcagagacaccgcacaggggcctctgcgacaggcatgcaggcagaccctgcaaggtgaagccgcacagatgctctggggctgcttaaatctcagcgtacggggggtttgcatctgctgacagcaggcccgggaacatttccagttcagccaaggagtcggtgcagcaggtggagtacagctgccctgcggggcctggctccaccaggggccaagacccttcgtggggaggagcacagcctgagggcctcagggtttgtgccctccgacacctgagattcagggctcccagaggggtgggtgggcgccccaggacaaccaggtgatgatgggcgctgtgaactctgaaaagccccagcatcagagacctgctgctctctcatgtgaagggactccccaccccacgctcacactcgcagacgcacttggtactttcatctgagtctcacgcagtagcccttctctccacagcatcccagaacccgagggtgcccctcactaccacggtcccggatccacgtggctcaagtgaggctgtggccgacagctgggctgtccgatccactcttgtctgtgccgaggcgtgggtcccggccagcgtccctccccagaaggtctccctcaggactagtcatgagaatggccatccctaggcctgtggagtgactcatgactgttcctgggcagatgatcagccaggccttcagagctgaattaagaggcttggtgtcatatttgtcaggaaacagaaagtacctgcagaaaggaatgtgccctgtggggatgggaggacaccttcccaggatcatccccggggccagagtatctggaccctccccaggtggcagctggcctgccaggcccagggctcagcctcctccatcacctcgctgaggggctggctcctaccactccctcacatcctgtgacatatcacaggtaccacacacacatgcagtgcgcgcacgggtatcacagatacacgcagtgtgcacacggatagcacacgtagtacgcatgggtatcacatgcagtgcacacacaggtatcacacgcacgcagtgtgcacactggtatcacacacatgcagtgcatgaacgggtatcacacacatgcctagtgtgcgcatgggtatcacacacatgcctagtgtgcgcatgggtatcacacacatgcagtgtccacacaagtatcacacacacatacacattgtgtgtgcacagctgttacacacataaatacagaaaaaaagacctgatggaaaccccagaagtcaatatggctgagctccaggccggactccctgacgatgtcataggacgagggggcgcgtgtgcacactgcatatatgtgtgtgtgagacccgtttgcacactacatgtatgtgtgtgatacccctgtgcacactgcatgtgtgtgatacctgtgtgtgcactgctcatgtgtgtgttacccgtgcgtgcactgtgcgtatgtgtgtgatacccgtgcgtactctgcgcatgtgtgatacccgtgcacacactgagtgtgtgttacctgtgcacatgctgcatgtatgtgtgtgtgttacccatctgctcactgtatgtatgtgtgtgagatacccatgcgcacactgtgtgtgtgatacccatgcatgcactgcgtgtatgtgtgtgatacctgtgcacataccatgtgtatgtgataactgtgcacgcactgcgtgtgtcacatatgcacacactgcatgtgtgtgtgatacccatgtgcgcactgcatatacgtgtgtgttacctgtgtgcaacactgcatgtgtatgtgacacctgtgcgcacactgcatgtgtgtgtgatatttgttgaaaagactaccctttctgcattgcattgccattgccactttgccaaagattaattggacatatttgagagggtctacatacaggttatctgttctgttcccttgatctatgtttccattcctctaccgacaccacattatcttgactgttgtggttttatagtaggtcttaacaattgtagtgtgatttcaccagctttattctttctcagagttgttttggtgcacatattaattttagaattagcttgtctagccgggcctggtggctcacacctgtaatcccaacactttgggaggccaaggtgggcagatcacctgaggtcaggagttcaagaccagcctgaccaagatgatgaaacccgtctctactaaaaatacaaaaattagccaggcatggtagtgggtgcctgtaatcccagctacttgggaggctgaggcaagagaatcacttgaaaccagaaggcggagtttgcactgagccgagatcacgccactgcactccagcctgggcaacaagagcaaaactctgtctcaaaaaaaaaaaaaaaagaattagcttgtctatatctacaaaaagttcttttgaggtcttgaatggaaagccaggtgtagtggctcatgcctgtattcccagcattttgggaggccaaggcaggctaatcaacttgagaccaggagctcaagaccagcctggccaacatggtaaaaccctgtctctactgaaaatacagttagccaggtgtggtggcacacgcctgtaatcccagctactcgggaggctgagtcacaagaattgtttgagcctgggaggtggaggttgaagtgagccaagactgcaccactgcactccagcctgggcaacagagtgagactgcctcaaaaaaaaaaagagagagagagagagagagatgttgattggaatttagccattctgatcggggagatcacttgggggagaattaacaattactatgctgagtcttccaatccatgaacatggtatgtctctccatttacttagatccgtgaacacggtgtgtctctccgtttacttagatccgtgaacacagtgtgtctctccgtttacttagatccgtgaacctggtgtgtctctccatttacgtagatccgtgaacacggtatgtctctccatttacttagatccgcaaacacggtatatctctccatttacttagatccgtgaacacggtatgtttctccatttacatagatctgtgaacacggtctgtctctccatttacttagatcagtgaacatggtgtgtctctccatttagatatactttggtttcttctgtgttgtattcagcatatagatgctgtacttgtgttaaatttataagtaaatgtttcttcttttctttattcctcctatttcttctcctccttttcctctcctttttaaactattgtaagtatggcaggtgggtatggggggagagttgtttgtttttttgagacagaatcttgtcctttcgcccaggctggagtgtagtggtacgatctcagctcactgcaacctctacttcctgggtctaagtgattctcatgcctcagcctccccagtagctgggattacagatgtgtgccaccacacctggctgattgttgtatttttaatagaggcagggtttcaccatgttggccaggctggtctcaaactcctgacctcaagtgatctgcccgcctcggcctcccaagatgctgagattacaggcatgagcctctgcacacagtcacgtttttgttgctgttgttagttttcaactgttcattgctagtaggtagaaatagaattgatttttgtgtgttggcctcaaatactttagttgttaccttgctaaattaacttactagttttaggagattttaatagacttcttgggaatttctacaaatacaatcatgttttctgcaaatacaaacagttttatttcttcctttccaacctgtatgaccaaagccctgactaggacttccaatacgatactgaacagaagcagtccgagtggaccttcttatttctgatcttagggaaaggattcagtctttcagcaagtgtgttagttactggctttttgcagattccattctatctataatgtgcttagactttttatcactaaatgtatgttgaatattttcaaaaagcttttcggtattgatggacttttctttattaggctgttaatatggtagattacattgaaccaagctttcattcccaggacaaaccccacttggtcctggtgggtcatttttttatatatagtactggatttgatttgctagcatattgctgagtatttttgcatctgtattcataagaaattttggtctgtagtttcccatttttgtactttctttgggttgtgtttgagggtgatgctggcctcattaaatgagttgggaagtgttctctcctctttttttttctggaagagattgtgtagaattggtattatttcttctttcaatgattggtggaattcaccaatgaaatcatctgggcctagaggttttcttttctattattattattttgtgtgtgggggataaggtctcgttctgtcacgcaggctggagtgcagtggtgcaatcatagctcactggagccttgaactcctgggctcaagtgatcctgcgtcagcctcccaagtagctgggaccacaggcatgtgccaacatgcccagctaattttttatttttatttttgtagagttgggggtctcactatattgcccaggctgatcttgaactcctggcctcaagtgattctccctcctcgcctcccaaagtgctagggttacaggtgtgagccactgtgccctaccaacgtttcttttttgaaagaaaaagaactatgaattcaatttctttagtgcttataggactgttcaggtcatctgttgcatcttgggtgatttttggtacatatcatttttgaggaattggttcatttaatctgttaagtttctttatgtagagtttcccttcaggccacgaaaccattaaaaggttgattaaaaggttaataagggaattcccatcttaaccttttaatggtttcagggcctgaagttatgtggctcccattcctcatgttggtaatttgtgtcttctgtttcttttttctttgttatccttgctagaagtttatctgttttatggctcttttttcaaagaagtcacttttggatacattgatttttctttactgtttttctgttttcagtttcactagttcttggtttcttctacttgcttctggcttttctctttttctagttgcttaaggtgaagctttagattattgatttgagacctttcctctttataatgtgtacatttaatgacgtacgttgcccttaagcattgctttagctgcatccccaaatttatatataatatatatatatttttttcttttttctttttttttttttgagacggagtttcgctctcgttgcccaggctggagtgcaatggcatgatcttggctcactgcaacctcagcctcccaggttcaagcaattctcctgcctcagcctcctgagtagctgggagtataggcatgcgccaccacgcccagctaattttttgtatttagtacagatggggtttcaccatgttggtcaggctggtttcgaactcctgacctcaagtgatccacccacctcggcttcccaaagtgctgagattacaggcatgagccaccacgcctgacctaaattttgatatatttttattttcatttagttcaaaatatttttaatgttccttaagacttcctctttgacttgtggattatttagaagtatagcacatattttccaaatagttggatatttttccattatctttctgttactgatttctagtttaagtccattacagtcaaaagacgcacttggtatatttcaattcttttaaatttgttaagttgtgttttgtggcccagaatgtggtttcttttcaggaatgttctggtgtacttgaaaagagtatatattctgcccaggcgcagtggctcacacctgtaatcccaacactttgggaggccaaggcaggagaatcactgcccaggagtttgagcccagcctgagcaacatagtgagaccccatctctacaaaaagttggaaaaaaaaaaatagctgggcatggtgttacatgcctttggtcccagctacacaggaggccgaggcgggaagatcgcctgaatctgggagtttgaggctgcagtgagctgtgatgatgccaccgcactccagcctgacagagcaagagtgtgtgtcctgctcgttttaggaaatgtctgttctgtaaattagatgaaggtgtttgatcgtgttgttcagttcttctatatccttgctggttttctcaccacttgttctgttactaagtgaggggttgaattttccaactataactgcctgtttctgctttcagtttttgcttcatatattttgaaagtctgttgtttggtacattcacatttataatgattgtgtcttattggtgaattgactcttattaacatttaatgctctggtaatgctctttgctcttaagtttactttgatattattatagctattttaatttctcggttggagtttgcatggtatttattgttctatccctttacttccaacctacctgtgtaattgtatttgaagcaagtttcttatacacagcatacagttggattatgtgtgttttttaaatccagcctgacaagctttgtaattggtatgtttagaccatttacatttaatgtaattattgatgtgcttgaatttaagcctaccattttactatgtgtttactattgttccctgagagttttattgctcaactttactgccttctttgaggttattttttcatattccattttaatttgtctcttaagtttttgaccataaatgtctttgcatagtttttttagtagtagttccagaaactacaatatacatacttccttttttacagtctacttaaagtcaacattttaacacttccagaagaatgtagagccacatccctgcctccacatcggttacttaccctctgcctttagagtgtagtcagtgtaatacctgtatttgttgtaaactccgttagacaaaatggtaatttttgctttcaacagtcaaaaatatttcagagaacttgagaagaaaggaactcaacttcattcatccaaatatttgccacttctgttgcttttcctgtattcccaatataccaagtctccttctgataccagtttctttctgtctgaaggacattctataggaattcttttagatcagatctgcttgcaacaaattaccttatttttcctcatctaagaatgtctttatcttccttcctgaaggatattttcattggattaggaattctgggttgacaactattttctttcagcactttaaaaatatgattcttggctggatgtggcagctcatgcctatagtcccagcactttgggaggccaaggtgggagtggatcacctgaggtcaagaatttgagaccagcctggccaacatggggaaaccctgtctctactaaaaatacaaaaattagccaggcatggtggcacacacctgtaatcccagctacttgggaggctgaggctggaggattgttttaacctgggaggtggaggttgcagtaagccgagatcatgccattgcactccagcctgggtgacagaatgagagtctgtctcaaaaaaatactactaataatataactccacttctttccggcctccattgtttccgtggagaaatcagtgggcgcaggaacccttgttcctctctgtgtgtcagtgattggattatgatgtgtctgggcttggacatcttttggtttgtcctgtttgggattctctcagcttctttagtttataggcttatgttttcaccaaattttgggtttttagccaaattttatcaaacgactttgtgcacctaagtgttatcttttcttctgtcactccagtagcatgaacgttagccctctgtgtgttgactttcctggtgatttttctctgctgttcagattttgggtcatttctgttgctctgtcttcaagttgtcacgttcgtttcttcatcgtcctgctcctgaaccaatccatgagattctttatttctgtatttttcagtttttaaattattgtttggttctgctttatatctgttatttctttgttgagactttctgtttttccatttatttccaagtgtttgccctttctttctttttctttttctttttcttttttttttttttttttttttttgagacagggtctcactccgtcacctaggctgaagtgcagggctgcagtcttggttcactgcaatctccacctcaagcgatcctcctacctcagcctcccaagtagctgggactacaagcactgaccaccacacctggctagtttttatcttttttgtagagacagggttttgccatgttgcccaggctgttctcaaacacccgagctcaagcagtctgcccgcctcagcctcccaaagtgtgcccttactttttggagcatttttataatagtgctttaaagtctttctcagataattccaataactgtgttgtctcagtgctgttgtattctttttctatatgagttgctatttttctggttttttcccgtgttgagtaactttgtattgtaccctggatatttttaatgttagggatgagattcttggtcttgttgacattctgtgaagatgttgaggtgtttgttttactgtgacttggttggcttaactctacaaagtctgaccctccttccctgggattggtctcattgtcattttatttgtagggcctttgccttgctgtctctacatgtcccacaagtgtactgaccagtggccagtctgaccacgtcagtggagcagataaaggacagcagtggaaaaattcacgaaattcagataaagtccgtggtttctttgaaaaaacaaacacaaggctctgagcagccaggagttaggctgggcactgcacggaaagccccgtcaccatgtggggcaggtgtttcacccccgtgggtggcgtcagcccctcctggaggagcccaggctggcgggttggcagccccgtcatcatgtggggcaggtgtttcacccccgtgggtggcgtcagcccctcctggaggagcccaggctggcgggttggcagcaggacgacacactcggcagaggctgccatggggcagtgttggccccacggcgtttgagcgccctttctccacatcagatcagtgtgttctgctatttcgcagctacttccctggcccctggttttctgaagtccattccagatggcaggtgatgagcctcagtgagactcttgtacgcatcccttgacctccggggtcacagccagtcactttcacagtagagaagagtgagggtcgtggagctggcagctgctcatctgaagcccctgctccttctctgccctccccagaccctcctgacctatgagccgagggctcggccggtgtcttcacagacccaccgtgtccagggcctcccgtgccatctgttcctggtgctgcagggacccccagcccaggctcatataacccagcctccctcccgccctctccatggtcacaatagaagaacagtgaggctgtgtttcctggggccatggcagtgcctgcatgcttaacaggggcctccagggaccctccaccctcaggccccaccttcccttcccacggagtcttccctcttgtaattggtcactcagccctgtggagggcgctgcccgctccaagctgccccagcccctgtgggcaaggtgtggacaggtgcccgctgctgtgttccctggtttgagaaacgcccccgaagatgggatttgggcacaggttttagacgtggacaggctgcctgaatccagcccaggctctgagtgctgaggcctgggccggtaacatgctcaagtctagaggatggggtaggagcacgttcttctgtggctgttctgggaggaatgaaaggacacccagctcccggccagggcaccagggcccacagaggacggcgggaatgcttagctcagcatggttggcttccacctgtcaaagctgcgttttccaagcattccaacaaagcgctcagtttcagaaagcacgcggccctgggtgggccctgggtgggcagggagcagcccacagtttcagaaagcaccaatcccaagagggtgtgcccagctctgacctccatgttcttcatcctccacaggtgaccccagggtttgaagaaaaggagggggagctgctggtgaggggaccctccgtgtttcgagaatactggaataaaccagaagaaactaagagtgcattcaccctggatggctggtttaagacag

SEQ ID NO: 15361 - DNA, 55830 bp, Homo sapiens
ctcttgtgaactgcgaacttccccttacctcctctctctggctcgggagctgggtgagtttgaacttggcctcctttgcttttctgtgtgcgaacaagtggttgccttgtttgtttactgaacagagtgtggttgaggcaaaatgctgagatgaaacctaacctaatatgtgtgtattagacggtagcatcattgtcaaaataatacttgttcaaagtccctgaaaaccaaacggacaacttgactacgcttcggccacaggcctgggacgctgtcagaccgagggccgctgagtgcccagtggcagcagagcccagagggtgcttcccccaggaagggaggcagaccagcctattcttactgtgagtcgagcaaagctttgattataaagggccagggatgcaggagcctcgtggagagtgccaccccttcttctcgctctggaatgcgggggctgtgcccctggcctgtgtccgcatcctggggcggtgtcccgtgggcagtgtcctctggctgcagaatgcatgttgcagaattggaccagccctcacgcgtcaggagcgttgggcccacaggcggaggcaccctggcttcttctcggtctcctttctctgaatgaagaattccagtggacggcgggcccgcgcgacccctcccagggagccctcgcttcctgctgatttatttgttatttagtagttaagtttttggggggaaaggagagaattatagttcaacctaaaacacgttttctagctctgtgaattgcctgatttaaagcttggcttggctgggtgcagtggctcacacctgtaatttcaacactttgggaggccaaggtgagtggatcaccggaggtcaggagttggagaccagtctggtcaacatggtgaacccctcgtctctactaacaatacaaaaattagccaggcatggtggtgcgcacctataatcccagctagtcaggaggctgaggcaggagaatcacttgaacccaggaggcggaggttacagtgagcccagatcacactactgtactccagcctgggtgacagaccaagactgcatcttagatagatagatagatagacagagcgggtgagactccatcccagatagataataaagagagagagagaaaggaaaaaaaggtgagagagaggagagagagaaagaaaagaaaagaaggaaaaaagcatggcttacacctgccataaccccaggactttggaccagcctgggcaatacagtgagaccttgtctctaccaaaaaaaaaaaaaaaagctgggtgtggtatcacatgcttgtgggcccagctactcgggaggctgaggccacaggatggcatgagcccaggaagtcgaggctgcagtgagccatgattgcatcactacactccagcctgggcgacacagcaagaccctgtctcaaaaaaacgaaccttggcacctcaccacatttccactgcgcaccagtgtgggaagggtctgagagaggcagcgccgtgtctgccccgggggcggggtctccaggccatgcctgttgtgagcgggggctgtgctgagctcttctctgcacttccccctctcacgggtggttttccaggctcaggattctaaaacccattattcagatgtaccttaagtgtgttgaattttatatgcttctccttggttttacctagtttatttcattgtttagaattttgtgtggtttgggaatccttaaactcatgaagtgaaatagaaagctgagatgctgggcacgtacggaacgttccagcagtgtgggtgagaaaggctggacgtggcctgtctggtgcgctgcctcatgactgaaggtgcagcaggcgtacctggctgggtactggggaggtgttttaaatcctgtcttggccacgtttggatgggacagttgggcactcacgtcctgtgccttgcctttctccagctcggccgcctgtcagtgcaatgctgccccatgtggtgctcaccttccggcgcctgggctgcgccttggcgtcctgccggctggcgcctgcgagacacagaggaagtggtcttctgcacacagccccagtggcccgctcggacaggagcgccccggtgttcacccgtgccctggcctttggggacagaatcgccctggttgaccagcacggccgccacacgtacagggagctttattcccgcagccttcgcctgtcccaggagatctgcaggctctgcgggtgtgtcggcggggacctccgggaggagagggtctccttcctatgcgctaacgatgcctcctacgtcgtggcccagtgggcgtcatggatgagtggcggtgtggcagtccccctctacaggaagcatcccgcggcccagctggagtatgtcatctgcgactcccagagctctgtggtccttgccagccaggagtacctggagctcctgagcccggtggtcaggaagctgggggtcccgctgctgccgctcacaccagccatctacactggagcagtagaggaaccggcagaggtcccggtcccagagcagggatggaggaacaagggcgccatgatcatctacaccagtgggaccacggggaggcccaagggcgtgctgagcacgcaccaaaacatcagggctgtggtgagtgccgcctggcgccgtgatggtttcggtgaccgcacagcactccgggtgggctccgggccagaagcacatcttttcattcgcttttctgtggagtcattcacagttgtcaccatcctgcagacccgtgtgagatacagggacgcaggccctcggggtgtggccgctggcctcactggccacgcaggacggctctgggagcgtccaggtgtagagggattgaggggccgccgagtgaccctgccaggaccatgcggcatgaggtcagaagggaccactcactgcctgtgatgctgaggggcttttcggaggccagccacgtgttaggatgcgtggtcaggaccccacatacacccgggtcttactcgttttttgtgtgtcctgtgacctcagtcacatcttcacagaactctccaaccacatcacttacctggcatttgtacagtgtcataacgtctcctatgcacttgaagcaatcaagtaaaaatgaaaaccaaaagccaggaaggggaaggcaggaagtgtaccccacggagtcgtgggctgacgaggcgccatgagcacacagcaggctgggccctgggtggcctgcgccgtcactcctggaagcggcgcgcctgtcgggagggacgggctctggactcctctgtccttgctgaggggagtgacatgcacatgtgcttctccctggagcctgtgcaggcagcaggcagtgtcctccgtgagattggacagaggattcagtgggccgtgcctcacgctgcttctcagtaagagctgagggtgtgctctggagcctggcctgggttctgtcccggctgagcaggtgacgataattcacgaatcggcagagctctgtgtgggcagtgctgtcacctgagccagtggttgggctgggagtcgattccagcctgaatggcgctgggtccctgagtcccaggcttgggcaggggcggagctctgtcgacctggtgtctgcagagccactccccgaccttctaaattccctaaagcctctggctgtgtgtggcgctgtcctctgtccccagggtaagtgagtgacccagcagatctgctgtggttttgtcgtcatcttgagaggctgctaaaggggagcaacaaagagccagccttctccttccccttcctcagtggggaggcccagagctcctttccgtgagcccgaggtctgtgtgtgctgttgcgggccacagtcttgctcttgctctcagctgtgctctcgtcccctgcaggtgaccgggctggtccacaagtgggcatggaccaaagacgacgtgatcctccacgtgctcccgctgcaccacgtccatggtgtggtcaacgcgctgctctgtcctctctgggtgggagccacctgtgtgatgatgcctgagttcagccctcagcaggtgagttggggtcagggctctcggttgcaccctcagactaggcgcctttcccctgtcggggccagggctctcagccgcgccctcagcctaagcgcctttcgctggttggggtcagggctctcggccgcgccctcagactaggcatcttttcctggtgtgcagtcgcccctatccacaggggacgtgccaatgccgagaccctgggtagcatggaaccctgtacctacgatgctttttgctatacatacgtacctatgataaagcttaatttataagttaggcacagtaagaggttaacaataacagaacagttataaccatgtactgtaatcaagttatgtgaaagtgctctctctcttcaaaataccttccggtactgtgctcgtctgttgtgagactgcagtgggccacgcgtcattgaaaccgtgaatagtgagactggatgagcggaggtgactgtacaggccctgctgcccgcgagctcctgcggctgcggcgaatgctcacgcgcttggtttaaaataatgcgagtttgttcttacatgcttggaggccaggattctgagacgagtcttgcggagctgatgctgggtgtggtagggctgctccgtcaggaggctccagggcaaagtccgttcctgcctcttgcagctctggaggccgcctgtgcccttggctccagctgcttcacgtccagctctgcttctgcaggcacacggccttctctccgtagtcagggctccctcggcttccctttgtgcagcctatgcggatattccaagatcatctcccatcttgaggtccttcgcttcatccacctgcagttcccaccactgcgagaggtgacacattcggggtgtagggcgtagggcgtgaccctttgagctatgatgtggccactgtggcagccctcggttactccagagtactggcccagctggagagctgcttgctgcggagggttactttggagtattggcccagctgaagggctgctgtggagtctctgtctcccctctctgcatggcttcctctgtagcgtctcccttggagcaggcagggagggaaggacgcggtgctggtcacacagagcgctggggtgggagcagtcatcgccgagctgctgcgcgcagccttgcctgtgcagggctgtctccaggcagatcagggatgctgctttggagggaaaggacctgggctcgaggcgggaccctgtgcacagcatcgggcctcgcctgtcagttggggatggcggtggcttttaggagttgctgtggccctgtgtgcattctagctgactgcaggcaagagtcactcaccaggctgcagagggcatgaggggcaggccttgagcccacaggaaggacacggtgtgcgtatgtcacaggtgtggtgaagcagagccctccggtgaggccatggacgtttaccagcctctgcccgtataatgaatatgccttttattcacaggaaaaaaagtttaacacgtgaatgtatggaaaagcccttagaatttggatcgtatcatgatggttctcagcacagaggagcccatctctgaggccagatgcctgggactgggctcttggtctgtgcggggttgttctgcagggcagacgtcccggccagcagaggcacagccctaaagcccagagcacagcagccaccagtggccggccccacactcaccgctcttgccaggactcttcctgtctgaagtctttctggccccatcgaaggctgtgtggagctctgaggcctctgaccgggagctcaggacccaaaccctagtcaggtgtgaatttcgccaggaaggggtccctgcaagcagtcagccctgcccaccttccctctgcttctcctgccgctgagaggcccatcctcttctctgcagggcatccagccccacacggtggctggaggtggagagaaggcagcttttctggccctccacctctctgaccttcagtctcatccccggaaaataaggttggaggccggctcacagtgggcacaaacttggaaaagagaaggggctcttctctagcctccactggaggcaaggtctcacaagagaagccagtatgtagaacagctttgtacgagcaagtgagcctgtttcttcacagatgataacattgggctttagagaaagacctctttaaaatctagcagttactaccgtgccaaagagaggtggctgccagcacacttgcgtgattagccgtcagctccctccactgctcttcaggacgcctgtagccacagagcctccctgagggccccgtcgccagggtcacctcctgaagagcctccctgagggccccgtcgccagggtcaccccctgaagagcctccctgagggccccgtctccctaacacattccacattcttgttggcttcagtccttatttttcacagacatctcagccctgaccccagctgcgacacagcagtctgttaagatggcagacactgcggctgcctcatctgcgtggtccatcccggagacatctgcctggcgctctgctccaggccttcctggctcccctggtagggatctggctcagtgacccgaccctccttgcggctctctctggggtgcgccctgcatggacacagctgtccttggtgaacgtctgctgagtcaaagtggttttgctgcagtgagttccccgtgagtgcactgtgtgggtggtgcagcgcctggtgtgtagggaacttccatgcctttgctgtgtctctgggggctcctctgacggggcagctccctcctctccgccttaagctcctcctttcctttggcggtcagctctgtccagggtgtcagtttctgtgcctgtgactgggccccctcaacctgccccaccttggcctctgctccttggcagcctggccctgaacctctgttgggggctgcccgggcgctgacggtggctggtctaccatggtcacttgggcagaggcagcaacggccattgtcgtggaccgtgccagggcgagatgcagctggcaggggcagaggcagaacatctcccagggagctgagggcaggttggttccatcgtcccggagggcaggttggttccatcctcccaagtaaagagtgtgttaccctcagggcgagaggcaggtgggtgtgggtgctggcgcaggccagctgtcaaggatctgggctttctggtcttgctgcttctccagcactgcatgaatgacaccacctggccctttccagtgcccacaggcacacggcttgggagctgctgctgcggcgtctctgcccaggggcatctgccagggggtccctgccttggggtctgtgtcccaagggcgtctgcccagggatttctgctccgagagtgtctaccctggggtctctgcctggggatctgctgtcatcttccagacactgcagactggctcattaatggacacgggaaagcctcagaccttcaacggacacgggaaagcctcagaccttcaccgtttttgacacttacttgggatttttctttaaactatgctgtgaaaacttaattttttttttttttgagatggagtctcgcactgttagccgggctggagtgcagtggcacgatctcggctcactgcaacctccgcctcctgggttcaagcgattctcctgcctcagcctcctgagtagctgggattacaggcacctgccaccacagccagctaattttttgtatttttagtagagacggggtttcactatgttggccaggctggtctagaactccggacctcatgatccacctgcctcagcctcccaaagtgctgggattacagacgtaagccactatgcccagctgaaaacttaatatttaaacaaatttgatgctgtggctacaaaggattgcaactcttttccataaactccaagtttcagggttttccaactttaggaatttctatgtgtaaaatccagctgtcagcgttattgaactttgggattttgtctaagattgtgtggaagaatgtgtaggatacaagtgtggggtgaccagacacctgcggtggtgctgaacgatctcagacgcggtgtcttcaagtcatcctgcacagagggccgtgggtgtcagtgcctgcaggtgacggatggggttgggggagaggaggaggatgccggaagatggatgtgcagccacagcctctggagatcaaagtcaccactgacgagacagccagaggctcagatcagtcactcgtctccaacagcactgccctggccgacttcctcaggatcgcagcatggactcaggagggctgccatctggcagggtctgtgctgtggcagctcaggttagagcaacaggcctgctcctgccacctcagaagcacttgctagttagtcaaatgttatggcgcccttcagggggcctccaggtctttcacgtcttggaagtgtggcaacacattgggatgtgctggaggaagaaggtcaccctcggctctcagtgcccttctttagggcagcagctgccctctgaagatttggatgaattccaagaaagaccgtccttcgtgtctttcacctccgcgcctgctccctgcccctcagccttgtcccgttgcgtgcatgctgtccccgcctcagcaccatcctgctacacgcatgctctccccacctcggcaccatcctgctacacgcgtgctctccccgcctcggcaccatcctgctacacgcgtgctccgttttccgtgcctcagtgtcacgtttgtgtttctggttcactgtgctgttgatctgtgtgttacatcaaatgcagtttgttctttttacgttgctgtgttgtatttcctggtgtgcagaagccacagtgcgcttatccattctgctcttgaaggacttgagattgttttcagtttgtggctattagaagtcacggttgctatgaacattctcacacagatgtccctgtggacagttcccttggatccgcaactcccagtgccggctcacaggctagatgtatgtttcatttcagtggaaactgcggaagagttctcaaacgtggctgcatgtttcacacaccccagccccaaatgtggctgcatgtttcatacgcccccagccccattctgctggtaccaatttactgtattagtccgtgtgcacactactgataaagacatacccaagacagggaagaaaaagaggtttaattggactcgcagttccacatggctggggaggcctcagaatcatggtgggaggcaaaaggcacttcttacatggcggtggcaagagaaaatgaggaagaagcaaaagcggaaacccttgataaacccatcagatctcatgagacttattcactatcatgagaatagcacaggaaagaccggcccccataattcaattacctccccctgggcacctcccacaacacgtgggaattctgggagatacagttcaagttgagatttgggtggggatgccatcaaaccatatcaggagtccttaaatttgttaaattccccacatgtctcctcttctggtgccttcatttgtccctacagaggttctccgcgaagcactgtgcttcccccaacttgtttcccttcagcctggagaacttcttttcaatagttcttgtagtgcagctttgctgacaacaaatccctcaattttgtttcactgaaaatgtttttattgcaccttcccttttcaaaaacagctctatcgagatacagttcacacaccgcaaaattcattattgtaaattttgaattaagtagccattacctcaaaccagtgtccatttccccccattcccagcccctggcaaccacgaatctgctttctgcctctaggatttccttgtttgagatggcagcgtgtgcaaatggggcgtgtcacactcagtcttttattccagcttctttcacttgcaggatggttctgagtttcatccatgttctactgtgtgtattaataacttgttcctgaatagtacttcatcatatggatataccacattttcctcatccattcaccatctgatgggcatttggactgtttcagtttggagctattatgaataatgctgctatgaacatttacatataaatctctgtagacattcattcatcttacatagacacagagggatagaattgatgggttgtatggtgactttctgtttaatgttttaagaaactgtcaaactggccgggcacggtggctcacacctgaaatcctagcactttgggaggccgaggcaggtggatcacttgaggtcaggagtttgagaccagcctgaccaacagggtgaaaccctgtctatactaaaaatacaaaattagccaggcaccgtggttcacacctgtaatcccagctactcgggaggctgaggtaggagaattgcttgaacccagggggcggcgattgcagtgagccaagatcacaccactgcactccagcctgggcaacagagcaagactgtctcaaaaaaaaaaaaaaaaaaaaagaaaagaaaagaaactggcaaactgttttccaaaatggctgtgttgctgtacgttctcatcagcagcgtatgagagttttcatttctttacgtcctgccaacacttgtcactggcttcagtttgcgtttccctaatgactactgatgttaagcttttttttttttttttttttttttttgagatggagtctcactctgtcgctcaggctggagtgcagtggctcagtctcggctcactgcaatctccgcctcctgggttcaagcgcttctcctgcctcagccatctcagcagctgggattacaggcgcacagctccaggtccagctaattttttgtatttttatagagaccaggtttcaccgtgttggccaggctggtcttgaactcctgacctcaagtaacctgcctgcctcagcctcccaaaatgctgtgattatagccgtgagcccgccgcacccggccagatgttgagcattttttgtgtttatttttacttttttccttttaaattatttttgcagaaacagagcctccctatgttgcccaggctggcctcacactcctgagctcaagggatcctcccgcctcagcctcccaaagtgccgggattacgggcatgagcactgcacccagtgctgttttttacgttcttgtttgcatccgtatgtaatctttggtgaactgtctaatgaaatctttggccatttttaaattgggctgtttgtcttcttactgagttgtaagagttctatgtgtattccggatacgagtctcttttcagatgtacggtttacaaatatttcctccaactgcagcttgtctttttattttcttaatgtgtcttttggagcacacattaattttgatgaaattcattttataaaaaaaattttaaaaataaattcattttatcaatttttaaactttatagattgtgcttttggtatctcatctgagaagtctttgccaaaccacaggtcatgtcatgaagatattcccttttgttttttcttagaagttttctagttttagctcatacgtggaggtttctgacccactttgggttaattttgcatatggtgtgaggtagggtctaggagtcaccttctgcatggagatattcagtgtgtcagtgccatttgtgagaaagattatccttttgtccttttccctattggggacttggtttctttgccaagaatcacttgaccagatatctgtgcattcgtttatttctggactctccattgtgttttgtgggtctcttgtctaatcttacacagcatcacactgtgttcgttacttctggtttacgtcagttttggagttgggaactgtgtgttctcacctttaatctgccttttgaaatttattttggatcttctgggtcctttgccttttcgtgtaaaacgtaggataagtgtatcaatttctgcaaaataaagcttgccggaattttgggaagattgctttgaagctggagctcagtgtgggaagaactgccatcttcacaacatggagtgttcccgtctgcgagcctggcctctctccacccgcttatctgttcccctccctccctcgatggcagtgttgtgggtgctgctccgcggtgctgctgtctcccgcactctggtcgcctgtgtctttgctttcccgtctgtgggtcagcctagatcacccccgttgactgtgtctgacttttttcctcttttctgctgcgtcttgtttgttattaggtctattgaatgaattcattttggatcttgtgtttttcagttttatgattttttgcagttccacttctctttgcaattctccatcttccccacgttgttcatcttttctttgaaattccttaatctgcttattgcagtgatttgaagggccttgtctggtgattcggacgtttggatttcctgagacttcttcccttcagttggggatcacatctttgtgtccttacatgctttgtgactttgaagggttccagtctttgtctttgaaagaatgatattatttcttccccggagattcctgcctttctctgccaggcagctgcggtgaggcactcgtcactgcagtccagtgaggagatgagatgggctggggctggactgtggcatcggcatccgtcgaccccagtttcaacgccgtgtgggcgagatctgtcctgtgtgtcctgggcctcccttaggtgctgaccccacagcacgaagagtgccctcctccctccgccacacccttcggtgctccgtgtggaacaccgcgggtagagagggccatggaaggaatgcggctcaccagctcttcctgaagctttatgggcgacgcgagaacccgctaacgagtgaggaacttaaaacgtatttatatgtaagcaagaaatgtttattatggagtaaaatataaaattcacatgactcttttaaataaaagacttcacccgttcgctagtcactgcatgcctgtccatactgggaagcatgctgacttcaggtctgcgggcagccaggccctcctgccagcttccccaaggtgtacatccgccctctctgtgtagctggaagagcctgaccactcacgtctctccaggccacagatcccgaagcccttttctagctctgttcacgattgctcttcccctcacaggccagacgcagctgtcccgcgcaacatggcttctgtgggaaggggtcagagtttgaggcaccccttttagaagggaggcgctgcagactcttgaatgtgaaccatgagaacgctgtgcctggagccaggagcctccgccacgggccccagtgcctgctcatcttcctaccgagtgcttcctttccttcgtaggtttgggaaaagttcttaagttctgaaacgccgcggatcaatgtctttatggcagtgcctacaatatacaccaagctgatggagtactacgacaggcattttacccagccgcacgcccaggatttcttgcgtgcagtttgtgaagaaaaaattaggtaagtgaaaagagcccactttctcgttcagaaagtcttaaagatcaacagatacgacttatttctaataaatcactcctactaagttctgggaagcagtgctttccatttcctttcaatgttccctctctctctacccgtctccgtctctacctctctaactgtctctctctctctctacccgtctgtatgtatatctgtaatctcttccacgtcgatagctgcctggattctgtatcgctctctctgtcacactctgtctctctatctctctctgtctctctttgtctctctctctccatctctccatctatctgtcttctctgtctctcttgtcagactctccatctctgtcttctctctgtctctctccatcgctcttcatctgtctctccgtcttctctttctctatctctcctgtctctccatctgtctctatctctccatctgtctttgtctccgtctgtctgtctgctctctctcctgtccgtctctctctctctctgtcatggcgtctgaaggacaagggtgaggacagtgagctgacccgcttgctcctgcttcatctgcccacatgtcccacggcgcctgcctctcctatgcagtctctctgccttcgtgggcagccctgtgaggcctcctgcctggggcacgttctgctgcttttcctctcagccccgctcctcccctcccagctccctggataaacccctccctcccaggacaagctggtcttttgggccacccaggggcgtgtttgctctgcactctcccatgaacctgcaggcgtgggaacgtttcttttccctcgtggctgttgaggtgtggttcactaactggaaacgcacacgtgtggctcagtgagtcttcacacgcatcacaggcccgcacctccagcagagtcgtgggtggggtattttttctttttgtgagagggaggggtggcgtggagggtgcactgcaggaactgaaggctccactgccatccagtttccagtgggatgtgtgtgtctgtggctgccgcgcgctcctcccagtccccaggaagtgcacagggaagcggcacctttgttcctggagagaattccgggttgtccaaggcacatgtctgaaccgcttcgctctctttgccgttcccttgccccttttctgtgaggccaccggagcccatggttttgctgctgctactgctgggataccctggggctgggcaggccccaagctgagcagggtgagcacaacgttttaccaaatctaaggaaccaagggcaagaacgaggtcagtgaaggagaggatcaggtgatttctggggtgacagaggcaatgagacctcggccatctggatctcccagcgggggtcctgtcagtggtgcctcctcgtaaagcaggggcagcagcagggaccactccgctcagaccgcaaacaaaagcgccttccctactgcccgtgaggctgcgggaaatgctgtgtgagagcgcggggactcggagttctcagggcccgtgttctcctgccaagcctgagctgaccctgtgggccaagatggctgcagttctgcgggtggttctgagccccttgggtgtgcccggccccaccccttgggtgccgcggccattcacccatgtccgcgttctgctgcagagcctgcaagctgagccggctgtagtccccggatgtgcctggccgcagcctgcagcgccgtggctgttcacccgtgatcagctccgtggtcggcagctgcacggtcactgctgttcttgagcgtggttgtgaacagcgcaggaactttgcaggggacaccgcggaccctaagcacattgtttaccctcattagctgttggacctgcttccttctaaaatacacccaacagatcgttttcaaaaaacaaagtcacgccgtagcgcagactgcagcgttggtcccgggtgtcgcacagtggtgctgtacccacggcctggggctcctgcactcgtgaaggagctgccacttttgcaagcaagggccgcctcctgaggggctaaacctgccacctttgcacgcgagagccacgtcccaaggggctaaacctgcctttggttgtgccgcgtaggctgatggtctcaggctcagctgccctgcccctcccagtgctggagaagtggaagaacatcacgggccacaccctgctggagcggtatggcatgaccgagatcggcatggctctgtccgggcccctgaccactgccgtgcgcctgccaggtacgagcacttcccacagctgcgttcctcttccactgtgctctgagccccccaaggtgggccagtctcgaaccacccacattcggactgaagggcggcatggaggatgctcccccgtgggacaggccactcggccaggagagcactcaggatgcactgcgacctgtcccctctgggtagatcagccttctcccaagtctcagtcgggtggatgggggaggtgtctgtgctggcccctggctgtatgactggggagacaatgggaagaacagcaatgcctggaatgcaggcgtcagtgcatgtctcagaggaaggcggggggccatgctgttggctccagaccacatcagcagtggtggcagcctccgtctgtctggagtccgggtgccacacagcgccagcagcagtgccaggagaggtgggtgtggtgggcagggtgggatgagtcaagcacctgtcttccttctctagatgtgggctcctgataccgggcccctcttgtccagccttccctaacacatcccattctgactttcatctgacccaaccatttgagccctgggtcctccgctgggacttctgggaacagagcccacagctggggggccaccctgctgctttctgcgcagcccttccagtctgtctagagtagaagagagatctcagtgcagacttaaagtgagaccatcccgcacatctgtctgtgcagctgcttacctgcagacccagtaaaaattcacccctctggcgtgcagctctgtgtgtcttaagaaacatcatcacagtcaaaatagagaagggttcctcgcctcagaaactcccttcctagtgctcagcacctcctccacccccgaggcctggccccttgttcctgtttctcttcttgtggttttgctttttctgggaggccacgtggctaaatcctgcaggacgtggcctctgagcctgtctgcttccgcccggcttccgcccacagtcaactgcctgtgctgtgtgcgtcagagcccgcgcctttccctgctgagtggcatccgtggtgtgggtgcggcaccgcttgtgaccctgttttaagcaatgacacgtgagatgttatcaacatttgtgtgcaggtttctgtgcgaacgtggttttttatttcacctgggcagatacctaggagagagattgctgtgttgtctgaagctttcaagctgttctccagagcggctacaccatccccttccccctgcaatgggtgggaggtcacgagcacctgctgctccagcgggcggtggtggtgtctcgttgagttcatgattctctcatgatgggtggcgttgagcacctcttcctgttcgtgtcattccgttttcaactggggcctttgttttcttgagttttgagagcttttaaaattcgggacccaagtgtcagctgtgcgattttaaatatcatctcccagcttgtggtttgtcttcccattcacctaacagcgtctttaaaatcaggagttttaggttttggcccggtttatcaatttgttttgtgaattgtctgatgtcatatctaataaatccttgcgtagcccaaagtcacagagaatagtttcagctcttacgtttgggaccatgatccattttgagttaatgtttgtacatagtgcgagatacggaccacagttcttttttagtgtgtgaatgtctaactttttagcactgttcgttgaaaagactcccttctccatcgaacagccctttggatctttgttgaaagtccgtcgactcctgaggggtcggctcctgggctctgctctgtcccattgctttccgtgtgccctttggctcattccatgcctgcttggttcctgggactctagggtaagcgtggacatgggggttcaggcccaggcagggaccagctggtgccaggcagcgatacggtgctggggcctgcaaggtgagtgtgagggctggctggctgctgggctgggaggaggagagactgtaggctcacgcccctttgctgggcctggggagccatgggggctgttaagtgtattctgagtgtaaagtctcggtttggctggggcatcctgagcagaatgacagggccatggcagcgagatcctcagctgccgtgcagagctgccagtggggtggccgcacagagtgcagtgcctgctgcaacagtgcccagggcagtgggcgggtgggggcatgttgtgaaaagaagtcagtgtgagtgatgagaaatacatcctagtctcagaccccaggaaaccgccgtcagtgctggtggcccctgccctgggccggctcccgcgttagtctcagaccccaggaaacctccacctccgtcagtgctagcggcccctgctctgggctgactcgcgcatctccacgatggctgcggcaccagctgtttcttcggtggctaaagctctctggtggaaataagatggggaccttgaaatcaaatgtgactggtctgttgagtctctgtccttatcgttgtccttcttagtaggatgtgctggttttgtccagtgccaccggccacagtcaccacgtaatatggacggaatgagcaaagcccggctcgctgaggctgcaggctgcaggcaagtgaggactgaaagggtaacgggctctgggctttgtcctctctttgttccggacatgtgagcaggacaagttctgtgtattcagaatctgtctgcacagtttgtagttcatgatgactgttcatccacagcattgctttgtgggcgtcctctcttttgatcttctcgaaacagcccctgcgatggggtcatattttgcactcacatacaagaacccatgagcctgcccacggtcacgcggctggtgagtgatgcacttcccaggagcacggtgacctcttcaatggccctcactagagaagatggacagtgcccccctagccttttttactggaacagatacaaggctgagaagctgaaatcaggagcagcccagggaccactgtctacaccgagggagtcatgagcagcccagggaccactgtctacacccagggagtcaggagcagcccggggactgctgtctacaccgaggatgtcaggagcagcccagggaccactgtctacactgagagcgtcaggagcagcccagggaccgccgtccacaccaagagcgccaaggagcagcccagggaccgccgtccacaccgagggcgccaaggagcagatagtagcccagagacccaggggaggctcagcttccccacgctggaatcagaactcctaggcgaacaggaaggagccccagacagatggcacagggagaggagtccccggctgaggagggggatccagagaccctgaagcttcagggttattgggcaagaaacctgagtgcaccaatccccgagtcttcagctaccgacggcaggttccctcgggtgccggggatgctccctcttctctaaggcagagcccacagtaggttccctcaggcgccaaggacattccctcttctctaaggcagagcccacagcaggttccctcaggcgccagggacgttccctcttctctaaggcagagcccacggcaggttccctcgggcgccggggacgctctctcttctctaaggcagagcccacggcagattccctcgggcgccggggacgctctctcttctctaaggcagagcctgacggcaggttccctcgggcgccagggatgttccctcttctctaaggcagagcatacggcagtttccctggggcgccggggacgctccctcttctctaaggcagaatcaaatatctgtgattttatccttgcctttaaatcaccagcagtgtgagttctttggtttggaaaaaagtaagtaaagtcacctcagcattaaatccaatatgccccacaaaaactccaaaatgcagcctcctgagccatgtttctagagggcacggtggaggagagctttcctcactctcaggctctaacccccaccctggtggccatggccttgacccttgggtcggctccagccacaggctctgagctcatgcttggcctcgctgctcagtgcactgtccgtgctcggaagagagagaagctgggtggagggtgagctctgtcgtgtgttatggttacaggcctgctccgtgcggttcctgtggagggagatgaataattcatggccgaccactgctgggcctcgtcacactctaattggaggttgagctcagaggtgctcacggctcctgggccactctgtggcattgacagggagctccagggcctcattggcggtttccgttccctgggtcccagtccccagtcagagttatcagggaggggctggctgacagcgattttagaggtgggctgtggcaggaaggcagtgccccccacctgcctgcagctgcgctcccatctacattggcctttgcggggccagcctctgtccactctcttgagctctcatgtccacactgtcacatgcccggggcacagcgagcggcacctggagtgtggggacccctccctcgagctctcacgggtggcacctggagtgtgggggcccctgcctcaagctttcatgggtggcacctggagtgtgggggcccctccctgaagctctcacgggcggcacctggagtgtgggggccactccttgagctctcatggacaataccactgcttggctgctgcagaatccagacaccatcccagagcctcttcagcctctgcagatggtgtgggacggccacacggcctccccacctgcggcccccgcccctaccccagccgtgccgtgtccttgcgctgcgtccccgccccagtagaggcatcaccaggaagaggcgaaaggccgcctgtgatggtcctcttcttatgaaacgcccagaacagaaaaaccacggacgcggacagcagacctggtgccaggtctggggagggagggtgtggcggtcgtgggctgtgcgggagttctgactaggggaagtggggggctgtgcaatgtgtgtgcggaacaccgccgtgccgcgcactgaaatgggaagtcatgtgttatgcgggtttcacccccatttaaaaatcttcagaagcaaaacataaaggaggagaaaggatggaagaaagggggctgaagctggccccgccacaccccccatagtggtgacacgggtttctgaccagagtggaggttcggggcgtctgcatacctggaaccacagagaactcccgaggtgacactccgcacaccacactagcccggcttcgcctgcaggaccccaggtgtggacaggcccagcaggatcagcaagaccgagccgggcaccgacagcccctcaccaagcgtctggaggccgggacgccccatggattgcagagttcactgcactgaccctcgatgctgacccttgaagtgccggaaatctcagcgtggactcagacatgataagcgttcaggcactcccctgacgcaggccagggcaaaggcctcacgccccgggatagacaggaagtcccacgtctgctctgcccctaggtcatgcccgtgctgacgccacatcgccagggccgcactccatgagcagcctctgccgtcccaccagcaacctaaaccacaggcagagcgaggctgcggcagccctgcgtgtgccggcgggacacgtctcgccacctgggctctgcccccaccccggccagtgtaagatatgattttagccacgttgagactgtgcaggtgggatggatacactgagcaaatcatgggtgtctaataaatgagccagtacaaagtgtggtccacctgccatgcagagttcaggacagcccctcctggggacatagggcagatcctgccttagcccgtcgtgtgccgggcacacacaggtcccctcatcgtggacagccccggggccatcagggcaaggcgccagccctccctggccagcaagtgtgtaaaagtgggaatgacaccagaatctgtgggcagctgtgaggctttgggaagtaactgggaaagtgatgtatgaggggcccagggcaggccaggcccagcgtgccacgtgagtgcctgctgtgccacatggccatcactgtggcatcggctgggcctgagcacaccgtgcttgccagccacgtatcgtgtggcttttcacctgctggtgcctacaccatcttctctctgggtcacagggcacgtcgctccctccacacagactcccgcacgtggcacacgggagctcagcgggatccgagctcagtgtgtgcttctctcctccaggttcctctcactccagcctccccttcagtgtttctcctctcctgtaggttccgtggggaccccactgcctggagtacaggtgcgcattgtctcagaaaacccacagagggaagcctgctcctacaccatccacgcagagggagacgagagggggaccaaggtaagccactctgctcttggcaggtgggcggccgtgtgtccagtctaggccccccagggtggttacactggtgcatctttcccctggaggcagactcccctccacgcaggggaccagccccctggacactgcaggtgctggctggtgttgcaagggcactggctggtgttctgggccctgcctgctgcgtgtccgtctgtgcgttcacagagcagtgggcagagggagcccagggcggaacgccaaagggactcacacccgggcacacagctcctcccaggggccctgtccacggggacaggctgacgtgggccatgatggccttggctaagcggaagagataaagagcagaggccgttgttgttgatgggaatctggttagaaatatgaactggcctgaccctggcacccgtcctgaggggacgctgaccacaggcccccatagtaggtgtggggagattcacggggccctgcacgcggaggtgggtgcctgtgcagtgctctgtggctgcctccttgtcttgtgcgttattctaaagctgacaagggtgaacaagaacaaaggacattgtctcatttctgtgaggattttaacatgagagtctgctcatcacacgtgaactcatcacagagaaaggtttagggattatggggaaatggaatcttgatttaaaaggaaattattttctctgaagccagtatccacacctgataccacacatgattgactgtgttgccctgaggttttcaaagatcgagggatcctgagtctcatctctgtgcatttccttctctgtgacaccatcttggccctcacgggcacaactgagctccctgtgcagaggctgaggggccgtgggccttgctctcgtgagtgaacagccacacgccctccttgtaccttggtttccacacatgaccacgtgagggttggagcgatggtcgtggttggacgttttagctccagcaaccaagtaggatgtgggtggctttcagtgtcattaaatgacactgaaaggtgcagtggccgcaccttgtgtggagggccacacggcgtgtcccgcctggcctgggccccccgcagtgggctgttatcccccgtggccctgaagtgggtattctgtttccccgtggaaacctctcacctggggccacctgcagtggccgcaccttgtgtggagggccgcacagtgtgtcccgcctggcctgggccacccgcagtgggctgttatcccccgtggccctgaagtgggtattctgtttccccatggaaacctctcacctggggccacctgcagtggccgcaccttgtgtggagggccgcacagtgtgtcccgcctggcctgggccccccgcagtgggctgttatccctgtggcccccacagagccatggggcaacttgctgaaacccacctgggtggctgccccttgctatacccacctcccctgccctctgtagggccccagcccatgctgttgtcctgacatgcctctcctgggattcctgcctctgccctgctggtactaggctgctggccacaccccacatctcaggttcctgaatacaccggcccttcctggctctcaagtctgtgccctgcagtgcccctgcccccaactcgaggacctcccagctcagccagttccaaccctgtctgcagggacggggctcagcctgtgcctgggttggggacaccatctagtcagaaatgtccccagcagagagcagaacgtgagtggcgtgtggaggagtgagacgccccgtggctgtgcagccctctccaggtgtcagtcagctgacactcctgcctctgagcacctgctctgccggaaatggcagaaatgttgccagagaaaggggcggagcgggggtggggagcatttctgtcttaaattaaaacaaaacttaactgcttcacacctgcattggctgccgcgccacctgattgctcctgcctgagtttctttaattatttgtgtctgctggtttcttccctgaagcagtcttgaaatagaagcagcagcctcagctacctgggcaccctgacagtcagagacaccgcacaggggcctctgcgacaggcatgcaggcagaccctgcaaggtgaagccgcacagatgctctggggctgcttaaatctcagcgtacggggggtttgcatctgctgacagcaggcccgggaacatttccagttcagccaaggagtcggtgcagcaggtggagtacagctgccctgcggggcctggctccaccaggggccaagacccttcgtggggaggagcacagcctgagggcctcagggtttgtgccctccgacacctgagattcagggctcccagaggggtgggtgggcgccccaggacaaccaggtgatgatgggcgctgtgaactctgaaaagccccagcatcagagacctgctgctctctcatgtgaagggactccccaccccacgctcacactcgcagacgcacttggtactttcatctgagtctcacgcagtagcccttctctccacagcatcccagaacccgagggtgcccctcactaccacggtcccggatccacgtggctcaagtgaggctgtggccgacagctgggctgtccgatccactcttgtctgtgccgaggcgtgggtcccggccagcgtccctccccagaaggtctccctcaggactagtcatgagaatggccatccctaggcctgtggagtgactcatgactgttcctgggcagatgatcagccaggccttcagagctgaattaagaggcttggtgtcatatttgtcaggaaacagaaagtacctgcagaaaggaatgtgccctgtggggatgggaggacaccttcccaggatcatccccggggccagagtatctggaccctccccaggtggcagctggcctgccaggcccagggctcagcctcctccatcacctcgctgaggggctggctcctaccactccctcacatcctgtgacatatcacaggtaccacacacacatgcagtgcgcgcacgggtatcacagatacacgcagtgtgcacacggatagcacacgtagtacgcatgggtatcacatgcagtgcacacacaggtatcacacgcacgcagtgtgcacactggtatcacacacatgcagtgcatgaacgggtatcacacacatgcctagtgtgcgcatgggtatcacacacatgcctagtgtgcgcatgggtatcacacacatgcagtgtccacacaagtatcacacacacatacacattgtgtgtgcacagctgttacacacataaatacagaaaaaaagacctgatggaaaccccagaagtcaatatggctgagctccaggccggactccctgacgatgtcataggacgagggggcgcgtgtgcacactgcatatatgtgtgtgtgagacccgtttgcacactacatgtatgtgtgtgatacccctgtgcacactgcatgtgtgtgatacctgtgtgtgcactgctcatgtgtgtgttacccgtgcgtgcactgtgcgtatgtgtgtgatacccgtgcgtactctgcgcatgtgtgatacccgtgcacacactgagtgtgtgttacctgtgcacatgctgcatgtatgtgtgtgtgttacccatctgctcactgtatgtatgtgtgtgagatacccatgcgcacactgtgtgtgtgatacccatgcatgcactgcgtgtatgtgtgtgatacctgtgcacataccatgtgtatgtgataactgtgcacgcactgcgtgtgtcacatatgcacacactgcatgtgtgtgtgatacccatgtgcgcactgcatatacgtgtgtgttacctgtgtgcaacactgcatgtgtatgtgacacctgtgcgcacactgcatgtgtgtgtgatatttgttgaaaagactaccctttctgcattgcattgccattgccactttgccaaagattaattggacatatttgagagggtctacatacaggttatctgttctgttcccttgatctatgtttccattcctctaccgacaccacattatcttgactgttgtggttttatagtaggtcttaacaattgtagtgtgatttcaccagctttattctttctcagagttgttttggtgcacatattaattttagaattagcttgtctagccgggcctggtggctcacacctgtaatcccaacactttgggaggccaaggtgggcagatcacctgaggtcaggagttcaagaccagcctgaccaagatgatgaaacccgtctctactaaaaatacaaaaattagccaggcatggtagtgggtgcctgtaatcccagctacttgggaggctgaggcaagagaatcacttgaaaccagaaggcggagtttgcactgagccgagatcacgccactgcactccagcctgggcaacaagagcaaaactctgtctcaaaaaaaaaaaaaaaagaattagcttgtctatatctacaaaaagttcttttgaggtcttgaatggaaagccaggtgtagtggctcatgcctgtattcccagcattttgggaggccaaggcaggctaatcaacttgagaccaggagctcaagaccagcctggccaacatggtaaaaccctgtctctactgaaaatacagttagccaggtgtggtggcacacgcctgtaatcccagctactcgggaggctgagtcacaagaattgtttgagcctgggaggtggaggttgaagtgagccaagactgcaccactgcactccagcctgggcaacagagtgagactgcctcaaaaaaaaaaagagagagagagagagagagatgttgattggaatttagccattctgatcggggagatcacttgggggagaattaacaattactatgctgagtcttccaatccatgaacatggtatgtctctccatttacttagatccgtgaacacggtgtgtctctccgtttacttagatccgtgaacacagtgtgtctctccgtttacttagatccgtgaacctggtgtgtctctccatttacgtagatccgtgaacacggtatgtctctccatttacttagatccgcaaacacggtatatctctccatttacttagatccgtgaacacggtatgtttctccatttacatagatctgtgaacacggtctgtctctccatttacttagatcagtgaacatggtgtgtctctccatttagatatactttggtttcttctgtgttgtattcagcatatagatgctgtacttgtgttaaatttataagtaaatgtttcttcttttctttattcctcctatttcttctcctccttttcctctcctttttaaactattgtaagtatggcaggtgggtatggggggagagttgtttgtttttttgagacagaatcttgtcctttcgcccaggctggagtgtagtggtacgatctcagctcactgcaacctctacttcctgggtctaagtgattctcatgcctcagcctccccagtagctgggattacagatgtgtgccaccacacctggctgattgttgtatttttaatagaggcagggtttcaccatgttggccaggctggtctcaaactcctgacctcaagtgatctgcccgcctcggcctcccaagatgctgagattacaggcatgagcctctgcacacagtcacgtttttgttgctgttgttagttttcaactgttcattgctagtaggtagaaatagaattgatttttgtgtgttggcctcaaatactttagttgttaccttgctaaattaacttactagttttaggagattttaatagacttcttgggaatttctacaaatacaatcatgttttctgcaaatacaaacagttttatttcttcctttccaacctgtatgaccaaagccctgactaggacttccaatacgatactgaacagaagcagtccgagtggaccttcttatttctgatcttagggaaaggattcagtctttcagcaagtgtgttagttactggctttttgcagattccattctatctataatgtgcttagactttttatcactaaatgtatgttgaatattttcaaaaagcttttcggtattgatggacttttctttattaggctgttaatatggtagattacattgaaccaagctttcattcccaggacaaaccccacttggtcctggtgggtcatttttttatatatagtactggatttgatttgctagcatattgctgagtatttttgcatctgtattcataagaaattttggtctgtagtttcccatttttgtactttctttgggttgtgtttgagggtgatgctggcctcattaaatgagttgggaagtgttctctcctctttttttttctggaagagattgtgtagaattggtattatttcttctttcaatgattggtggaattcaccaatgaaatcatctgggcctagaggttttcttttctattattattattttgtgtgtgggggataaggtctcgttctgtcacgcaggctggagtgcagtggtgcaatcatagctcactggagccttgaactcctgggctcaagtgatcctgcgtcagcctcccaagtagctgggaccacaggcatgtgccaacatgcccagctaattttttatttttatttttgtagagttgggggtctcactatattgcccaggctgatcttgaactcctggcctcaagtgattctccctcctcgcctcccaaagtgctagggttacaggtgtgagccactgtgccctaccaacgtttcttttttgaaagaaaaagaactatgaattcaatttctttagtgcttataggactgttcaggtcatctgttgcatcttgggtgatttttggtacatatcatttttgaggaattggttcatttaatctgttaagtttctttatgtagagtttcccttcaggccacgaaaccattaaaaggttgattaaaaggttaataagggaattcccatcttaaccttttaatggtttcagggcctgaagttatgtggctcccattcctcatgttggtaatttgtgtcttctgtttcttttttctttgttatccttgctagaagtttatctgttttatggctcttttttcaaagaagtcacttttggatacattgatttttctttactgtttttctgttttcagtttcactagttcttggtttcttctacttgcttctggcttttctctttttctagttgcttaaggtgaagctttagattattgatttgagacctttcctctttataatgtgtacatttaatgacgtacgttgcccttaagcattgctttagctgcatccccaaatttatatataatatatatatatttttttcttttttctttttttttttttgagacggagtttcgctctcgttgcccaggctggagtgcaatggcatgatcttggctcactgcaacctcagcctcccaggttcaagcaattctcctgcctcagcctcctgagtagctgggagtataggcatgcgccaccacgcccagctaattttttgtatttagtacagatggggtttcaccatgttggtcaggctggtttcgaactcctgacctcaagtgatccacccacctcggcttcccaaagtgctgagattacaggcatgagccaccacgcctgacctaaattttgatatatttttattttcatttagttcaaaatatttttaatgttccttaagacttcctctttgacttgtggattatttagaagtatagcacatattttccaaatagttggatatttttccattatctttctgttactgatttctagtttaagtccattacagtcaaaagacgcacttggtatatttcaattcttttaaatttgttaagttgtgttttgtggcccagaatgtggtttcttttcaggaatgttctggtgtacttgaaaagagtatatattctgcccaggcgcagtggctcacacctgtaatcccaacactttgggaggccaaggcaggagaatcactgcccaggagtttgagcccagcctgagcaacatagtgagaccccatctctacaaaaagttggaaaaaaaaaaatagctgggcatggtgttacatgcctttggtcccagctacacaggaggccgaggcgggaagatcgcctgaatctgggagtttgaggctgcagtgagctgtgatgatgccaccgcactccagcctgacagagcaagagtgtgtgtcctgctcgttttaggaaatgtctgttctgtaaattagatgaaggtgtttgatcgtgttgttcagttcttctatatccttgctggttttctcaccacttgttctgttactaagtgaggggttgaattttccaactataactgcctgtttctgctttcagtttttgcttcatatattttgaaagtctgttgtttggtacattcacatttataatgattgtgtcttattggtgaattgactcttattaacatttaatgctctggtaatgctctttgctcttaagtttactttgatattattatagctattttaatttctcggttggagtttgcatggtatttattgttctatccctttacttccaacctacctgtgtaattgtatttgaagcaagtttcttatacacagcatacagttggattatgtgtgttttttaaatccagcctgacaagctttgtaattggtatgtttagaccatttacatttaatgtaattattgatgtgcttgaatttaagcctaccattttactatgtgtttactattgttccctgagagttttattgctcaactttactgccttctttgaggttattttttcatattccattttaatttgtctcttaagtttttgaccataaatgtctttgcatagtttttttagtagtagttccagaaactacaatatacatacttccttttttacagtctacttaaagtcaacattttaacacttccagaagaatgtagagccacatccctgcctccacatcggttacttaccctctgcctttagagtgtagtcagtgtaatacctgtatttgttgtaaactccgttagacaaaatggtaatttttgctttcaacagtcaaaaatatttcagagaacttgagaagaaaggaactcaacttcattcatccaaatatttgccacttctgttgcttttcctgtattcccaatataccaagtctccttctgataccagtttctttctgtctgaaggacattctataggaattcttttagatcagatctgcttgcaacaaattaccttatttttcctcatctaagaatgtctttatcttccttcctgaaggatattttcattggattaggaattctgggttgacaactattttctttcagcactttaaaaatatgattcttggctggatgtggcagctcatgcctatagtcccagcactttgggaggccaaggtgggagtggatcacctgaggtcaagaatttgagaccagcctggccaacatggggaaaccctgtctctactaaaaatacaaaaattagccaggcatggtggcacacacctgtaatcccagctacttgggaggctgaggctggaggattgttttaacctgggaggtggaggttgcagtaagccgagatcatgccattgcactccagcctgggtgacagaatgagagtctgtctcaaaaaaatactactaataatataactccacttctttccggcctccattgtttccgtggagaaatcagtgggcgcaggaacccttgttcctctctgtgtgtcagtgattggattatgatgtgtctgggcttggacatcttttggtttgtcctgtttgggattctctcagcttctttagtttataggcttatgttttcaccaaattttgggtttttagccaaattttatcaaacgactttgtgcacctaagtgttatcttttcttctgtcactccagtagcatgaacgttagccctctgtgtgttgactttcctggtgatttttctctgctgttcagattttgggtcatttctgttgctctgtcttcaagttgtcacgttcgtttcttcatcgtcctgctcctgaaccaatccatgagattctttatttctgtatttttcagtttttaaattattgtttggttctgctttatatctgttatttctttgttgagactttctgtttttccatttatttccaagtgtttgccctttctttctttttctttttctttttcttttttttttttttttttttttttgagacagggtctcactccgtcacctaggctgaagtgcagggctgcagtcttggttcactgcaatctccacctcaagcgatcctcctacctcagcctcccaagtagctgggactacaagcactgaccaccacacctggctagtttttatcttttttgtagagacagggttttgccatgttgcccaggctgttctcaaacacccgagctcaagcagtctgcccgcctcagcctcccaaagtgtgcccttactttttggagcatttttataatagtgctttaaagtctttctcagataattccaataactgtgttgtctcagtgctgttgtattctttttctatatgagttgctatttttctggttttttcccgtgttgagtaactttgtattgtaccctggatatttttaatgttagggatgagattcttggtcttgttgacattctgtgaagatgttgaggtgtttgttttactgtgacttggttggcttaactctacaaagtctgaccctccttccctgggattggtctcattgtcattttatttgtagggcctttgccttgctgtctctacatgtcccacaagtgtactgaccagtggccagtctgaccacgtcagtggagcagataaaggacagcagtggaaaaattcacgaaattcagataaagtccgtggtttctttgaaaaaacaaacacaaggctctgagcagccaggagttaggctgggcactgcacggaaagccccgtcaccatgtggggcaggtgtttcacccccgtgggtggcgtcagcccctcctggaggagcccaggctggcgggttggcagccccgtcatcatgtggggcaggtgtttcacccccgtgggtggcgtcagcccctcctggaggagcccaggctggcgggttggcagcaggacgacacactcggcagaggctgccatggggcagtgttggccccacggcgtttgagcgccctttctccacatcagatcagtgtgttctgctatttcgcagctacttccctggcccctggttttctgaagtccattccagatggcaggtgatgagcctcagtgagactcttgtacgcatcccttgacctccggggtcacagccagtcactttcacagtagagaagagtgagggtcgtggagctggcagctgctcatctgaagcccctgctccttctctgccctccccagaccctcctgacctatgagccgagggctcggccggtgtcttcacagacccaccgtgtccagggcctcccgtgccatctgttcctggtgctgcagggacccccagcccaggctcatataacccagcctccctcccgccctctccatggtcacaatagaagaacagtgaggctgtgtttcctggggccatggcagtgcctgcatgcttaacaggggcctccagggaccctccaccctcaggccccaccttcccttcccacggagtcttccctcttgtaattggtcactcagccctgtggagggcgctgcccgctccaagctgccccagcccctgtgggcaaggtgtggacaggtgcccgctgctgtgttccctggtttgagaaacgcccccgaagatgggatttgggcacaggttttagacgtggacaggctgcctgaatccagcccaggctctgagtgctgaggcctgggccggtaacatgctcaagtctagaggatggggtaggagcacgttcttctgtggctgttctgggaggaatgaaaggacacccagctcccggccagggcaccagggcccacagaggacggcgggaatgcttagctcagcatggttggcttccacctgtcaaagctgcgttttccaagcattccaacaaagcgctcagtttcagaaagcacgcggccctgggtgggccctgggtgggcagggagcagcccacagtttcagaaagcaccaatcccaagagggtgtgcccagctctgacctccatgttcttcatcctccacaggtgaccccagggtttgaagaaaaggagggggagctgctggtgaggggaccctccgtgtttcgagaatactggaataaaccagaagaaactaagagtgcattcaccctggatggctggtttaagacaggtaggacccagccccatgggagtggaggagaccccgaggggacaggcaggaactcattgctgcccacgttgagtgacaccgaggctgggagttcccagaattttcagccaaaggcagaagatggggtggagtggggctgggggccactgttacggcactgcctcctgagcacccggcctccccaccggcttctagagtgggctccttggccctgtccctcagtgccaggggccccagtgccccatgacaaggcttctacactgtccctcagcgcgacagccgctccggcacgcacgcaccctgaccacagacgccgggccccacgcagcccttcctggtggccctgctgcccctcgtgggctggggcaccctccacctccgaggtgtacccctgtacccagagacctcaccacccccacgcttagccacacttgtgccctccacatccttctccccaccagagtcagaagtcagctgacgcagtgcggttggtttgcagtgcggctgtttgtttactgttccacaaattagcacattctctctgcctgccagaacaggcctgtgggtgagtgggaacctgcccacctgattgaggtggcccaggaagcctgtggcggtcaggagagacggcggcgcccctggagcctgctggcagcccccactgccaccctcctgctctccctgagcctgccctgagctgctgctgcctgacccccctcctttgtgagaagctggcttggtcccaggatcccacatcccgccccatggggcgtatttggacagtggatatttcgacatttggatagtggacgtatatggatggacatttggatagcggacgtatgtggatgtgttactagggggtccttgctcccagagctcccaagatggtagcgggcagcttccaaaatggcggcaggctgcttccaagatggtggcaagcgtcgtgttctctgacctggggttcttggccttatggattccaaggaatggaatcttgggccatgcggtaagtgttatagctctattagaagccgtgggccacagaaaagaaccatggaacccagtgactagtgttcagcttgattaggatgaacgtgggtgcttagccgtgcaggaacaatggcgagcctttaggccagtcgggagtggcagtgggtgcctcgctggatcaggagcacagtggacaccctgcgggatccggaggaatagaagtcagcggcgggtctgcaacggcggcaagcagcagtggtggacggcgagcgaaagctcaacttgagccgtaactaccacggaccagaagagagtgtagttgcaagatttaatagagtgaaaacagagctcccatacaaagggaggggacccagagagggcagccgttgccaggtttatatcccgatcattgtccctcctgctgtgctctgaggagatagatgattggctattgtttacctcctgttttagcctaattagcattttagtgagctcgctttactacctgactggtcgggtgtgagctaagttgcaagccccctgcttaaaggtggatgtggtcaccttcccagctaggcttagggattcttagtcggcctaggaaatccagctagtcctgtctctcagatggacatttggatagtggacgtatgtccatggatatttggatagcagacgtgcgtgggtggacatttggagagtggacacacgtggttgtgtggctgcaggtactcactgtagtgtatttatccggaagatgtgcacgttgctcctgacccctgggtggtgagattgcggtggtttttcttttcctggtttttttttttttttttttggcctgtctatattttatgctgaacatcattattttataataacctttaagtaatattttccaaaaaaaagaggcccattttcatgcatcagaatctgctggcccaaaatcagaaacgcatctgccccatgcccttccacagggagcagagcggggggctgcagcgtgcaggcgggatgggctccttgagggatgctggaaggggcaatgttggcctgcagcctctccgcctcatggcctgatcctgtgggtcccagaggccctggagcatgtgctgctgtgaggcaggtgtgctaggtgtgtggcagttccgcacgtttgcaaagtgaaggctccgtgagcccctagagcagaggccagtgccccacgcagcatctcataggcttcccaaggtaccctgggaggcaccttcgtgggctggacatcagcagaggacccagggctggggccctagaagcctctctgtgacaggacgtggtcagcacatcaaacactccctcccaatttatcttttttatacatccccattagcgcatgctgatctggggaaacagcctgtccatgacttcccttcaaatgcagaattacaggaaccggacttgagcaggtcttgctctgagcatccctccagtgccctctgaatgccccgaccccaatccgactcacgctgcagttgttttatttatttagttagttatttttgagacggagtctcgctctgtcgcccagtctgcagtgcagtggcacgatctcagctcactgcaacctctgcctctcgggttcaagcaattctcctgcctcagcctcccaagtagctgggattacaggcgcccgccaccacgcccggctaatttttgtatttttagtaaagacagggttttgccatgttggccaggctggtctcgagctcctggcctcaggtgatccgcccgcctcggcctcccacagtgctgggattgcaggcgtcagccactgcgtctggccggttcttgtatttttaaattcaggtaaaagctgaagacgttttcttctttgaaagcacaggaaccacagccctgtggattttgcgagtcgcggggctcccggagccgctgggagggcagccgtgtgagatgcggggctgcgagcgtggaaacactcgcagtcgccagtgctgaggcatgtttcagccggggcggaatcacatgcattaattattgtacagagatgtctttagtagaaaatgattttgaaattcagtttaatttcattgtaatgtgctgcaaacaggaagggagtatgtgtgtttaattggctctcgggggtaaggcctggaagccgcatgtctttgtcacaggccattagcgatgctgctgcataatgagagcctgcaatcagctcacagctgccgctcctgccgggagagcatgatattaaatagaaatcaggagaaattaaacttaaccctttccctggccagcccctcctgccacacggattctggcataagccggcgggcacaggggacagccagggatggctggacacagctgaggatggccgaggccggcctgcagctccccaacggcctcctccgggtcaggatgagaggagaggttgccagctttgatgccagccgctcctgcctcccccacctgcctctgtgcctacagcccgcttctgcctcaagatcacacagcgggcttgtgaggccaggggtctccgctgctgctcaaggagatggcaaaggtctgtttcaggtaactcctctgacggccacaacgatgtcttcagacgtcaaaggtctgtctcaggtaactcctctgacggccacaacgatgtcttcagacgtcaaaggtctgtctcaggtaactcctctgacggccacaatgatctctgcagatgctctgactccacgtgccctcgctcagagacacacgcgcacatttgccacctggggcgagtggaaggtgacgtggaggtgggcacctctgccgggcagatgcgggagcagcagcagcagcagcccctcctgggggcatccaggggtcaggagaggggcggtagggcagggcggcatccctgcaggggtgaatggcgtcttaggctccagccgggtgaggaaacctgataaccgaactccttagagaagagccagggatcccgggaggaccaccaggagcttgtggggaaggactgaggggaagagccccaggtctcgggaggaccaccaggagctcacggggaaggattgaggggaagagccccgggtctcgggaggaccaccaggagctcacggggaaggattgaggggaagagccccaggtcccgggaggaccaccaggagctcacggggaaggattgaggggaagagccccaggtctcgggaggaccaccaggagctcacggggaaagattgaggggaagagccccaggtctcgggaggaccaccaggagctcacggggaaagattgaggggaagagccccaggtctcgggaggaccaccaggagctcgtggggaaggattgaggggaagagccccaggtcccgggaggaccaccaggagctcacggggaaggactgaggggaagagccccaggtcccaggaggaccaccaggagctcacagggaaggatggggagaggggagtggggggctggagaacccccagactgagaaattctgctcggagcgagaagggagctgggcccaggtggccccatcccccaaggttgaacatcagcccagcctcccaggccctccacgtgctcatgggcaccactgccgggcactagcttacttgtcaccctgtctgaggcgtgttggggtaggagcaagagtccgctgcttccagggcccagctggggctccatgtgtccctgggcaccccagaaccctctgggtctcagccgttgggttcttacatctgggccagtggcaaagggttaaagggaccttgtgacttagttgggactcactggcctcaagaagcgaaaatcagagggacagcagccccagccgccggggattccctgtggcgccagagctccccggcaggcactgtggaggccaagtggggaccggcagtgtcgtggtcccggcccacagcctctcagcctcccacagcctctccctgtggtaacgaggtggacgctgagccccaggcctgatggcacatttgaggtcaggtgggggcacctgggctgttcctgtagctgtcccctcgtccaggggagggaccttttcagaagccctggggcctttgtctcattgaccaaaaccctcctggccatgctgccttcacaggacactgggcatctctgtggggcaagggaaggaacacaggcctcctggtggggccccaagacccaaccaaggctcgtctggctggtgccagcctctgcgccaagggtgccgaccaaggtcagagccgatcgcggggatgacaggtgccgaaatggccatgcttgccccagcccctttcatccggcagagggacctcgctgggcctgccacgctcagccaggctgtgctgtgaagcccctctcttcccttctcagagccatatgtccacgctgacagctcctgagagggaccatgttttgctgcctgcaggtgccaagctgactgatgggccatgctgaggagggtgccccagccctcctgcaagatgcccttctgtgcagcctgcagggccaccaggcccacgaggcggccatggtcttcagatgtgtcttagcctgggttccctagaaaacacatgaggactctgggcagaggctgagtgtttttacatttttatttttaagccaaagttacacacctgtggcttaaacacccaagtagttgtagcagtttgagaagaagaatcacagccgtgccccttccccagactcgccggctgctgcttctgtgcggtccccgcatcccgagggccgccagcaccgccacctccaggctcctttttgctgccatggcttgagtcccgcagaggaggcccctcctcaggcacggcccggctcagtcccgtatggcatctgcactattgagactatggagtcgccgctgagaactgagcccaggagacactgaggtttttcctctttctttgttttccagagtcgggaaagtcttggttttcttggtctcctggtgccaattcctcgtgggctgggctggtctccccatggcgcctccttccccatcaccaccaccccttccctcctaccgggtcaggacgtcggctcccagcccacagcatcctcgtcttccctcttccgcccccagctgtggggactgctttcccctggggcttcctgaggcgggtgtgtagggtccgtacttggagacttgcgtgtctctccgggtcttcgttctgccctcagccttgcttgtcggtttggctgcgtatagggttcagggttagaagtcgcttctctatcattttctggccttcagatttgctgctgccacagccgtgctgaatcctggcacttggtgaccccctcctttttttttctgtttttttttttttttttttcgagacagagtcttgctctgtcgccagactggagtgcagtggcgccatctcggctcagtgcaacctccgccttccgggttcaagcaattctcctgcttcagcctcccgagagtagctgggattacaggcgcccaccaccacacctggctgatttttgtatttttagtagagacggggtttcaccatgttggccaggatggtctcgatctcctgacctcgtgatctccccacctcagcgtcccaaagtgctggaattacaggcatgagccaccgcacccaaccatgaccccctctttttaacgtacagggtgtcctctgtccccagacccctgagcccaggttgaggagccaccagctgaggacggagccaaggtcacggagctgccgggtgagcgctgagcccaggtcagggagttgggtctcaggccgtcactgggactccctctgccttcaagaagcctctttcacccttggcccacagaggagacctggatggcactggggtccaggtgcagaagcctccagtgtccacgggcacctgagcttccagcaccttccctcctgctgggcggtggcctgtgcctggccgcaatggaggccgccttccccactgcccctctgagcctcagtctgtcctccctgcagccacctcccctggccaggtgccccggggtaactggtggaggctttcacgtaacttggtttccagctgcctctgtacacacacaggcacctgttccaggcttggcctctctgtacacacacacgggcacctgttccaggcttggaggctgagaacttgggggcagagatctcagggcatcggcttgggcggggtccttgggcagggccttgggcttccctcggcactttcctcaaggactggggccaagcttcacattctgttgctggcatcagtgccatttgggagcaaaagtccgacaggctgggtctgggcctctcttcaccttgtttcctgggatcgcgctttgggtgctggtgtcactccagatccaggctcgggaaccacatctgcacagcagaacaggcgctgttcttatcttgcgtgcgggtcaggacatccccccggccaggagtgcttcctccgaggcccacagacaagttctcgctgggggactggggaccacagcacctcactccacctacactctagagaattcaaatctgagtattggaagatttattttcagttacagtggaaggcagagacatgaaatagcaccaaattcaaaagcagctcataaatccaggtaataggagtttattgattgctacattgtatctgtcagaagaaaactcctttaatgaacacatcaggccgaggacatacacagcccattggcagccgactccgattccagaatcgatgcattttgataaataggttgttatggaaagtaaaggttatttaacttgtttgacttgcatttcacagtgatcgcaagttgccctggagccctctgaaccttctgagtcgccctcgctgccgcaggacctcctcccgcggggtgtccgacccgctcttgcttggctgagactttgtttaaaccctggctccgatgcctctgagcccttgatagcagcgtcccagcctggaagaacaaaaccagccacttttccccttggcaaaggcacagcaaggcgggtgaggcgggcgctgagtagtctgggaatgggcagggagatgtcgaccctcggagctgagactgctctgtgctgagaagctagaacaaagcctgacatgttccaaggggcaagctcagggctgggagggaagcagcggggccgcccctttgggtgggggtgcccaggccttgcagacaagacactggccagaggaggtggagcaggggtactggggcagaggggccatgtttgtgcagcaggatggaccctggagggccccggcctagagggggcctttgccaggaagatgccaggaacgtccaggccaaggcgtccgggcaaaggcatccaggcccgggagacgcatgtgggacttgggctttcctctgtgggcagtgggaagtctctccctacccctggaaggagctccaggcagcagtgaggatggggattctgacactggagtggggagccggccctgtggtgctggctgggctgagagcggcaccaccttctgatgcccagggtgggaaggacacacgactgccaccatgcactgagggccctgcacgccacacacgtgctctgagcactgagggtcccctcatgccacgcacaagttctgggcacagaagcacctctcagaatcatccccgagacaggcgtccatcacagagacaggtctcagtcctgcactgattggcttcgcccagtgctgctgggggagtctcagacacagcctttttccgacaggtatagctgccactttctccggcacagaagcctggggccctgggaatggcaccatgttgcgcgccgacccctacggttcttccctccgcatggctcagtggaaaccgtgcgtgcagcacagcaggcagctggggcctgtgacgaccctggggttggaggccaggcagggctatcactgagaagcagggatttggggcctggggcccagggaatggacaactccccaagctgcccccaccagtccttcctgagcactggctctggaagaagcatctcggggcagaggcagccaggcccaggcagggagagacccccaaacaaggcctacagcagggtctcagggcctgaccatgccagaaacagcccagagccagagaggatgggcagatactcagtgccaccactcctgggagatctcagcaccagggcttcgacctctggggatacacacccacacctgctgagatataacacatctgcagagacacagccacgcctgcagagacatacccacacctgcagacacacccacacctgcagacacacccacacctgcagacacacccacacctgcagagacacagccacacctgcagacacacccacacctgcagacacctacacctgcaggcacacccacacctgcagacagagccacacctgcagagacaccctcacctgcagagatacaggcacacctgcagagacacagccacacctatagacacacccacacctgcagagacacacccacacctacagagacacccacacctgcagacacacccacacctgcagacacacccacacctaaggagacggggtctcgcagtgggcggagaggttgggtcttgcatctaatcagccattgatgggcctctcctgtgaagggcactcattccttgtattcataaattaagctcatgtgagtttgttctttaacaagttattgcgcgatcataatccattgccgacgttggcgtgactcaccatgtcatgagcccactcggggctggtgctgctggagatggggaagaaaattgctccataaaccaaaaagcaacattttaaaacttataaaaaagattcgcaggaaattagaaataacacacaggggttccttgtgccgtccccccagtttctcccagcatcagcctggtgtgtaacggtggtacatcctcagtgccgtgcgtagctttggtgcagtctcagccccgtgcgtagctgtggtgcagcctcagccccgtgagtaactgtggtgcatccttggagccaggacacaggcagctcaagagggtgccggggacttgtcagccttgggggcaggcagtgatggcctctccggcaggaccagagcagggcagtggctccatgctgcgctgggtctctgggtggtgcaggccagggtggagccaggccagaagctgtatggagggccctgagcacctggcagcctccctggtgtcagcagctgtggcatccgtggggcaggagcagcctggacggggtggctcggtgcgattaagagatgctattggaagattggtggctgtctggtccagaggggacacacaagccaggctgcacagcaggagcaggagccatggcgggtcccacgggacttgggacaggctgtgtccaaccccgcccacagcccaacctgcacacccccttccagccgcccagactaccccaggggcgcagtgagaccactctcctgtcggggagcctctggtttttctgctacccatcagcacagagttccagagttccagagctccataaataagcctggagcccacctgggcacacccatccgtcttgtttaatagactgaggagcacgccatgggtctcaaggagtggtgaggtggatggatggggcctttctgcgtccaacagcatgatgtataatgaagtatttatgatttattccagctaataacccatgtggagtgcagggtatgtggaagcagacagttgaggcctcagcactgcccttacatgccctgcatgctcccacagccacggcacacatgtgtgcgtgcacatgctcacagtcacgcataccgcgccctcccagctgcacacacgctcgcaggcacgcacactatgggcccatgcgtcatgagacagcttcgggctgggagtacaggctctgaggctgcagcccgctcttcccgactccccaccctcagtggctggtggtgtctgtgttgagctactcgagaaaggaagaaaacgaaggaagcttggttcccacaggagctccaggaactgcacggggaggagcaagggccacgtcgtggctttgccttaggaaggaaaacgtggggcagccccggccattgttctaggaccagcatggtcaggtgtggagggcacaagatgggcaccagcaggaggctccaggcacccaggaaaggccctgtcctcctcagccaccagcccctccctgtggcctctgcgtgggccttggtgcctctcccatccagaggggctgggcattcactgctggagcccaccgtggtgggatgttgtaatgtgtctggttcacttcttttactgaatatttggcctggattcttttgtgggcctgagagaaatggcaggacagggcctggtgggcctcggcccctctcccagagcagcctgcctgcatgaggggcggcccctctatgctgcagtcccaggggctccgtctgggggcccttgcagcagtagcagcacagccaggaggcccagcacaccctggcacccatcctgagggagggtaaagcatcagaccctgtgcttgttgctcagaaaaggccacgcatcccacccatggccagtggttatcaatcactgtcacagaaacagggcctgagccggcttcctaatgcagggtgtctgcagaccacaggcccagcagggcttctggcacctcctgctcctggcaggctctggacccactgctgacctgcccctggaggaagtgcatacagctgagcatggggaagggaccccacaggaagggcagaccccacatcatgggcacagtcccaccttgggacgcacgtcgtgaccaccaggaatgtgggcttacctggcatagctgtttctccgttggggttgccacagggtagtaaccagagccccctttcctcagaggacaccgtggtgtttaaggacggccagttaaccagagccccttttcctcaggggacaccgtggtgtttaaggatggccagttaaccagagccccttttcctcaggggacaccgtggtgtttaaggatggccagtactggatccgaggccggacctcagtggacatcatcaagactggaggctacaaggtcagcgccctggaggtggagtggcacctgctggcccaccccagcatcacaggtgcgtggccggacttgggccagggaggccaggctagacgggtgctgccttccatgtttgagttttagacgactgcagatgagtcgacgccgtcccagctgcctgcaggggtccctgtgatgctcacctctggtccctgccctggccagggaacatggggctagtgggggtgcagcctgctcggtgttggagccactgaccccgtgcccaccagagctcccaggcctggccgggcgcagctcccatctgcatgattcccctgcaggaaggtggcagggagagtgcagagagccaaggggcgggaaggcagagcccctgtgagtgcccagtccccagatccaccgtggggagcccgtcctcactcccctccccacaggcccagccagcaccaggacgagtgattggagtggggcctgtccaaggacgggctccagggctgcggccagactgcgctcttcctgtgtgtccaggcactcttcggcctgtaagggtcactgaggcatccccatgttctcaaactgttcttctatccgcagatgtggctgtgattggagttccggatatgacatggggccagcgggtcactgctgtggtgaccctccgagaaggacactcactgtcccacagggagctcaaagagtgggccaggtagggctgggtggggcgggcagggagcactcatggggtcttgggggtccagtcttgagggccaccctaggtattggcatcgtccgtcttagaggtggagatgagggatcaagaaagaccagcagtgagggtccttagagacctgaaggccgcacacagcaggtagagacgagggcagggggcaggagccgtgctcagatttgacttggtggcaatattccgagggggcagaaactcacattcctgggacagggccctgtacggcctgtggtgggttccgtcctggtcccaggagagatcccggatgagccaggccaggcccatgcaggaggtgcatggagctgagatccagggttgacaccagctggccgcacgcgctgggcccttccccgccaggccacaggcagcctgtccacctgccgccccaaagccagtgctgggccccagcagaactgcaaggcccacccattctccgtcggcacctgcacggcctctccctctcctgccctgggggtgggtcctgaaggtgcctcacacacctccagtcagttccacggagaccccagcaccatcaccatcccctcagtcatttcactttcccctccatgtccagggcagggcctgttcctcagcggtggccaccacccagtccttaaactcacctgcattttttgttttgcctttaccttacccagaacctttccccaaggactttctcccacctgtctcacccccagtggtttctgatgcatgggatccacagaccctccacttttgccagcagtggtggtggtcacgcccagggctgaacctgagctatggccttgtcaaaggccgtcaggacggaagggtatcccataggaccgtcagggcagagccaggctgagctcagaaaggaagcttttagtttcacctacagtaatttcttttgtttttttaatttataaagaaacggggtataattggctcatggttccacaggctatacaggaagcgtggctggggaggcctcaggaaacttacagtcatggcagaaggcaaaggggaaacaggcacatcctacatggccggagcaggagggaggagggaggagccacagagtgagtgagggaggagggagggtccacagagggagggagggtccacagagtgagtgagagaggagggagggtccacagagtgagtgagggaggagggaggggtcacagagtgagtgagggaggagggaggggccacagtgtgagtgagggaggagggaggggtcacagagtgagcaagggggggaggggccacagagtgagcgggggaggggccacagagtgagtgagggaggagggaggggtcacagagtgagtgagggaggagggaggggtcacagagtgagtgagggaggagggaggggtcacagagtgagtgagggaggagggagggtccacagagtgagtgagggaggagggaggggtcacagagtgagcggggggggggggaggggccacagagcgaggagggggtgggaggagccacagagcgatgggagagggaggtgccacgcactctcaaacatgcaggtcttgtgagaactcactcactagcacgagaacagcaaggggaaaatccacccctgtgatgcagtcacctcccaccaggtcgctcctccaacagcggggatcacaattcaacatgagatttgggtggggacacagatccaaaccatatcgttcctccctggcccctcccaaatcttacgtcctttttacattgcaaaatacaatcctacttcccaacagtcccccaagtcttcactcatttcagcattaattcagaagtccacagtccaaagtctcgtctgagacaaggcaagtccttttcacctatgagcctgtaaaatcaaagacaagttacttcccagatacagtgggggtgcaggcattgggtaaatacaccagtgccaaaagagagccgccagccaaaacaaaggggctgcgagccccaggcaggtccaaaacctagcaaggcagtcactgaattgttttttggtttcttcttttttggtttttttttttttttttttttgagacggggtcttgctctgatgcccaggctggagtgcagtggcatgatctcagcttactatagcctctgcctgcaagcaattctcctacctcagcctccctaagtagctgggactataggcatgcaccaccacacccagctaatttttgtattttttagtagagatggggttttgccatgttgtccaggctggtctcgaactcctgacctcaagtgatccacctgcctcagattcccaaaatgctggaattacaggcgtgagcaaccccacccagcccaataaatcttaaagccccaaaataatctcctaagacccatgtctcacatccaggctacactgatgcatggaggtggctcccaaggccatgggtatctctgctcctgtggctctgtagggtacagcccccatgctgctttcataggctgctgttgtgtgcctgcaacttttctaggtgcaccacacagtgcaagctgtcggtgggttattctggggtctggagaacggtggccctcttctcacagctgcagtagccagggccccactggggactctgtgtgggggctccaaccccatctttctcctcttcactgccctggagcagtggcctgagctctatctggagcccttttagccccagagcaacagggatgcaggggccagtgtccctcagggcagtggcccacaaaaccattcttccctccgaggcctccaggcctatgatgagaggcacttccatgaaggtctctgacacgcctagagacattttcctcattgtcttggcgattaatattcagctcctctttacttacgcacatttctgcagccagcttgaattcctccccagaaaattgtttgtttgtttgttttctaccatgtgatcaggctgcaaattttccaaattttatgctctgcttaccttttaaatctaagttccggtttcaggtcatctctttgctcatgcttaacaaaagcaatctttgctccagttcccaataagttcctcatctccctccgagtctacctcagcctggacttcattgtccatatcgctattagcattttagtcacaacaatttaacaagtctttaggaagttccaaactttccctcatcttcctgtcttcttccgagctctccaaatcgttccagcctctgcctgttacccagttccaaagctgcttccacatttccagatgtcttaacagcagtgccccacttccctgtaccagttttctgtgttagtccagtcttgcattgctataaatgaagccagatttttctcagccactttgccaaccggggacctccgtggctggtgacacccccaacccaggcctgccacagaaggcacccacacactcgacccactgggccatgcttggcttatgcactggctcagcccacctgtgttatagcttatacctgcattcatcggttcccaagttcttgtcccgcgtccaagaagaatgaggttacactgacaattcaaagggtgaggagagtggagaagaattttattgagcaatgaaacagctctcagcggagagggtatgcgagggtgctgaaccgcccagagttgggtgtggctgggtctagggcttttctgggcacagaatggggaggggcaggctgtaggtagcactggaaaaggtaacctttggttggttaaaaagcattattcagaaagaaccagtgggaaagagtgggcaaacaggaatagaagttctcactccaggctgcaggtttcaggctgtttttggcttgaaggtggggtttcaccagggacccacccctgtctatctgggcatttgactgcttcctgttgctttcataaggaactacccaagatggtaatttataaagaaaagaggtttaagtggctcacagttccacaggctataaggaagcatggctggggaggcctcaggaaacttacagtcatgacagaaggggaggcaggcatgtcccacatggtggagcaggaggaagagctcacctacagcaaattatttaagaccgagcatttgtctctgttctgttccctctctggacgcaccctcctgcctccaccctgacttgccgtctcctgagcactgaagatatttttggcttgtccgatgtgactccacagacagcagaaacgcttgcttgatcagggcagcatcagggcaccacacatgcctgggcttgcacaacacagcgggagcactgccactcagcagcagctgctgctttcattaaacagttaccttgagaagaaaagataggtgtcgagggctgagagctgtgctagagtttcagggtccgagttggcaggaactgaagtcccgatgctcctcagcccttggctgtcctcagggctgccctctgcgtggggacaccaggccgcccctgcccagggacaccaggccgcctgctcctgctctgtgcatctctcacatcaggctcctcacccagcattgtttgggctatgacagtggctgtgacaagaccctaagacgggaagctgcgtgcagggcacttgagggcccgctgaggagaagccgcctgtgagggacaggactgggcagggaaggccaccagccatgcggtcacagcccaggactccgccagtcctgcaggagccctggagccaggcccttgctgtccaggccacttgctgtacctggcccacagctacctcccctgcagccctgagtcctgcttgctgtgcccggctcaggctgagactgcagtgcttgtccattcaccatgaaagaaagaagaacaggaagggaggcaggaggaagtaagttagaggattaatccaaatgttccaactgtctaatgggagttccaacaagaagatatccagggaggaaattcacagtcaaatttccccaaaccaaaggtcatgagttttcaggttgaaagaacacccaaccaagaggagagaaaacagcattctaaatatcggaaggaaacgaaacctcgcctcaggcatgcgggctctgacgggcaggatggcggcacggagggctgctgtatccagtgaagtcagcagttcagatgaaacagataactcccttaaaagacacaaattgccaagactgacgcaaacactgaaacagactgaacagttctgagttaccaatttaaaactgcaaagcaaatagcaggcccaaaaggcttcactgataaattatctcaaacattgaaggcaaaaaataaaaccagacacagcaaagtaagtctctgatgaaacagagtggggaggaacacttcctaactccccgtatgggaccagcactaccctgaaatcaaaaccagacaagaaaacgagaggacagtgttcccaatgggcagacacacaaaatcctaaacaaaacgttagcaaattaaatccagttaatgcacaaaaagacaacacgtcatgatcaagcagcatttaagccaggaatagagggttactttcatattcaaaaatcagtctgtgtaattcaccatatattttttttttttttggatggagtctcgctctgtcgcccaggctggagtgcagtggcacgatctccgctcactgcaacctccagctcccaggttcaagtgattctcctgcctcagcctcctgagtagctgggattacaggtgcgcaccaccatgcacagctaatttttgtatttttattagagacggggtttcaccgtgttggccaagctggtctcgaactcctgacttcaagtaatcctcccgcctcggcctcccgaagtcctggaattacaagcgtgagccactggtaattcaccatatttacagaatgaagaagaaagatcatatcatttcaatagatacagaaaaagcatttgcaaatgtcaaaacccttttataacaagcactcttagcaaactaggagaagaaggaaaatccttgaacctgatgagggagtctctcaaaagctaccagatgacatcctgctcgatggggagctgctgggcgttttcctcctgtgaccaggaaggggcgcctgccctcaccactgccacccagtctcattcaacacagagtttgtcccctgttagaaaccgagacgttggttacacgtggaggttgggagtggctcaggcaggcagaggggcttctgggaacctggccatgttccctttcagtctgggcgctacttagagcagggggcagttgcttcaataaaactttagattcccacacaggccaggcgtggtgctcacacctgtaatcccagcactttgggaggccgaggtgggcagatcacctgacgtcaggagttggagaccatcctggccaacatggtgaaaccccgtctctattaaaaatacaaaaattagccaggcatggtggtatgcgcctgtagtcccagctagttaggaggctgaggcaggagaatcgcttgaacccgggaggcggaggttgcggcaagccgagactgcaccactgcaatccagcctgggcgacagggcaagcctctgtctcaaaagaaaaaaaaatctacacatccctcaccacactgtacataggacagctgggtgtaaattacatctccatttaaatgcctgtcatagttttatacaactataaaatatatacgtgccaaaataaatttgataggaacattggaaccaggtaaggtgacgcatacctgtagcacttcgggaggatcctttgagcccaggaagtcgaggcttcagtgagccatgactgcaccactgcactctggcccaggcaacagtgagatcctgtcctagaaagaaaagagaaaaaaagaaaaatgcgatttggaaatgtggaggtcgaggttgacagcgacaccgaggtcgaagccagttgcccctggagagcgagagactgggctgggccgactcccacctctgtcgcgagaggcctacgggcaggggcaggtgggcagggggactgtgctgggtctctggccgcgtctggacggcaggcgacactttctccacaaaaagcgtcaagaaaccacgacacttggtttctggacttttccgcggaacagtaaccagaacaatcgccatgaaggttcgtttctgtcatggctcagtgcagcctggacgccctggaccagcccctcctgcgcctgggccacggccgctgccttcagggcatcactggtgggcggcacaaccatcctccctttggggggttaatttcatttctttcctcccttctttaatggtgaatggaggagcaccgagcaccactgcagtctcagtttcagatcccagcgcctcgtccctgcccactgccctcggccccgcccgcctgcattggcagtgccctggccccacccacccgtgtcagcaccgcccaccgccctggcaccacccaccgagttctcgcccatgaggaagggggaccctgagtggaggtttcaaaccttaggggccgtccctgccgtgcagggctctgtgaggcctcttgccacataggcttgtgtctgcaggactgtgcggcatttactcccatctcaaataccccatacagggcagactgcccctgccccacctgcccacccactccccagcctcttccgcacgcctcctctggaaggggaacgggccacagagtgaaatggggccttccagctccagtgcggggacttggaaggcctggcccggtgtgggggcccctctgccctgcaggccactctgtgcaggcctatcctcaggtgtgccctcgcccaaggcctgcacgcaccatggcttctgtggtaccagtgataacaccatgccgggcacctcctgcagtcaccacccctgggctgctagggcagagacagctgcggtggcccggtgcacctgcctggcctcaggatggccgaggcgcctggcaaggctgcagggtcccaggggcacctgtccgtactgctgggcgcctgagttcctcctgctgggcactgtcagggcagtgcgcctcaggctgtgcttgtctctgcagaaatgtcctggccccgtacgcggtgccctcggagctggtgctggtggaggagatcccgcggaaccagatgggcaagattgacaagaaggcgctcatcaggcacttccacccctcatgacccggcagactgggactgcgggtctggtggggagcagcagacgtccccttcacaccgagaaccacgggggcccgtccaagacctggcctcccttaaacctgaaccccccaaatcaggtcacgtagaatcaagaactgtttgggatgaaatcaccatgtggggtccccagcctcgggccagttgttgcagctcaaggagaccgtccctggtgtcacctctgcctggtcaccgccgacctcatctgtgcagcgcggtgcagccagcccctggccccacgtgctgaggcacctcccgccccacagtgccctgcagttgccaggctctccagggcag

SEQ ID NO: 15362 - DNA, 43049 bp, Homo sapiens
aattccctaaagcctctggctgtgtgtggcgctgtcctctgtccccagggtaagtgagtgacccagcagatctgctgtggttttgtcgtcatcttgagaggctgctaaaggggagcaacaaagagccagccttctccttccccttcctcagtggggaggcccagagctcctttccgtgagcccgaggtctgtgtgtgctgttgcgggccacagtcttgctcttgctctcagctgtgctctcgtcccctgcaggtgaccgggctggtccacaagtgggcatggaccaaagacgacgtgatcctccacgtgctcccgctgcaccacgtccatggtgtggtcaacgcgctgctctgtcctctctgggtgggagccacctgtgtgatgatgcctgagttcagccctcagcaggtgagttggggtcagggctctcggttgcaccctcagactaggcgcctttcccctgtcggggccagggctctcagccgcgccctcagcctaagcgcctttcgctggttggggtcagggctctcggccgcgccctcagactaggcatcttttcctggtgtgcagtcgcccctatccacaggggacgtgccaatgccgagaccctgggtagcatggaaccctgtacctacgatgctttttgctatacatacgtacctatgataaagcttaatttataagttaggcacagtaagaggttaacaataacagaacagttataaccatgtactgtaatcaagttatgtgaaagtgctctctctcttcaaaataccttccggtactgtgctcgtctgttgtgagactgcagtgggccacgcgtcattgaaaccgtgaatagtgagactggatgagcggaggtgactgtacaggccctgctgcccgcgagctcctgcggctgcggcgaatgctcacgcgcttggtttaaaataatgcgagtttgttcttacatgcttggaggccaggattctgagacgagtcttgcggagctgatgctgggtgtggtagggctgctccgtcaggaggctccagggcaaagtccgttcctgcctcttgcagctctggaggccgcctgtgcccttggctccagctgcttcacgtccagctctgcttctgcaggcacacggccttctctccgtagtcagggctccctcggcttccctttgtgcagcctatgcggatattccaagatcatctcccatcttgaggtccttcgcttcatccacctgcagttcccaccactgcgagaggtgacacattcggggtgtagggcgtagggcgtgaccctttgagctatgatgtggccactgtggcagccctcggttactccagagtactggcccagctggagagctgcttgctgcggagggttactttggagtattggcccagctgaagggctgctgtggagtctctgtctcccctctctgcatggcttcctctgtagcgtctcccttggagcaggcagggagggaaggacgcggtgctggtcacacagagcgctggggtgggagcagtcatcgccgagctgctgcgcgcagccttgcctgtgcagggctgtctccaggcagatcagggatgctgctttggagggaaaggacctgggctcgaggcgggaccctgtgcacagcatcgggcctcgcctgtcagttggggatggcggtggcttttaggagttgctgtggccctgtgtgcattctagctgactgcaggcaagagtcactcaccaggctgcagagggcatgaggggcaggccttgagcccacaggaaggacacggtgtgcgtatgtcacaggtgtggtgaagcagagccctccggtgaggccatggacgtttaccagcctctgcccgtataatgaatatgccttttattcacaggaaaaaaagtttaacacgtgaatgtatggaaaagcccttagaatttggatcgtatcatgatggttctcagcacagaggagcccatctctgaggccagatgcctgggactgggctcttggtctgtgcggggttgttctgcagggcagacgtcccggccagcagaggcacagccctaaagcccagagcacagcagccaccagtggccggccccacactcaccgctcttgccaggactcttcctgtctgaagtctttctggccccatcgaaggctgtgtggagctctgaggcctctgaccgggagctcaggacccaaaccctagtcaggtgtgaatttcgccaggaaggggtccctgcaagcagtcagccctgcccaccttccctctgcttctcctgccgctgagaggcccatcctcttctctgcagggcatccagccccacacggtggctggaggtggagagaaggcagcttttctggccctccacctctctgaccttcagtctcatccccggaaaataaggttggaggccggctcacagtgggcacaaacttggaaaagagaaggggctcttctctagcctccactggaggcaaggtctcacaagagaagccagtatgtagaacagctttgtacgagcaagtgagcctgtttcttcacagatgataacattgggctttagagaaagacctctttaaaatctagcagttactaccgtgccaaagagaggtggctgccagcacacttgcgtgattagccgtcagctccctccactgctcttcaggacgcctgtagccacagagcctccctgagggccccgtcgccagggtcacctcctgaagagcctccctgagggccccgtcgccagggtcaccccctgaagagcctccctgagggccccgtctccctaacacattccacattcttgttggcttcagtccttatttttcacagacatctcagccctgaccccagctgcgacacagcagtctgttaagatggcagacactgcggctgcctcatctgcgtggtccatcccggagacatctgcctggcgctctgctccaggccttcctggctcccctggtagggatctggctcagtgacccgaccctccttgcggctctctctggggtgcgccctgcatggacacagctgtccttggtgaacgtctgctgagtcaaagtggttttgctgcagtgagttccccgtgagtgcactgtgtgggtggtgcagcgcctggtgtgtagggaacttccatgcctttgctgtgtctctgggggctcctctgacggggcagctccctcctctccgccttaagctcctcctttcctttggcggtcagctctgtccagggtgtcagtttctgtgcctgtgactgggccccctcaacctgccccaccttggcctctgctccttggcagcctggccctgaacctctgttgggggctgcccgggcgctgacggtggctggtctaccatggtcacttgggcagaggcagcaacggccattgtcgtggaccgtgccagggcgagatgcagctggcaggggcagaggcagaacatctcccagggagctgagggcaggttggttccatcgtcccggagggcaggttggttccatcctcccaagtaaagagtgtgttaccctcagggcgagaggcaggtgggtgtgggtgctggcgcaggccagctgtcaaggatctgggctttctggtcttgctgcttctccagcactgcatgaatgacaccacctggccctttccagtgcccacaggcacacggcttgggagctgctgctgcggcgtctctgcccaggggcatctgccagggggtccctgccttggggtctgtgtcccaagggcgtctgcccagggatttctgctccgagagtgtctaccctggggtctctgcctggggatctgctgtcatcttccagacactgcagactggctcattaatggacacgggaaagcctcagaccttcaacggacacgggaaagcctcagaccttcaccgtttttgacacttacttgggatttttctttaaactatgctgtgaaaacttaattttttttttttttgagatggagtctcgcactgttagccgggctggagtgcagtggcacgatctcggctcactgcaacctccgcctcctgggttcaagcgattctcctgcctcagcctcctgagtagctgggattacaggcacctgccaccacagccagctaattttttgtatttttagtagagacggggtttcactatgttggccaggctggtctagaactccggacctcatgatccacctgcctcagcctcccaaagtgctgggattacagacgtaagccactatgcccagctgaaaacttaatatttaaacaaatttgatgctgtggctacaaaggattgcaactcttttccataaactccaagtttcagggttttccaactttaggaatttctatgtgtaaaatccagctgtcagcgttattgaactttgggattttgtctaagattgtgtggaagaatgtgtaggatacaagtgtggggtgaccagacacctgcggtggtgctgaacgatctcagacgcggtgtcttcaagtcatcctgcacagagggccgtgggtgtcagtgcctgcaggtgacggatggggttgggggagaggaggaggatgccggaagatggatgtgcagccacagcctctggagatcaaagtcaccactgacgagacagccagaggctcagatcagtcactcgtctccaacagcactgccctggccgacttcctcaggatcgcagcatggactcaggagggctgccatctggcagggtctgtgctgtggcagctcaggttagagcaacaggcctgctcctgccacctcagaagcacttgctagttagtcaaatgttatggcgcccttcagggggcctccaggtctttcacgtcttggaagtgtggcaacacattgggatgtgctggaggaagaaggtcaccctcggctctcagtgcccttctttagggcagcagctgccctctgaagatttggatgaattccaagaaagaccgtccttcgtgtctttcacctccgcgcctgctccctgcccctcagccttgtcccgttgcgtgcatgctgtccccgcctcagcaccatcctgctacacgcatgctctccccacctcggcaccatcctgctacacgcgtgctctccccgcctcggcaccatcctgctacacgcgtgctccgttttccgtgcctcagtgtcacgtttgtgtttctggttcactgtgctgttgatctgtgtgttacatcaaatgcagtttgttctttttacgttgctgtgttgtatttcctggtgtgcagaagccacagtgcgcttatccattctgctcttgaaggacttgagattgttttcagtttgtggctattagaagtcacggttgctatgaacattctcacacagatgtccctgtggacagttcccttggatccgcaactcccagtgccggctcacaggctagatgtatgtttcatttcagtggaaactgcggaagagttctcaaacgtggctgcatgtttcacacaccccagccccaaatgtggctgcatgtttcatacgcccccagccccattctgctggtaccaatttactgtattagtccgtgtgcacactactgataaagacatacccaagacagggaagaaaaagaggtttaattggactcgcagttccacatggctggggaggcctcagaatcatggtgggaggcaaaaggcacttcttacatggcggtggcaagagaaaatgaggaagaagcaaaagcggaaacccttgataaacccatcagatctcatgagacttattcactatcatgagaatagcacaggaaagaccggcccccataattcaattacctccccctgggcacctcccacaacacgtgggaattctgggagatacagttcaagttgagatttgggtggggatgccatcaaaccatatcaggagtccttaaatttgttaaattccccacatgtctcctcttctggtgccttcatttgtccctacagaggttctccgcgaagcactgtgcttcccccaacttgtttcccttcagcctggagaacttcttttcaatagttcttgtagtgcagctttgctgacaacaaatccctcaattttgtttcactgaaaatgtttttattgcaccttcccttttcaaaaacagctctatcgagatacagttcacacaccgcaaaattcattattgtaaattttgaattaagtagccattacctcaaaccagtgtccatttccccccattcccagcccctggcaaccacgaatctgctttctgcctctaggatttccttgtttgagatggcagcgtgtgcaaatggggcgtgtcacactcagtcttttattccagcttctttcacttgcaggatggttctgagtttcatccatgttctactgtgtgtattaataacttgttcctgaatagtacttcatcatatggatataccacattttcctcatccattcaccatctgatgggcatttggactgtttcagtttggagctattatgaataatgctgctatgaacatttacatataaatctctgtagacattcattcatcttacatagacacagagggatagaattgatgggttgtatggtgactttctgtttaatgttttaagaaactgtcaaactggccgggcacggtggctcacacctgaaatcctagcactttgggaggccgaggcaggtggatcacttgaggtcaggagtttgagaccagcctgaccaacagggtgaaaccctgtctatactaaaaatacaaaattagccaggcaccgtggttcacacctgtaatcccagctactcgggaggctgaggtaggagaattgcttgaacccagggggcggcgattgcagtgagccaagatcacaccactgcactccagcctgggcaacagagcaagactgtctcaaaaaaaaaaaaaaaaaaaaagaaaagaaaagaaactggcaaactgttttccaaaatggctgtgttgctgtacgttctcatcagcagcgtatgagagttttcatttctttacgtcctgccaacacttgtcactggcttcagtttgcgtttccctaatgactactgatgttaagcttttttttttttttttttttttttttgagatggagtctcactctgtcgctcaggctggagtgcagtggctcagtctcggctcactgcaatctccgcctcctgggttcaagcgcttctcctgcctcagccatctcagcagctgggattacaggcgcacagctccaggtccagctaattttttgtatttttatagagaccaggtttcaccgtgttggccaggctggtcttgaactcctgacctcaagtaacctgcctgcctcagcctcccaaaatgctgtgattatagccgtgagcccgccgcacccggccagatgttgagcattttttgtgtttatttttacttttttccttttaaattatttttgcagaaacagagcctccctatgttgcccaggctggcctcacactcctgagctcaagggatcctcccgcctcagcctcccaaagtgccgggattacgggcatgagcactgcacccagtgctgttttttacgttcttgtttgcatccgtatgtaatctttggtgaactgtctaatgaaatctttggccatttttaaattgggctgtttgtcttcttactgagttgtaagagttctatgtgtattccggatacgagtctcttttcagatgtacggtttacaaatatttcctccaactgcagcttgtctttttattttcttaatgtgtcttttggagcacacattaattttgatgaaattcattttataaaaaaaattttaaaaataaattcattttatcaatttttaaactttatagattgtgcttttggtatctcatctgagaagtctttgccaaaccacaggtcatgtcatgaagatattcccttttgttttttcttagaagttttctagttttagctcatacgtggaggtttctgacccactttgggttaattttgcatatggtgtgaggtagggtctaggagtcaccttctgcatggagatattcagtgtgtcagtgccatttgtgagaaagattatccttttgtccttttccctattggggacttggtttctttgccaagaatcacttgaccagatatctgtgcattcgtttatttctggactctccattgtgttttgtgggtctcttgtctaatcttacacagcatcacactgtgttcgttacttctggtttacgtcagttttggagttgggaactgtgtgttctcacctttaatctgccttttgaaatttattttggatcttctgggtcctttgccttttcgtgtaaaacgtaggataagtgtatcaatttctgcaaaataaagcttgccggaattttgggaagattgctttgaagctggagctcagtgtgggaagaactgccatcttcacaacatggagtgttcccgtctgcgagcctggcctctctccacccgcttatctgttcccctccctccctcgatggcagtgttgtgggtgctgctccgcggtgctgctgtctcccgcactctggtcgcctgtgtctttgctttcccgtctgtgggtcagcctagatcacccccgttgactgtgtctgacttttttcctcttttctgctgcgtcttgtttgttattaggtctattgaatgaattcattttggatcttgtgtttttcagttttatgattttttgcagttccacttctctttgcaattctccatcttccccacgttgttcatcttttctttgaaattccttaatctgcttattgcagtgatttgaagggccttgtctggtgattcggacgtttggatttcctgagacttcttcccttcagttggggatcacatctttgtgtccttacatgctttgtgactttgaagggttccagtctttgtctttgaaagaatgatattatttcttccccggagattcctgcctttctctgccaggcagctgcggtgaggcactcgtcactgcagtccagtgaggagatgagatgggctggggctggactgtggcatcggcatccgtcgaccccagtttcaacgccgtgtgggcgagatctgtcctgtgtgtcctgggcctcccttaggtgctgaccccacagcacgaagagtgccctcctccctccgccacacccttcggtgctccgtgtggaacaccgcgggtagagagggccatggaaggaatgcggctcaccagctcttcctgaagctttatgggcgacgcgagaacccgctaacgagtgaggaacttaaaacgtatttatatgtaagcaagaaatgtttattatggagtaaaatataaaattcacatgactcttttaaataaaagacttcacccgttcgctagtcactgcatgcctgtccatactgggaagcatgctgacttcaggtctgcgggcagccaggccctcctgccagcttccccaaggtgtacatccgccctctctgtgtagctggaagagcctgaccactcacgtctctccaggccacagatcccgaagcccttttctagctctgttcacgattgctcttcccctcacaggccagacgcagctgtcccgcgcaacatggcttctgtgggaaggggtcagagtttgaggcaccccttttagaagggaggcgctgcagactcttgaatgtgaaccatgagaacgctgtgcctggagccaggagcctccgccacgggccccagtgcctgctcatcttcctaccgagtgcttcctttccttcgtaggtttgggaaaagttcttaagttctgaaacgccgcggatcaatgtctttatggcagtgcctacaatatacaccaagctgatggagtactacgacaggcattttacccagccgcacgcccaggatttcttgcgtgcagtttgtgaagaaaaaattaggtaagtgaaaagagcccactttctcgttcagaaagtcttaaagatcaacagatacgacttatttctaataaatcactcctactaagttctgggaagcagtgctttccatttcctttcaatgttccctctctctctacccgtctccgtctctacctctctaactgtctctctctctctctacccgtctgtatgtatatctgtaatctcttccacgtcgatagctgcctggattctgtatcgctctctctgtcacactctgtctctctatctctctctgtctctctttgtctctctctctccatctctccatctatctgtcttctctgtctctcttgtcagactctccatctctgtcttctctctgtctctctccatcgctcttcatctgtctctccgtcttctctttctctatctctcctgtctctccatctgtctctatctctccatctgtctttgtctccgtctgtctgtctgctctctctcctgtccgtctctctctctctctgtcatggcgtctgaaggacaagggtgaggacagtgagctgacccgcttgctcctgcttcatctgcccacatgtcccacggcgcctgcctctcctatgcagtctctctgccttcgtgggcagccctgtgaggcctcctgcctggggcacgttctgctgcttttcctctcagccccgctcctcccctcccagctccctggataaacccctccctcccaggacaagctggtcttttgggccacccaggggcgtgtttgctctgcactctcccatgaacctgcaggcgtgggaacgtttcttttccctcgtggctgttgaggtgtggttcactaactggaaacgcacacgtgtggctcagtgagtcttcacacgcatcacaggcccgcacctccagcagagtcgtgggtggggtattttttctttttgtgagagggaggggtggcgtggagggtgcactgcaggaactgaaggctccactgccatccagtttccagtgggatgtgtgtgtctgtggctgccgcgcgctcctcccagtccccaggaagtgcacagggaagcggcacctttgttcctggagagaattccgggttgtccaaggcacatgtctgaaccgcttcgctctctttgccgttcccttgccccttttctgtgaggccaccggagcccatggttttgctgctgctactgctgggataccctggggctgggcaggccccaagctgagcagggtgagcacaacgttttaccaaatctaaggaaccaagggcaagaacgaggtcagtgaaggagaggatcaggtgatttctggggtgacagaggcaatgagacctcggccatctggatctcccagcgggggtcctgtcagtggtgcctcctcgtaaagcaggggcagcagcagggaccactccgctcagaccgcaaacaaaagcgccttccctactgcccgtgaggctgcgggaaatgctgtgtgagagcgcggggactcggagttctcagggcccgtgttctcctgccaagcctgagctgaccctgtgggccaagatggctgcagttctgcgggtggttctgagccccttgggtgtgcccggccccaccccttgggtgccgcggccattcacccatgtccgcgttctgctgcagagcctgcaagctgagccggctgtagtccccggatgtgcctggccgcagcctgcagcgccgtggctgttcacccgtgatcagctccgtggtcggcagctgcacggtcactgctgttcttgagcgtggttgtgaacagcgcaggaactttgcaggggacaccgcggaccctaagcacattgtttaccctcattagctgttggacctgcttccttctaaaatacacccaacagatcgttttcaaaaaacaaagtcacgccgtagcgcagactgcagcgttggtcccgggtgtcgcacagtggtgctgtacccacggcctggggctcctgcactcgtgaaggagctgccacttttgcaagcaagggccgcctcctgaggggctaaacctgccacctttgcacgcgagagccacgtcccaaggggctaaacctgcctttggttgtgccgcgtaggctgatggtctcaggctcagctgccctgcccctcccagtgctggagaagtggaagaacatcacgggccacaccctgctggagcggtatggcatgaccgagatcggcatggctctgtccgggcccctgaccactgccgtgcgcctgccaggtacgagcacttcccacagctgcgttcctcttccactgtgctctgagccccccaaggtgggccagtctcgaaccacccacattcggactgaagggcggcatggaggatgctcccccgtgggacaggccactcggccaggagagcactcaggatgcactgcgacctgtcccctctgggtagatcagccttctcccaagtctcagtcgggtggatgggggaggtgtctgtgctggcccctggctgtatgactggggagacaatgggaagaacagcaatgcctggaatgcaggcgtcagtgcatgtctcagaggaaggcggggggccatgctgttggctccagaccacatcagcagtggtggcagcctccgtctgtctggagtccgggtgccacacagcgccagcagcagtgccaggagaggtgggtgtggtgggcagggtgggatgagtcaagcacctgtcttccttctctagatgtgggctcctgataccgggcccctcttgtccagccttccctaacacatcccattctgactttcatctgacccaaccatttgagccctgggtcctccgctgggacttctgggaacagagcccacagctggggggccaccctgctgctttctgcgcagcccttccagtctgtctagagtagaagagagatctcagtgcagacttaaagtgagaccatcccgcacatctgtctgtgcagctgcttacctgcagacccagtaaaaattcacccctctggcgtgcagctctgtgtgtcttaagaaacatcatcacagtcaaaatagagaagggttcctcgcctcagaaactcccttcctagtgctcagcacctcctccacccccgaggcctggccccttgttcctgtttctcttcttgtggttttgctttttctgggaggccacgtggctaaatcctgcaggacgtggcctctgagcctgtctgcttccgcccggcttccgcccacagtcaactgcctgtgctgtgtgcgtcagagcccgcgcctttccctgctgagtggcatccgtggtgtgggtgcggcaccgcttgtgaccctgttttaagcaatgacacgtgagatgttatcaacatttgtgtgcaggtttctgtgcgaacgtggttttttatttcacctgggcagatacctaggagagagattgctgtgttgtctgaagctttcaagctgttctccagagcggctacaccatccccttccccctgcaatgggtgggaggtcacgagcacctgctgctccagcgggcggtggtggtgtctcgttgagttcatgattctctcatgatgggtggcgttgagcacctcttcctgttcgtgtcattccgttttcaactggggcctttgttttcttgagttttgagagcttttaaaattcgggacccaagtgtcagctgtgcgattttaaatatcatctcccagcttgtggtttgtcttcccattcacctaacagcgtctttaaaatcaggagttttaggttttggcccggtttatcaatttgttttgtgaattgtctgatgtcatatctaataaatccttgcgtagcccaaagtcacagagaatagtttcagctcttacgtttgggaccatgatccattttgagttaatgtttgtacatagtgcgagatacggaccacagttcttttttagtgtgtgaatgtctaactttttagcactgttcgttgaaaagactcccttctccatcgaacagccctttggatctttgttgaaagtccgtcgactcctgaggggtcggctcctgggctctgctctgtcccattgctttccgtgtgccctttggctcattccatgcctgcttggttcctgggactctagggtaagcgtggacatgggggttcaggcccaggcagggaccagctggtgccaggcagcgatacggtgctggggcctgcaaggtgagtgtgagggctggctggctgctgggctgggaggaggagagactgtaggctcacgcccctttgctgggcctggggagccatgggggctgttaagtgtattctgagtgtaaagtctcggtttggctggggcatcctgagcagaatgacagggccatggcagcgagatcctcagctgccgtgcagagctgccagtggggtggccgcacagagtgcagtgcctgctgcaacagtgcccagggcagtgggcgggtgggggcatgttgtgaaaagaagtcagtgtgagtgatgagaaatacatcctagtctcagaccccaggaaaccgccgtcagtgctggtggcccctgccctgggccggctcccgcgttagtctcagaccccaggaaacctccacctccgtcagtgctagcggcccctgctctgggctgactcgcgcatctccacgatggctgcggcaccagctgtttcttcggtggctaaagctctctggtggaaataagatggggaccttgaaatcaaatgtgactggtctgttgagtctctgtccttatcgttgtccttcttagtaggatgtgctggttttgtccagtgccaccggccacagtcaccacgtaatatggacggaatgagcaaagcccggctcgctgaggctgcaggctgcaggcaagtgaggactgaaagggtaacgggctctgggctttgtcctctctttgttccggacatgtgagcaggacaagttctgtgtattcagaatctgtctgcacagtttgtagttcatgatgactgttcatccacagcattgctttgtgggcgtcctctcttttgatcttctcgaaacagcccctgcgatggggtcatattttgcactcacatacaagaacccatgagcctgcccacggtcacgcggctggtgagtgatgcacttcccaggagcacggtgacctcttcaatggccctcactagagaagatggacagtgcccccctagccttttttactggaacagatacaaggctgagaagctgaaatcaggagcagcccagggaccactgtctacaccgagggagtcatgagcagcccagggaccactgtctacacccagggagtcaggagcagcccggggactgctgtctacaccgaggatgtcaggagcagcccagggaccactgtctacactgagagcgtcaggagcagcccagggaccgccgtccacaccaagagcgccaaggagcagcccagggaccgccgtccacaccgagggcgccaaggagcagatagtagcccagagacccaggggaggctcagcttccccacgctggaatcagaactcctaggcgaacaggaaggagccccagacagatggcacagggagaggagtccccggctgaggagggggatccagagaccctgaagcttcagggttattgggcaagaaacctgagtgcaccaatccccgagtcttcagctaccgacggcaggttccctcgggtgccggggatgctccctcttctctaaggcagagcccacagtaggttccctcaggcgccaaggacattccctcttctctaaggcagagcccacagcaggttccctcaggcgccagggacgttccctcttctctaaggcagagcccacggcaggttccctcgggcgccggggacgctctctcttctctaaggcagagcccacggcagattccctcgggcgccggggacgctctctcttctctaaggcagagcctgacggcaggttccctcgggcgccagggatgttccctcttctctaaggcagagcatacggcagtttccctggggcgccggggacgctccctcttctctaaggcagaatcaaatatctgtgattttatccttgcctttaaatcaccagcagtgtgagttctttggtttggaaaaaagtaagtaaagtcacctcagcattaaatccaatatgccccacaaaaactccaaaatgcagcctcctgagccatgtttctagagggcacggtggaggagagctttcctcactctcaggctctaacccccaccctggtggccatggccttgacccttgggtcggctccagccacaggctctgagctcatgcttggcctcgctgctcagtgcactgtccgtgctcggaagagagagaagctgggtggagggtgagctctgtcgtgtgttatggttacaggcctgctccgtgcggttcctgtggagggagatgaataattcatggccgaccactgctgggcctcgtcacactctaattggaggttgagctcagaggtgctcacggctcctgggccactctgtggcattgacagggagctccagggcctcattggcggtttccgttccctgggtcccagtccccagtcagagttatcagggaggggctggctgacagcgattttagaggtgggctgtggcaggaaggcagtgccccccacctgcctgcagctgcgctcccatctacattggcctttgcggggccagcctctgtccactctcttgagctctcatgtccacactgtcacatgcccggggcacagcgagcggcacctggagtgtggggacccctccctcgagctctcacgggtggcacctggagtgtgggggcccctgcctcaagctttcatgggtggcacctggagtgtgggggcccctccctgaagctctcacgggcggcacctggagtgtgggggccactccttgagctctcatggacaataccactgcttggctgctgcagaatccagacaccatcccagagcctcttcagcctctgcagatggtgtgggacggccacacggcctccccacctgcggcccccgcccctaccccagccgtgccgtgtccttgcgctgcgtccccgccccagtagaggcatcaccaggaagaggcgaaaggccgcctgtgatggtcctcttcttatgaaacgcccagaacagaaaaaccacggacgcggacagcagacctggtgccaggtctggggagggagggtgtggcggtcgtgggctgtgcgggagttctgactaggggaagtggggggctgtgcaatgtgtgtgcggaacaccgccgtgccgcgcactgaaatgggaagtcatgtgttatgcgggtttcacccccatttaaaaatcttcagaagcaaaacataaaggaggagaaaggatggaagaaagggggctgaagctggccccgccacaccccccatagtggtgacacgggtttctgaccagagtggaggttcggggcgtctgcatacctggaaccacagagaactcccgaggtgacactccgcacaccacactagcccggcttcgcctgcaggaccccaggtgtggacaggcccagcaggatcagcaagaccgagccgggcaccgacagcccctcaccaagcgtctggaggccgggacgccccatggattgcagagttcactgcactgaccctcgatgctgacccttgaagtgccggaaatctcagcgtggactcagacatgataagcgttcaggcactcccctgacgcaggccagggcaaaggcctcacgccccgggatagacaggaagtcccacgtctgctctgcccctaggtcatgcccgtgctgacgccacatcgccagggccgcactccatgagcagcctctgccgtcccaccagcaacctaaaccacaggcagagcgaggctgcggcagccctgcgtgtgccggcgggacacgtctcgccacctgggctctgcccccaccccggccagtgtaagatatgattttagccacgttgagactgtgcaggtgggatggatacactgagcaaatcatgggtgtctaataaatgagccagtacaaagtgtggtccacctgccatgcagagttcaggacagcccctcctggggacatagggcagatcctgccttagcccgtcgtgtgccgggcacacacaggtcccctcatcgtggacagccccggggccatcagggcaaggcgccagccctccctggccagcaagtgtgtaaaagtgggaatgacaccagaatctgtgggcagctgtgaggctttgggaagtaactgggaaagtgatgtatgaggggcccagggcaggccaggcccagcgtgccacgtgagtgcctgctgtgccacatggccatcactgtggcatcggctgggcctgagcacaccgtgcttgccagccacgtatcgtgtggcttttcacctgctggtgcctacaccatcttctctctgggtcacagggcacgtcgctccctccacacagactcccgcacgtggcacacgggagctcagcgggatccgagctcagtgtgtgcttctctcctccaggttcctctcactccagcctccccttcagtgtttctcctctcctgtaggttccgtggggaccccactgcctggagtacaggtgcgcattgtctcagaaaacccacagagggaagcctgctcctacaccatccacgcagagggagacgagagggggaccaaggtaagccactctgctcttggcaggtgggcggccgtgtgtccagtctaggccccccagggtggttacactggtgcatctttcccctggaggcagactcccctccacgcaggggaccagccccctggacactgcaggtgctggctggtgttgcaagggcactggctggtgttctgggccctgcctgctgcgtgtccgtctgtgcgttcacagagcagtgggcagagggagcccagggcggaacgccaaagggactcacacccgggcacacagctcctcccaggggccctgtccacggggacaggctgacgtgggccatgatggccttggctaagcggaagagataaagagcagaggccgttgttgttgatgggaatctggttagaaatatgaactggcctgaccctggcacccgtcctgaggggacgctgaccacaggcccccatagtaggtgtggggagattcacggggccctgcacgcggaggtgggtgcctgtgcagtgctctgtggctgcctccttgtcttgtgcgttattctaaagctgacaagggtgaacaagaacaaaggacattgtctcatttctgtgaggattttaacatgagagtctgctcatcacacgtgaactcatcacagagaaaggtttagggattatggggaaatggaatcttgatttaaaaggaaattattttctctgaagccagtatccacacctgataccacacatgattgactgtgttgccctgaggttttcaaagatcgagggatcctgagtctcatctctgtgcatttccttctctgtgacaccatcttggccctcacgggcacaactgagctccctgtgcagaggctgaggggccgtgggccttgctctcgtgagtgaacagccacacgccctccttgtaccttggtttccacacatgaccacgtgagggttggagcgatggtcgtggttggacgttttagctccagcaaccaagtaggatgtgggtggctttcagtgtcattaaatgacactgaaaggtgcagtggccgcaccttgtgtggagggccacacggcgtgtcccgcctggcctgggccccccgcagtgggctgttatcccccgtggccctgaagtgggtattctgtttccccgtggaaacctctcacctggggccacctgcagtggccgcaccttgtgtggagggccgcacagtgtgtcccgcctggcctgggccacccgcagtgggctgttatcccccgtggccctgaagtgggtattctgtttccccatggaaacctctcacctggggccacctgcagtggccgcaccttgtgtggagggccgcacagtgtgtcccgcctggcctgggccccccgcagtgggctgttatccctgtggcccccacagagccatggggcaacttgctgaaacccacctgggtggctgccccttgctatacccacctcccctgccctctgtagggccccagcccatgctgttgtcctgacatgcctctcctgggattcctgcctctgccctgctggtactaggctgctggccacaccccacatctcaggttcctgaatacaccggcccttcctggctctcaagtctgtgccctgcagtgcccctgcccccaactcgaggacctcccagctcagccagttccaaccctgtctgcagggacggggctcagcctgtgcctgggttggggacaccatctagtcagaaatgtccccagcagagagcagaacgtgagtggcgtgtggaggagtgagacgccccgtggctgtgcagccctctccaggtgtcagtcagctgacactcctgcctctgagcacctgctctgccggaaatggcagaaatgttgccagagaaaggggcggagcgggggtggggagcatttctgtcttaaattaaaacaaaacttaactgcttcacacctgcattggctgccgcgccacctgattgctcctgcctgagtttctttaattatttgtgtctgctggtttcttccctgaagcagtcttgaaatagaagcagcagcctcagctacctgggcaccctgacagtcagagacaccgcacaggggcctctgcgacaggcatgcaggcagaccctgcaaggtgaagccgcacagatgctctggggctgcttaaatctcagcgtacggggggtttgcatctgctgacagcaggcccgggaacatttccagttcagccaaggagtcggtgcagcaggtggagtacagctgccctgcggggcctggctccaccaggggccaagacccttcgtggggaggagcacagcctgagggcctcagggtttgtgccctccgacacctgagattcagggctcccagaggggtgggtgggcgccccaggacaaccaggtgatgatgggcgctgtgaactctgaaaagccccagcatcagagacctgctgctctctcatgtgaagggactccccaccccacgctcacactcgcagacgcacttggtactttcatctgagtctcacgcagtagcccttctctccacagcatcccagaacccgagggtgcccctcactaccacggtcccggatccacgtggctcaagtgaggctgtggccgacagctgggctgtccgatccactcttgtctgtgccgaggcgtgggtcccggccagcgtccctccccagaaggtctccctcaggactagtcatgagaatggccatccctaggcctgtggagtgactcatgactgttcctgggcagatgatcagccaggccttcagagctgaattaagaggcttggtgtcatatttgtcaggaaacagaaagtacctgcagaaaggaatgtgccctgtggggatgggaggacaccttcccaggatcatccccggggccagagtatctggaccctccccaggtggcagctggcctgccaggcccagggctcagcctcctccatcacctcgctgaggggctggctcctaccactccctcacatcctgtgacatatcacaggtaccacacacacatgcagtgcgcgcacgggtatcacagatacacgcagtgtgcacacggatagcacacgtagtacgcatgggtatcacatgcagtgcacacacaggtatcacacgcacgcagtgtgcacactggtatcacacacatgcagtgcatgaacgggtatcacacacatgcctagtgtgcgcatgggtatcacacacatgcctagtgtgcgcatgggtatcacacacatgcagtgtccacacaagtatcacacacacatacacattgtgtgtgcacagctgttacacacataaatacagaaaaaaagacctgatggaaaccccagaagtcaatatggctgagctccaggccggactccctgacgatgtcataggacgagggggcgcgtgtgcacactgcatatatgtgtgtgtgagacccgtttgcacactacatgtatgtgtgtgatacccctgtgcacactgcatgtgtgtgatacctgtgtgtgcactgctcatgtgtgtgttacccgtgcgtgcactgtgcgtatgtgtgtgatacccgtgcgtactctgcgcatgtgtgatacccgtgcacacactgagtgtgtgttacctgtgcacatgctgcatgtatgtgtgtgtgttacccatctgctcactgtatgtatgtgtgtgagatacccatgcgcacactgtgtgtgtgatacccatgcatgcactgcgtgtatgtgtgtgatacctgtgcacataccatgtgtatgtgataactgtgcacgcactgcgtgtgtcacatatgcacacactgcatgtgtgtgtgatacccatgtgcgcactgcatatacgtgtgtgttacctgtgtgcaacactgcatgtgtatgtgacacctgtgcgcacactgcatgtgtgtgtgatatttgttgaaaagactaccctttctgcattgcattgccattgccactttgccaaagattaattggacatatttgagagggtctacatacaggttatctgttctgttcccttgatctatgtttccattcctctaccgacaccacattatcttgactgttgtggttttatagtaggtcttaacaattgtagtgtgatttcaccagctttattctttctcagagttgttttggtgcacatattaattttagaattagcttgtctagccgggcctggtggctcacacctgtaatcccaacactttgggaggccaaggtgggcagatcacctgaggtcaggagttcaagaccagcctgaccaagatgatgaaacccgtctctactaaaaatacaaaaattagccaggcatggtagtgggtgcctgtaatcccagctacttgggaggctgaggcaagagaatcacttgaaaccagaaggcggagtttgcactgagccgagatcacgccactgcactccagcctgggcaacaagagcaaaactctgtctcaaaaaaaaaaaaaaaagaattagcttgtctatatctacaaaaagttcttttgaggtcttgaatggaaagccaggtgtagtggctcatgcctgtattcccagcattttgggaggccaaggcaggctaatcaacttgagaccaggagctcaagaccagcctggccaacatggtaaaaccctgtctctactgaaaatacagttagccaggtgtggtggcacacgcctgtaatcccagctactcgggaggctgagtcacaagaattgtttgagcctgggaggtggaggttgaagtgagccaagactgcaccactgcactccagcctgggcaacagagtgagactgcctcaaaaaaaaaaagagagagagagagagagagatgttgattggaatttagccattctgatcggggagatcacttgggggagaattaacaattactatgctgagtcttccaatccatgaacatggtatgtctctccatttacttagatccgtgaacacggtgtgtctctccgtttacttagatccgtgaacacagtgtgtctctccgtttacttagatccgtgaacctggtgtgtctctccatttacgtagatccgtgaacacggtatgtctctccatttacttagatccgcaaacacggtatatctctccatttacttagatccgtgaacacggtatgtttctccatttacatagatctgtgaacacggtctgtctctccatttacttagatcagtgaacatggtgtgtctctccatttagatatactttggtttcttctgtgttgtattcagcatatagatgctgtacttgtgttaaatttataagtaaatgtttcttcttttctttattcctcctatttcttctcctccttttcctctcctttttaaactattgtaagtatggcaggtgggtatggggggagagttgtttgtttttttgagacagaatcttgtcctttcgcccaggctggagtgtagtggtacgatctcagctcactgcaacctctacttcctgggtctaagtgattctcatgcctcagcctccccagtagctgggattacagatgtgtgccaccacacctggctgattgttgtatttttaatagaggcagggtttcaccatgttggccaggctggtctcaaactcctgacctcaagtgatctgcccgcctcggcctcccaagatgctgagattacaggcatgagcctctgcacacagtcacgtttttgttgctgttgttagttttcaactgttcattgctagtaggtagaaatagaattgatttttgtgtgttggcctcaaatactttagttgttaccttgctaaattaacttactagttttaggagattttaatagacttcttgggaatttctacaaatacaatcatgttttctgcaaatacaaacagttttatttcttcctttccaacctgtatgaccaaagccctgactaggacttccaatacgatactgaacagaagcagtccgagtggaccttcttatttctgatcttagggaaaggattcagtctttcagcaagtgtgttagttactggctttttgcagattccattctatctataatgtgcttagactttttatcactaaatgtatgttgaatattttcaaaaagcttttcggtattgatggacttttctttattaggctgttaatatggtagattacattgaaccaagctttcattcccaggacaaaccccacttggtcctggtgggtcatttttttatatatagtactggatttgatttgctagcatattgctgagtatttttgcatctgtattcataagaaattttggtctgtagtttcccatttttgtactttctttgggttgtgtttgagggtgatgctggcctcattaaatgagttgggaagtgttctctcctctttttttttctggaagagattgtgtagaattggtattatttcttctttcaatgattggtggaattcaccaatgaaatcatctgggcctagaggttttcttttctattattattattttgtgtgtgggggataaggtctcgttctgtcacgcaggctggagtgcagtggtgcaatcatagctcactggagccttgaactcctgggctcaagtgatcctgcgtcagcctcccaagtagctgggaccacaggcatgtgccaacatgcccagctaattttttatttttatttttgtagagttgggggtctcactatattgcccaggctgatcttgaactcctggcctcaagtgattctccctcctcgcctcccaaagtgctagggttacaggtgtgagccactgtgccctaccaacgtttcttttttgaaagaaaaagaactatgaattcaatttctttagtgcttataggactgttcaggtcatctgttgcatcttgggtgatttttggtacatatcatttttgaggaattggttcatttaatctgttaagtttctttatgtagagtttcccttcaggccacgaaaccattaaaaggttgattaaaaggttaataagggaattcccatcttaaccttttaatggtttcagggcctgaagttatgtggctcccattcctcatgttggtaatttgtgtcttctgtttcttttttctttgttatccttgctagaagtttatctgttttatggctcttttttcaaagaagtcacttttggatacattgatttttctttactgtttttctgttttcagtttcactagttcttggtttcttctacttgcttctggcttttctctttttctagttgcttaaggtgaagctttagattattgatttgagacctttcctctttataatgtgtacatttaatgacgtacgttgcccttaagcattgctttagctgcatccccaaatttatatataatatatatatatttttttcttttttctttttttttttttgagacggagtttcgctctcgttgcccaggctggagtgcaatggcatgatcttggctcactgcaacctcagcctcccaggttcaagcaattctcctgcctcagcctcctgagtagctgggagtataggcatgcgccaccacgcccagctaattttttgtatttagtacagatggggtttcaccatgttggtcaggctggtttcgaactcctgacctcaagtgatccacccacctcggcttcccaaagtgctgagattacaggcatgagccaccacgcctgacctaaattttgatatatttttattttcatttagttcaaaatatttttaatgttccttaagacttcctctttgacttgtggattatttagaagtatagcacatattttccaaatagttggatatttttccattatctttctgttactgatttctagtttaagtccattacagtcaaaagacgcacttggtatatttcaattcttttaaatttgttaagttgtgttttgtggcccagaatgtggtttcttttcaggaatgttctggtgtacttgaaaagagtatatattctgcccaggcgcagtggctcacacctgtaatcccaacactttgggaggccaaggcaggagaatcactgcccaggagtttgagcccagcctgagcaacatagtgagaccccatctctacaaaaagttggaaaaaaaaaaatagctgggcatggtgttacatgcctttggtcccagctacacaggaggccgaggcgggaagatcgcctgaatctgggagtttgaggctgcagtgagctgtgatgatgccaccgcactccagcctgacagagcaagagtgtgtgtcctgctcgttttaggaaatgtctgttctgtaaattagatgaaggtgtttgatcgtgttgttcagttcttctatatccttgctggttttctcaccacttgttctgttactaagtgaggggttgaattttccaactataactgcctgtttctgctttcagtttttgcttcatatattttgaaagtctgttgtttggtacattcacatttataatgattgtgtcttattggtgaattgactcttattaacatttaatgctctggtaatgctctttgctcttaagtttactttgatattattatagctattttaatttctcggttggagtttgcatggtatttattgttctatccctttacttccaacctacctgtgtaattgtatttgaagcaagtttcttatacacagcatacagttggattatgtgtgttttttaaatccagcctgacaagctttgtaattggtatgtttagaccatttacatttaatgtaattattgatgtgcttgaatttaagcctaccattttactatgtgtttactattgttccctgagagttttattgctcaactttactgccttctttgaggttattttttcatattccattttaatttgtctcttaagtttttgaccataaatgtctttgcatagtttttttagtagtagttccagaaactacaatatacatacttccttttttacagtctacttaaagtcaacattttaacacttccagaagaatgtagagccacatccctgcctccacatcggttacttaccctctgcctttagagtgtagtcagtgtaatacctgtatttgttgtaaactccgttagacaaaatggtaatttttgctttcaacagtcaaaaatatttcagagaacttgagaagaaaggaactcaacttcattcatccaaatatttgccacttctgttgcttttcctgtattcccaatataccaagtctccttctgataccagtttctttctgtctgaaggacattctataggaattcttttagatcagatctgcttgcaacaaattaccttatttttcctcatctaagaatgtctttatcttccttcctgaaggatattttcattggattaggaattctgggttgacaactattttctttcagcactttaaaaatatgattcttggctggatgtggcagctcatgcctatagtcccagcactttgggaggccaaggtgggagtggatcacctgaggtcaagaatttgagaccagcctggccaacatggggaaaccctgtctctactaaaaatacaaaaattagccaggcatggtggcacacacctgtaatcccagctacttgggaggctgaggctggaggattgttttaacctgggaggtggaggttgcagtaagccgagatcatgccattgcactccagcctgggtgacagaatgagagtctgtctcaaaaaaatactactaataatataactccacttctttccggcctccattgtttccgtggagaaatcagtgggcgcaggaacccttgttcctctctgtgtgtcagtgattggattatgatgtgtctgggcttggacatcttttggtttgtcctgtttgggattctctcagcttctttagtttataggcttatgttttcaccaaattttgggtttttagccaaattttatcaaacgactttgtgcacctaagtgttatcttttcttctgtcactccagtagcatgaacgttagccctctgtgtgttgactttcctggtgatttttctctgctgttcagattttgggtcatttctgttgctctgtcttcaagttgtcacgttcgtttcttcatcgtcctgctcctgaaccaatccatgagattctttatttctgtatttttcagtttttaaattattgtttggttctgctttatatctgttatttctttgttgagactttctgtttttccatttatttccaagtgtttgccctttctttctttttctttttctttttcttttttttttttttttttttttttgagacagggtctcactccgtcacctaggctgaagtgcagggctgcagtcttggttcactgcaatctccacctcaagcgatcctcctacctcagcctcccaagtagctgggactacaagcactgaccaccacacctggctagtttttatcttttttgtagagacagggttttgccatgttgcccaggctgttctcaaacacccgagctcaagcagtctgcccgcctcagcctcccaaagtgtgcccttactttttggagcatttttataatagtgctttaaagtctttctcagataattccaataactgtgttgtctcagtgctgttgtattctttttctatatgagttgctatttttctggttttttcccgtgttgagtaactttgtattgtaccctggatatttttaatgttagggatgagattcttggtcttgttgacattctgtgaagatgttgaggtgtttgttttactgtgacttggttggcttaactctacaaagtctgaccctccttccctgggattggtctcattgtcattttatttgtagggcctttgccttgctgtctctacatgtcccacaagtgtactgaccagtggccagtctgaccacgtcagtggagcagataaaggacagcagtggaaaaattcacgaaattcagataaagtccgtggtttctttgaaaaaacaaacacaaggctctgagcagccaggagttaggctgggcactgcacggaaagccccgtcaccatgtggggcaggtgtttcacccccgtgggtggcgtcagcccctcctggaggagcccaggctggcgggttggcagccccgtcatcatgtggggcaggtgtttcacccccgtgggtggcgtcagcccctcctggaggagcccaggctggcgggttggcagcaggacgacacactcggcagaggctgccatggggcagtgttggccccacggcgtttgagcgccctttctccacatcagatcagtgtgttctgctatttcgcagctacttccctggcccctggttttctgaagtccattccagatggcaggtgatgagcctcagtgagactcttgtacgcatcccttgacctccggggtcacagccagtcactttcacagtagagaagagtgagggtcgtggagctggcagctgctcatctgaagcccctgctccttctctgccctccccagaccctcctgacctatgagccgagggctcggccggtgtcttcacagacccaccgtgtccagggcctcccgtgccatctgttcctggtgctgcagggacccccagcccaggctcatataacccagcctccctcccgccctctccatggtcacaatagaagaacagtgaggctgtgtttcctggggccatggcagtgcctgcatgcttaacaggggcctccagggaccctccaccctcaggccccaccttcccttcccacggagtcttccctcttgtaattggtcactcagccctgtggagggcgctgcccgctccaagctgccccagcccctgtgggcaaggtgtggacaggtgcccgctgctgtgttccctggtttgagaaacgcccccgaagatgggatttgggcacaggttttagacgtggacaggctgcctgaatccagcccaggctctgagtgctgaggcctgggccggtaacatgctcaagtctagaggatggggtaggagcacgttcttctgtggctgttctgggaggaatgaaaggacacccagctcccggccagggcaccagggcccacagaggacggcgggaatgcttagctcagcatggttggcttccacctgtcaaagctgcgttttccaagcattccaacaaagcgctcagtttcagaaagcacgcggccctgggtgggccctgggtgggcagggagcagcccacagtttcagaaagcaccaatcccaagagggtgtgcccagctctgacctccatgttcttcatcctccacaggtgaccccagggtttgaagaaaaggagggggagctgctggtgaggggaccctccgtgtttcgagaatactggaataaaccagaagaaactaagagtgcattcaccctggatggctggtttaagacaggtaggacccagccccatgggagtggaggagaccccgaggggacaggcaggaactcattgctgcccacgttgagtgacaccgaggctgggagttcccagaattttcagccaaaggcagaagatggggtggagtggggctgggggccactgttacggcactgcctcctgagcacccggcctccccaccggcttctagagtgggctccttggccctgtccctcagtgccaggggccccagtgccccatgacaaggcttctacactgtccctcagcgcgacagccgctccggcacgcacgcaccctgaccacagacgccgggccccacgcagcccttcctggtggccctgctgcccctcgtgggctggggcaccctccacctccgaggtgtacccctgtacccagagacctcaccacccccacgcttagccacacttgtgccctccacatccttctccccaccagagtcagaagtcagctgacgcagtgcggttggtttgcagtgcggctgtttgtttactgttccacaaattagcacattctctctgcctgccagaacaggcctgtgggtgagtgggaacctgcccacctgattgaggtggcccaggaagcctgtggcggtcaggagagacggcggcgcccctggagcctgctggcagcccccactgccaccctcctgctctccctgagcctgccctgagctgctgctgcctgacccccctcctttgtgagaagctggcttggtcccaggatcccacatcccgccccatggggcgtatttggacagtggatatttcgacatttggatagtggacgtatatggatggacatttggatagcggacgtatgtggatgtgttactagggggtccttgctcccagagctcccaagatggtagcgggcagcttccaaaatggcggcaggctgcttccaagatggtggcaagcgtcgtgttctctgacctggggttcttggccttatggattccaaggaatggaatcttgggccatgcggtaagtgttatagctctattagaagccgtgggccacagaaaagaaccatggaacccagtgactagtgttcagcttgattaggatgaacgtgggtgcttagccgtgcaggaacaatggcgagcctttaggccagtcgggagtggcagtgggtgcctcgctggatcaggagcacagtggacaccctgcgggatccggaggaatagaagtcagcggcgggtctgcaacggcggcaagcagcagtggtggacggcgagcgaaagctcaacttgagccgtaactaccacggaccagaagagagtgtagttgcaagatttaatagagtgaaaacagagctcccatacaaagggaggggacccagagagggcagccgttgccaggtttatatcccgatcattgtccctcctgctgtgctctgaggagatagatgattggctattgtttacctcctgttttagcctaattagcattttagtgagctcgctttactacctgactggtcgggtgtgagctaagttgcaagccccctgcttaaaggtggatgtggtcaccttcccagctaggcttagggattcttagtcggcctaggaaatccagctagtcctgtctctcagatggacatttggatagtggacgtatgtccatggatatttggatagcagacgtgcgtgggtggacatttggagagtggacacacgtggttgtgtggctgcaggtactcactgtagtgtatttatccggaagatgtgcacgttgctcctgacccctgggtggtgagattgcggtggtttttcttttcctggtttttttttttttttttttggcctgtctatattttatgctgaacatcattattttataataacctttaagtaatattttccaaaaaaaagaggcccattttcatgcatcagaatctgctggcccaaaatcagaaacgcatctgccccatgcccttccacagggagcagagcggggggctgcagcgtgcaggcgggatgggctccttgagggatgctggaaggggcaatgttggcctgcagcctctccgcctcatggcctgatcctgtgggtcccagaggccctggagcatgtgctgctgtgaggcaggtgtgctaggtgtgtggcagttccgcacgtttgcaaagtgaaggctccgtgagcccctagagcagaggccagtgccccacgcagcatctcataggcttcccaaggtaccctgggaggcaccttcgtgggctggacatcagcagaggacccagggctggggccctagaagcctctctgtgacaggacgtggtcagcacatcaaacactccctcccaatttatcttttttatacatccccattagcgcatgctgatctggggaaacagcctgtccatgacttcccttcaaatgcagaattacaggaaccggacttgagcaggtcttgctctgagcatccctccagtgccctctgaatgccccgaccccaatccgactcacgctgcagttgttttatttatttagttagttatttttgagacggagtctcgctctgtcgcccagtctgcagtgcagtggcacgatctcagctcactgcaacctctgcctctcgggttcaagcaattctcctgcctcagcctcccaagtagctgggattacaggcgcccgccaccacgcccggctaatttttgtatttttagtaaagacagggttttgccatgttggccaggctggtctcgagctcctggcctcaggtgatccgcccgcctcggcctcccacagtgctgggattgcaggcgtcagccactgcgtctggccggttcttgtatttttaaattcaggtaaaagctgaagacgttttcttctttgaaagcacaggaaccacagccctgtggattttgcgagtcgcggggctcccggagccgctgggagggcagccgtgtgagatgcggggctgcgagcgtggaaacactcgcagtcgccagtgctgaggcatgtttcagccggggcggaatcacatgcattaattattgtacagagatgtctttagtagaaaatgattttgaaattcagtttaatttcattgtaatgtgctgcaaacaggaagggagtatgtgtgtttaattggctctcgggggtaaggcctggaagccgcatgtctttgtcacaggccattagcgatgctgctgcataatgagagcctgcaatcagctcacagctgccgctcctgccgggagagcatgatattaaatagaaatcaggagaaattaaacttaaccctttccctggccagcccctcctgccacacggattctggcataagccggcgggcacaggggacagccagggatggctggacacagctgaggatggccgaggccggcctgcagctccccaacggcctcctccgggtcaggatgagaggagaggttgccagctttgatgccagccgctcctgcctcccccacctgcctctgtgcctacagcccgcttctgcctcaagatcacacagcgggcttgtgaggccaggggtctccgctgctgctcaaggagatggcaaaggtctgtttcaggtaactcctctgacggccacaacgatgtcttcagacgtcaaaggtctgtctcaggtaactcctctgacggccacaacgatgtcttcagacgtcaaaggtctgtctcaggtaactcctctgacggccacaatgatctctgcagatgctctgactccacgtgccctcgctcagagacacacgcgcacatttgccacctggggcgagtggaaggtgacgtggaggtgggcacctctgccgggcagatgcgggagcagcagcagcagcagcccctcctgggggcatccaggggtcaggagaggggcggtagggcagggcggcatccctgcaggggtgaatggcgtcttaggctccagccgggtgaggaaacctgataaccgaactccttagagaagagccagggatcccgggaggaccaccaggagcttgtggggaaggactgaggggaagagccccaggtctcgggaggaccaccaggagctcacggggaaggattgaggggaagagccccgggtctcgggaggaccaccaggagctcacggggaaggattgaggggaagagccccaggtcccgggaggaccaccaggagctcacggggaaggattgaggggaagagccccaggtctcgggaggaccaccaggagctcacggggaaagattgaggggaagagccccaggtctcgggaggaccaccaggagctcacggggaaagattgaggggaagagccccaggtctcgggaggaccaccaggagctcgtggggaaggattgaggggaagagccccaggtcccgggaggaccaccaggagctcacggggaaggactgaggggaagagccccaggtcccaggaggaccaccaggagctcacagggaaggatggggagaggggagtggggggctggagaacccccagactgagaaattctgctcggagcgagaagggagctgggcccaggtggccccatcccccaaggttgaacatcagcccagcctcccaggccctccacgtgctcatgggcaccactgccgggcactagcttacttgtcaccctgtctgaggcgtgttggggtaggagcaagagtccgctgcttccagggcccagctggggctccatgtgtccctgggcaccccagaaccctctgggtctcagccgttgggttcttacatctgggccagtggcaaagggttaaagggaccttgtgacttagttgggactcactggcctcaagaagcgaaaatcagagggacagcagccccagccgccggggattccctgtggcgccagagctccccggcaggcactgtggaggccaagtggggaccggcagtgtcgtggtcccggcccacagcctctcagcctcccacagcctctccctgtggtaacgaggtggacgctgagccccaggcctgatggcacatttgaggtcaggtgggggcacctgggctgttcctgtagctgtcccctcgtccaggggagggaccttttcagaagccctggggcctttgtctcattgaccaaaaccctcctggccatgctgccttcacaggacactgggcatctctgtggggcaagggaaggaacacaggcctcctggtggggccccaagacccaaccaaggctcgtctggctggtgccagcctctgcgccaagggtgccgaccaaggtcagagccgatcgcggggatgacaggtgccgaaatggccatgcttgccccagcccctttcatccggcagagggacctcgctgggcctgccacgctcagccaggctgtgctgtgaagcccctctcttcccttctcagagccatatgtccacgctgacagctcctgagagggaccatgttttgctgcctgcaggtgccaagctgactgatgggccatgctgaggagggtgccccagccctcctgcaagatgcccttctgtgcagcctgcagggccaccaggcccacgaggcggccatggtcttcagatgtgtcttagcctgggttccctagaaaacacatgaggactctgggcagaggctgagtgtttttacatttttatttttaagccaaagttacacacctgtggcttaaacacccaagtagttgtagcagtttgagaagaagaatcacagccgtgccccttccccagactcgccggctgctgcttctgtgcggtccccgcatcccgagggccgccagcaccgccacctccaggctcctttttgctgccatggcttgagtcccgcagaggaggcccctcctcaggcacggcccggctcagtcccgtatggcatctgcactattgagactatggagtcgccgctgagaactgagcccaggagacactgaggtttttcctctttctttgttttccagagtcgggaaagtcttggttttcttggtctcctggtgccaattcctcgtgggctgggctggtctccccatggcgcctccttccccatcaccaccaccccttccctcctaccgggtcaggacgtcggctcccagcccacagcatcctcgtcttccctcttccgcccccagctgtggggactgctttcccctggggcttcctgaggcgggtgtgtagggtccgtacttggagacttgcgtgtctctccgggtcttcgttctgccctcagccttgcttgtcggtttggctgcgtatagggttcagggttagaagtcgcttctctatcattttctggccttcagatttgctgctgccacagccgtgctgaatcctggcacttggtgaccccctcctttttttttctgtttttttttttttttttttcgagacagagtcttgctctgtcgccagactggagtgcagtggcgccatctcggctcagtgcaacctccgccttccgggttcaagcaattctcctgcttcagcctcccgagagtagctgggattacaggcgcccaccaccacacctggctgatttttgtatttttagtagagacggggtttcaccatgttggccaggatggtctcgatctcctgacctcgtgatctccccacctcagcgtcccaaagtgctggaattacaggcatgagccaccgcacccaaccatgaccccctctttttaacgtacagggtgtcctctgtccccagacccctgagcccaggttgaggagccaccagctgaggacggagccaaggtcacggagctgccgggtgagcgctgagcccaggtcagggagttgggtctcaggccgtcactgggactccctctgccttcaagaagcctctttcacccttggcccacagaggagacctggatggcactggggtccaggtgcagaagcctccagtgtccacgggcacctgagcttccagcaccttccctcctgctgggcggtggcctgtgcctggccgcaatggaggccgccttccccactgcccctctgagcctcagtctgtcctccctgcagccacctcccctggccaggtgccccggggtaactggtggaggctttcacgtaacttggtttccagctgcctctgtacacacacaggcacctgttccaggcttggcctctctgtacacacacacgggcacctgttccaggcttggaggctgagaacttgggggcagagatctcagggcatcggcttgggcggggtccttgggcagggccttgggcttccctcggcactttcctcaaggactggggccaagcttcacattctgttgctggcatcagtgccatttgggagcaaaagtccgacaggctgggtctgggcctctcttcaccttgtttcctgggatcgcgctttgggtgctggtgtcactccagatccaggctcgggaaccacatctgcacagcagaacaggcgctgttcttatcttgcgtgcgggtcaggacatccccccggccaggagtgcttcctccgaggcccacagacaagttctcgctgggggactggggaccacagcacctcactccacctacactctagagaattcaaatctgagtattggaagatttattttcagttacagtggaaggcagagacatgaaatagcaccaaattcaaaagcagctcataaatccaggtaataggagtttattgattgctacattgtatctgtcagaagaaaactcctttaatgaacacatcaggccgaggacatacacagcccattggcagccgactccgattccagaatcgatgcattttgataaataggttgttatggaaagtaaaggttatttaacttgtttgacttgcatttcacagtgatcgcaagttgccctggagccctctgaaccttctgagtcgccctcgctgccgcaggacctcctcccgcggggtgtccgacccgctcttgcttggctgagactttgtttaaaccctggctccgatgcctctgagcccttgatagcagcgtcccagcctggaagaacaaaaccagccacttttccccttggcaaaggcacagcaaggcgggtgaggcgggcgctgagtagtctgggaatgggcagggagatgtcgaccctcggagctgagactgctctgtgctgagaagctagaacaaagcctgacatgttccaaggggcaagctcagggctgggagggaagcagcggggccgcccctttgggtgggggtgcccaggccttgcagacaagacactggccagaggaggtggagcaggggtactggggcagaggggccatgtttgtgcagcaggatggaccctggagggccccggcctagagggggcctttgccaggaagatgccaggaacgtccaggccaaggcgtccgggcaaaggcatccaggcccgggagacgcatgtgggacttgggctttcctctgtgggcagtgggaagtctctccctacccctggaaggagctccaggcagcagtgaggatggggattctgacactggagtggggagccggccctgtggtgctggctgggctgagagcggcaccaccttctgatgcccagggtgggaaggacacacgactgccaccatgcactgagggccctgcacgccacacacgtgctctgagcactgagggtcccctcatgccacgcacaagttctgggcacagaagcacctctcagaatcatccccgagacaggcgtccatcacagagacaggtctcagtcctgcactgattggcttcgcccagtgctgctgggggagtctcagacacagcctttttccgacaggtatagctgccactttctccggcacagaagcctggggccctgggaatggcaccatgttgcgcgccgacccctacggttcttccctccgcatggctcagtggaaaccgtgcgtgcagcacagcaggcagctggggcctgtgacgaccctggggttggaggccaggcagggctatcactgagaagcagggatttggggcctggggcccagggaatggacaactccccaagctgcccccaccagtccttcctgagcactggctctggaagaagcatctcggggcagaggcagccaggcccaggcagggagagacccccaaacaaggcctacagcagggtctcagggcctgaccatgccagaaacagcccagagccagagaggatgggcagatactcagtgccaccactcctgggagatctcagcaccagggcttcgacctctggggatacacacccacacctgctgagatataacacatctgcagagacacagccacgcctgcagagacatacccacacctgcagacacacccacacctgcagacacacccacacctgcagacacacccacacctgcagagacacagccacacctgcagacacacccacacctgcagacacctacacctgcaggcacacccacacctgcagacagagccacacctgcagagacaccctcacctgcagagatacaggcacacctgcagagacacagccacacctatagacacacccacacctgcagagacacacccacacctacagagacacccacacctgcagacacacccacacctgcagacacacccacacctaaggagacggggtctcgcagtgggcggagaggttgggtcttgcatctaatcagccattgatgggcctctcctgtgaagggcactcattccttgtattcataaattaagctcatgtgagtttgttctttaacaagttattgcgcgatcataatccattgccgacgttggcgtgactcaccatgtcatgagcccactcggggctggtgctgctggagatggggaagaaaattgctccataaaccaaaaagcaacattttaaaacttataaaaaagattcgcaggaaattagaaataacacacaggggttccttgtgccgtccccccagtttctcccagcatcagcctggtgtgtaacggtggtacatcctcagtgccgtgcgtagctttggtgcagtctcagccccgtgcgtagctgtggtgcagcctcagccccgtgagtaactgtggtgcatccttggagccaggacacaggcagctcaagagggtgccggggacttgtcagccttgggggcaggcagtgatggcctctccggcaggaccagagcagggcagtggctccatgctgcgctgggtctctgggtggtgcaggccagggtggagccaggccagaagctgtatggagggccctgagcacctggcagcctccctggtgtcagcagctgtggcatccgtggggcaggagcagcctggacggggtggctcggtgcgattaagagatgctattggaagattggtggctgtctggtccagaggggacacacaagccaggctgcacagcaggagcaggagccatggcgggtcccacgggacttgggacaggctgtgtccaaccccgcccacagcccaacctgcacacccccttccagccgcccagactaccccaggggcgcagtgagaccactctcctgtcggggagcctctggtttttctgctacccatcagcacagagttccagagttccagagctccataaataagcctggagcccacctgggcacacccatccgtcttgtttaatagactgaggagcacgccatgggtctcaaggagtggtgaggtggatggatggggcctttctgcgtccaacagcatgatgtataatgaagtatttatgatttattccagctaataacccatgtggagtgcagggtatgtggaagcagacagttgaggcctcagcactgcccttacatgccctgcatgctcccacagccacggcacacatgtgtgcgtgcacatgctcacagtcacgcataccgcgccctcccagctgcacacacgctcgcaggcacgcacactatgggcccatgcgtcatgagacagcttcgggctgggagtacaggctctgaggctgcagcccgctcttcccgactccccaccctcagtggctggtggtgtctgtgttgagctactcgagaaaggaagaaaacgaaggaagcttggttcccacaggagctccaggaactgcacggggaggagcaagggccacgtcgtggctttgccttaggaaggaaaacgtggggcagccccggccattgttctaggaccagcatggtcaggtgtggagggcacaagatgggcaccagcaggaggctccaggcacccaggaaaggccctgtcctcctcagccaccagcccctccctgtggcctctgcgtgggccttggtgcctctcccatccagaggggctgggcattcactgctggagcccaccgtggtgggatgttgtaatgtgtctggttcacttcttttactgaatatttggcctggattcttttgtgggcctgagagaaatggcaggacagggcctggtgggcctcggcccctctcccagagcagcctgcctgcatgaggggcggcccctctatgctgcagtcccaggggctccgtctgggggcccttgcagcagtagcagcacagccaggaggcccagcacaccctggcacccatcctgagggagggtaaagcatcagaccctgtgcttgttgctcagaaaaggccacgcatcccacccatggccagtggttatcaatcactgtcacagaaacagggcctgagccggcttcctaatgcagggtgtctgcagaccacaggcccagcagggcttctggcacctcctgctcctggcaggctctggacccactgctgacctgcccctggaggaagtgcatacagctgagcatggggaagggaccccacaggaagggcagaccccacatcatgggcacagtcccaccttgggacgcacgtcgtgaccaccaggaatgtgggcttacctggcatagctgtttctccgttggggttgccacagggtagtaaccagagccccctttcctcagaggacaccgtggtgtttaaggacggccagttaaccagagccccttttcctcaggggacaccgtggtgtttaaggatggccagttaaccagagccccttttcctcaggggacaccgtggtgtttaaggatggccagtactggatccgaggccggacctcagtggacatcatcaagactggaggctacaaggtcagcgccctggaggtggagtggcacctgctggcccaccccagcatcaca

SEQ ID NO: 15363 - DNA, 33844 bp, Homo sapiens
cgcacgcccaggatttcttgcgtgcagtttgtgaagaaaaaattaggtaagtgaaaagagcccactttctcgttcagaaagtcttaaagatcaacagatacgacttatttctaataaatcactcctactaagttctgggaagcagtgctttccatttcctttcaatgttccctctctctctacccgtctccgtctctacctctctaactgtctctctctctctctacccgtctgtatgtatatctgtaatctcttccacgtcgatagctgcctggattctgtatcgctctctctgtcacactctgtctctctatctctctctgtctctctttgtctctctctctccatctctccatctatctgtcttctctgtctctcttgtcagactctccatctctgtcttctctctgtctctctccatcgctcttcatctgtctctccgtcttctctttctctatctctcctgtctctccatctgtctctatctctccatctgtctttgtctccgtctgtctgtctgctctctctcctgtccgtctctctctctctctgtcatggcgtctgaaggacaagggtgaggacagtgagctgacccgcttgctcctgcttcatctgcccacatgtcccacggcgcctgcctctcctatgcagtctctctgccttcgtgggcagccctgtgaggcctcctgcctggggcacgttctgctgcttttcctctcagccccgctcctcccctcccagctccctggataaacccctccctcccaggacaagctggtcttttgggccacccaggggcgtgtttgctctgcactctcccatgaacctgcaggcgtgggaacgtttcttttccctcgtggctgttgaggtgtggttcactaactggaaacgcacacgtgtggctcagtgagtcttcacacgcatcacaggcccgcacctccagcagagtcgtgggtggggtattttttctttttgtgagagggaggggtggcgtggagggtgcactgcaggaactgaaggctccactgccatccagtttccagtgggatgtgtgtgtctgtggctgccgcgcgctcctcccagtccccaggaagtgcacagggaagcggcacctttgttcctggagagaattccgggttgtccaaggcacatgtctgaaccgcttcgctctctttgccgttcccttgccccttttctgtgaggccaccggagcccatggttttgctgctgctactgctgggataccctggggctgggcaggccccaagctgagcagggtgagcacaacgttttaccaaatctaaggaaccaagggcaagaacgaggtcagtgaaggagaggatcaggtgatttctggggtgacagaggcaatgagacctcggccatctggatctcccagcgggggtcctgtcagtggtgcctcctcgtaaagcaggggcagcagcagggaccactccgctcagaccgcaaacaaaagcgccttccctactgcccgtgaggctgcgggaaatgctgtgtgagagcgcggggactcggagttctcagggcccgtgttctcctgccaagcctgagctgaccctgtgggccaagatggctgcagttctgcgggtggttctgagccccttgggtgtgcccggccccaccccttgggtgccgcggccattcacccatgtccgcgttctgctgcagagcctgcaagctgagccggctgtagtccccggatgtgcctggccgcagcctgcagcgccgtggctgttcacccgtgatcagctccgtggtcggcagctgcacggtcactgctgttcttgagcgtggttgtgaacagcgcaggaactttgcaggggacaccgcggaccctaagcacattgtttaccctcattagctgttggacctgcttccttctaaaatacacccaacagatcgttttcaaaaaacaaagtcacgccgtagcgcagactgcagcgttggtcccgggtgtcgcacagtggtgctgtacccacggcctggggctcctgcactcgtgaaggagctgccacttttgcaagcaagggccgcctcctgaggggctaaacctgccacctttgcacgcgagagccacgtcccaaggggctaaacctgcctttggttgtgccgcgtaggctgatggtctcaggctcagctgccctgcccctcccagtgctggagaagtggaagaacatcacgggccacaccctgctggagcggtatggcatgaccgagatcggcatggctctgtccgggcccctgaccactgccgtgcgcctgccaggtacgagcacttcccacagctgcgttcctcttccactgtgctctgagccccccaaggtgggccagtctcgaaccacccacattcggactgaagggcggcatggaggatgctcccccgtgggacaggccactcggccaggagagcactcaggatgcactgcgacctgtcccctctgggtagatcagccttctcccaagtctcagtcgggtggatgggggaggtgtctgtgctggcccctggctgtatgactggggagacaatgggaagaacagcaatgcctggaatgcaggcgtcagtgcatgtctcagaggaaggcggggggccatgctgttggctccagaccacatcagcagtggtggcagcctccgtctgtctggagtccgggtgccacacagcgccagcagcagtgccaggagaggtgggtgtggtgggcagggtgggatgagtcaagcacctgtcttccttctctagatgtgggctcctgataccgggcccctcttgtccagccttccctaacacatcccattctgactttcatctgacccaaccatttgagccctgggtcctccgctgggacttctgggaacagagcccacagctggggggccaccctgctgctttctgcgcagcccttccagtctgtctagagtagaagagagatctcagtgcagacttaaagtgagaccatcccgcacatctgtctgtgcagctgcttacctgcagacccagtaaaaattcacccctctggcgtgcagctctgtgtgtcttaagaaacatcatcacagtcaaaatagagaagggttcctcgcctcagaaactcccttcctagtgctcagcacctcctccacccccgaggcctggccccttgttcctgtttctcttcttgtggttttgctttttctgggaggccacgtggctaaatcctgcaggacgtggcctctgagcctgtctgcttccgcccggcttccgcccacagtcaactgcctgtgctgtgtgcgtcagagcccgcgcctttccctgctgagtggcatccgtggtgtgggtgcggcaccgcttgtgaccctgttttaagcaatgacacgtgagatgttatcaacatttgtgtgcaggtttctgtgcgaacgtggttttttatttcacctgggcagatacctaggagagagattgctgtgttgtctgaagctttcaagctgttctccagagcggctacaccatccccttccccctgcaatgggtgggaggtcacgagcacctgctgctccagcgggcggtggtggtgtctcgttgagttcatgattctctcatgatgggtggcgttgagcacctcttcctgttcgtgtcattccgttttcaactggggcctttgttttcttgagttttgagagcttttaaaattcgggacccaagtgtcagctgtgcgattttaaatatcatctcccagcttgtggtttgtcttcccattcacctaacagcgtctttaaaatcaggagttttaggttttggcccggtttatcaatttgttttgtgaattgtctgatgtcatatctaataaatccttgcgtagcccaaagtcacagagaatagtttcagctcttacgtttgggaccatgatccattttgagttaatgtttgtacatagtgcgagatacggaccacagttcttttttagtgtgtgaatgtctaactttttagcactgttcgttgaaaagactcccttctccatcgaacagccctttggatctttgttgaaagtccgtcgactcctgaggggtcggctcctgggctctgctctgtcccattgctttccgtgtgccctttggctcattccatgcctgcttggttcctgggactctagggtaagcgtggacatgggggttcaggcccaggcagggaccagctggtgccaggcagcgatacggtgctggggcctgcaaggtgagtgtgagggctggctggctgctgggctgggaggaggagagactgtaggctcacgcccctttgctgggcctggggagccatgggggctgttaagtgtattctgagtgtaaagtctcggtttggctggggcatcctgagcagaatgacagggccatggcagcgagatcctcagctgccgtgcagagctgccagtggggtggccgcacagagtgcagtgcctgctgcaacagtgcccagggcagtgggcgggtgggggcatgttgtgaaaagaagtcagtgtgagtgatgagaaatacatcctagtctcagaccccaggaaaccgccgtcagtgctggtggcccctgccctgggccggctcccgcgttagtctcagaccccaggaaacctccacctccgtcagtgctagcggcccctgctctgggctgactcgcgcatctccacgatggctgcggcaccagctgtttcttcggtggctaaagctctctggtggaaataagatggggaccttgaaatcaaatgtgactggtctgttgagtctctgtccttatcgttgtccttcttagtaggatgtgctggttttgtccagtgccaccggccacagtcaccacgtaatatggacggaatgagcaaagcccggctcgctgaggctgcaggctgcaggcaagtgaggactgaaagggtaacgggctctgggctttgtcctctctttgttccggacatgtgagcaggacaagttctgtgtattcagaatctgtctgcacagtttgtagttcatgatgactgttcatccacagcattgctttgtgggcgtcctctcttttgatcttctcgaaacagcccctgcgatggggtcatattttgcactcacatacaagaacccatgagcctgcccacggtcacgcggctggtgagtgatgcacttcccaggagcacggtgacctcttcaatggccctcactagagaagatggacagtgcccccctagccttttttactggaacagatacaaggctgagaagctgaaatcaggagcagcccagggaccactgtctacaccgagggagtcatgagcagcccagggaccactgtctacacccagggagtcaggagcagcccggggactgctgtctacaccgaggatgtcaggagcagcccagggaccactgtctacactgagagcgtcaggagcagcccagggaccgccgtccacaccaagagcgccaaggagcagcccagggaccgccgtccacaccgagggcgccaaggagcagatagtagcccagagacccaggggaggctcagcttccccacgctggaatcagaactcctaggcgaacaggaaggagccccagacagatggcacagggagaggagtccccggctgaggagggggatccagagaccctgaagcttcagggttattgggcaagaaacctgagtgcaccaatccccgagtcttcagctaccgacggcaggttccctcgggtgccggggatgctccctcttctctaaggcagagcccacagtaggttccctcaggcgccaaggacattccctcttctctaaggcagagcccacagcaggttccctcaggcgccagggacgttccctcttctctaaggcagagcccacggcaggttccctcgggcgccggggacgctctctcttctctaaggcagagcccacggcagattccctcgggcgccggggacgctctctcttctctaaggcagagcctgacggcaggttccctcgggcgccagggatgttccctcttctctaaggcagagcatacggcagtttccctggggcgccggggacgctccctcttctctaaggcagaatcaaatatctgtgattttatccttgcctttaaatcaccagcagtgtgagttctttggtttggaaaaaagtaagtaaagtcacctcagcattaaatccaatatgccccacaaaaactccaaaatgcagcctcctgagccatgtttctagagggcacggtggaggagagctttcctcactctcaggctctaacccccaccctggtggccatggccttgacccttgggtcggctccagccacaggctctgagctcatgcttggcctcgctgctcagtgcactgtccgtgctcggaagagagagaagctgggtggagggtgagctctgtcgtgtgttatggttacaggcctgctccgtgcggttcctgtggagggagatgaataattcatggccgaccactgctgggcctcgtcacactctaattggaggttgagctcagaggtgctcacggctcctgggccactctgtggcattgacagggagctccagggcctcattggcggtttccgttccctgggtcccagtccccagtcagagttatcagggaggggctggctgacagcgattttagaggtgggctgtggcaggaaggcagtgccccccacctgcctgcagctgcgctcccatctacattggcctttgcggggccagcctctgtccactctcttgagctctcatgtccacactgtcacatgcccggggcacagcgagcggcacctggagtgtggggacccctccctcgagctctcacgggtggcacctggagtgtgggggcccctgcctcaagctttcatgggtggcacctggagtgtgggggcccctccctgaagctctcacgggcggcacctggagtgtgggggccactccttgagctctcatggacaataccactgcttggctgctgcagaatccagacaccatcccagagcctcttcagcctctgcagatggtgtgggacggccacacggcctccccacctgcggcccccgcccctaccccagccgtgccgtgtccttgcgctgcgtccccgccccagtagaggcatcaccaggaagaggcgaaaggccgcctgtgatggtcctcttcttatgaaacgcccagaacagaaaaaccacggacgcggacagcagacctggtgccaggtctggggagggagggtgtggcggtcgtgggctgtgcgggagttctgactaggggaagtggggggctgtgcaatgtgtgtgcggaacaccgccgtgccgcgcactgaaatgggaagtcatgtgttatgcgggtttcacccccatttaaaaatcttcagaagcaaaacataaaggaggagaaaggatggaagaaagggggctgaagctggccccgccacaccccccatagtggtgacacgggtttctgaccagagtggaggttcggggcgtctgcatacctggaaccacagagaactcccgaggtgacactccgcacaccacactagcccggcttcgcctgcaggaccccaggtgtggacaggcccagcaggatcagcaagaccgagccgggcaccgacagcccctcaccaagcgtctggaggccgggacgccccatggattgcagagttcactgcactgaccctcgatgctgacccttgaagtgccggaaatctcagcgtggactcagacatgataagcgttcaggcactcccctgacgcaggccagggcaaaggcctcacgccccgggatagacaggaagtcccacgtctgctctgcccctaggtcatgcccgtgctgacgccacatcgccagggccgcactccatgagcagcctctgccgtcccaccagcaacctaaaccacaggcagagcgaggctgcggcagccctgcgtgtgccggcgggacacgtctcgccacctgggctctgcccccaccccggccagtgtaagatatgattttagccacgttgagactgtgcaggtgggatggatacactgagcaaatcatgggtgtctaataaatgagccagtacaaagtgtggtccacctgccatgcagagttcaggacagcccctcctggggacatagggcagatcctgccttagcccgtcgtgtgccgggcacacacaggtcccctcatcgtggacagccccggggccatcagggcaaggcgccagccctccctggccagcaagtgtgtaaaagtgggaatgacaccagaatctgtgggcagctgtgaggctttgggaagtaactgggaaagtgatgtatgaggggcccagggcaggccaggcccagcgtgccacgtgagtgcctgctgtgccacatggccatcactgtggcatcggctgggcctgagcacaccgtgcttgccagccacgtatcgtgtggcttttcacctgctggtgcctacaccatcttctctctgggtcacagggcacgtcgctccctccacacagactcccgcacgtggcacacgggagctcagcgggatccgagctcagtgtgtgcttctctcctccaggttcctctcactccagcctccccttcagtgtttctcctctcctgtaggttccgtggggaccccactgcctggagtacaggtgcgcattgtctcagaaaacccacagagggaagcctgctcctacaccatccacgcagagggagacgagagggggaccaaggtaagccactctgctcttggcaggtgggcggccgtgtgtccagtctaggccccccagggtggttacactggtgcatctttcccctggaggcagactcccctccacgcaggggaccagccccctggacactgcaggtgctggctggtgttgcaagggcactggctggtgttctgggccctgcctgctgcgtgtccgtctgtgcgttcacagagcagtgggcagagggagcccagggcggaacgccaaagggactcacacccgggcacacagctcctcccaggggccctgtccacggggacaggctgacgtgggccatgatggccttggctaagcggaagagataaagagcagaggccgttgttgttgatgggaatctggttagaaatatgaactggcctgaccctggcacccgtcctgaggggacgctgaccacaggcccccatagtaggtgtggggagattcacggggccctgcacgcggaggtgggtgcctgtgcagtgctctgtggctgcctccttgtcttgtgcgttattctaaagctgacaagggtgaacaagaacaaaggacattgtctcatttctgtgaggattttaacatgagagtctgctcatcacacgtgaactcatcacagagaaaggtttagggattatggggaaatggaatcttgatttaaaaggaaattattttctctgaagccagtatccacacctgataccacacatgattgactgtgttgccctgaggttttcaaagatcgagggatcctgagtctcatctctgtgcatttccttctctgtgacaccatcttggccctcacgggcacaactgagctccctgtgcagaggctgaggggccgtgggccttgctctcgtgagtgaacagccacacgccctccttgtaccttggtttccacacatgaccacgtgagggttggagcgatggtcgtggttggacgttttagctccagcaaccaagtaggatgtgggtggctttcagtgtcattaaatgacactgaaaggtgcagtggccgcaccttgtgtggagggccacacggcgtgtcccgcctggcctgggccccccgcagtgggctgttatcccccgtggccctgaagtgggtattctgtttccccgtggaaacctctcacctggggccacctgcagtggccgcaccttgtgtggagggccgcacagtgtgtcccgcctggcctgggccacccgcagtgggctgttatcccccgtggccctgaagtgggtattctgtttccccatggaaacctctcacctggggccacctgcagtggccgcaccttgtgtggagggccgcacagtgtgtcccgcctggcctgggccccccgcagtgggctgttatccctgtggcccccacagagccatggggcaacttgctgaaacccacctgggtggctgccccttgctatacccacctcccctgccctctgtagggccccagcccatgctgttgtcctgacatgcctctcctgggattcctgcctctgccctgctggtactaggctgctggccacaccccacatctcaggttcctgaatacaccggcccttcctggctctcaagtctgtgccctgcagtgcccctgcccccaactcgaggacctcccagctcagccagttccaaccctgtctgcagggacggggctcagcctgtgcctgggttggggacaccatctagtcagaaatgtccccagcagagagcagaacgtgagtggcgtgtggaggagtgagacgccccgtggctgtgcagccctctccaggtgtcagtcagctgacactcctgcctctgagcacctgctctgccggaaatggcagaaatgttgccagagaaaggggcggagcgggggtggggagcatttctgtcttaaattaaaacaaaacttaactgcttcacacctgcattggctgccgcgccacctgattgctcctgcctgagtttctttaattatttgtgtctgctggtttcttccctgaagcagtcttgaaatagaagcagcagcctcagctacctgggcaccctgacagtcagagacaccgcacaggggcctctgcgacaggcatgcaggcagaccctgcaaggtgaagccgcacagatgctctggggctgcttaaatctcagcgtacggggggtttgcatctgctgacagcaggcccgggaacatttccagttcagccaaggagtcggtgcagcaggtggagtacagctgccctgcggggcctggctccaccaggggccaagacccttcgtggggaggagcacagcctgagggcctcagggtttgtgccctccgacacctgagattcagggctcccagaggggtgggtgggcgccccaggacaaccaggtgatgatgggcgctgtgaactctgaaaagccccagcatcagagacctgctgctctctcatgtgaagggactccccaccccacgctcacactcgcagacgcacttggtactttcatctgagtctcacgcagtagcccttctctccacagcatcccagaacccgagggtgcccctcactaccacggtcccggatccacgtggctcaagtgaggctgtggccgacagctgggctgtccgatccactcttgtctgtgccgaggcgtgggtcccggccagcgtccctccccagaaggtctccctcaggactagtcatgagaatggccatccctaggcctgtggagtgactcatgactgttcctgggcagatgatcagccaggccttcagagctgaattaagaggcttggtgtcatatttgtcaggaaacagaaagtacctgcagaaaggaatgtgccctgtggggatgggaggacaccttcccaggatcatccccggggccagagtatctggaccctccccaggtggcagctggcctgccaggcccagggctcagcctcctccatcacctcgctgaggggctggctcctaccactccctcacatcctgtgacatatcacaggtaccacacacacatgcagtgcgcgcacgggtatcacagatacacgcagtgtgcacacggatagcacacgtagtacgcatgggtatcacatgcagtgcacacacaggtatcacacgcacgcagtgtgcacactggtatcacacacatgcagtgcatgaacgggtatcacacacatgcctagtgtgcgcatgggtatcacacacatgcctagtgtgcgcatgggtatcacacacatgcagtgtccacacaagtatcacacacacatacacattgtgtgtgcacagctgttacacacataaatacagaaaaaaagacctgatggaaaccccagaagtcaatatggctgagctccaggccggactccctgacgatgtcataggacgagggggcgcgtgtgcacactgcatatatgtgtgtgtgagacccgtttgcacactacatgtatgtgtgtgatacccctgtgcacactgcatgtgtgtgatacctgtgtgtgcactgctcatgtgtgtgttacccgtgcgtgcactgtgcgtatgtgtgtgatacccgtgcgtactctgcgcatgtgtgatacccgtgcacacactgagtgtgtgttacctgtgcacatgctgcatgtatgtgtgtgtgttacccatctgctcactgtatgtatgtgtgtgagatacccatgcgcacactgtgtgtgtgatacccatgcatgcactgcgtgtatgtgtgtgatacctgtgcacataccatgtgtatgtgataactgtgcacgcactgcgtgtgtcacatatgcacacactgcatgtgtgtgtgatacccatgtgcgcactgcatatacgtgtgtgttacctgtgtgcaacactgcatgtgtatgtgacacctgtgcgcacactgcatgtgtgtgtgatatttgttgaaaagactaccctttctgcattgcattgccattgccactttgccaaagattaattggacatatttgagagggtctacatacaggttatctgttctgttcccttgatctatgtttccattcctctaccgacaccacattatcttgactgttgtggttttatagtaggtcttaacaattgtagtgtgatttcaccagctttattctttctcagagttgttttggtgcacatattaattttagaattagcttgtctagccgggcctggtggctcacacctgtaatcccaacactttgggaggccaaggtgggcagatcacctgaggtcaggagttcaagaccagcctgaccaagatgatgaaacccgtctctactaaaaatacaaaaattagccaggcatggtagtgggtgcctgtaatcccagctacttgggaggctgaggcaagagaatcacttgaaaccagaaggcggagtttgcactgagccgagatcacgccactgcactccagcctgggcaacaagagcaaaactctgtctcaaaaaaaaaaaaaaaagaattagcttgtctatatctacaaaaagttcttttgaggtcttgaatggaaagccaggtgtagtggctcatgcctgtattcccagcattttgggaggccaaggcaggctaatcaacttgagaccaggagctcaagaccagcctggccaacatggtaaaaccctgtctctactgaaaatacagttagccaggtgtggtggcacacgcctgtaatcccagctactcgggaggctgagtcacaagaattgtttgagcctgggaggtggaggttgaagtgagccaagactgcaccactgcactccagcctgggcaacagagtgagactgcctcaaaaaaaaaaagagagagagagagagagagatgttgattggaatttagccattctgatcggggagatcacttgggggagaattaacaattactatgctgagtcttccaatccatgaacatggtatgtctctccatttacttagatccgtgaacacggtgtgtctctccgtttacttagatccgtgaacacagtgtgtctctccgtttacttagatccgtgaacctggtgtgtctctccatttacgtagatccgtgaacacggtatgtctctccatttacttagatccgcaaacacggtatatctctccatttacttagatccgtgaacacggtatgtttctccatttacatagatctgtgaacacggtctgtctctccatttacttagatcagtgaacatggtgtgtctctccatttagatatactttggtttcttctgtgttgtattcagcatatagatgctgtacttgtgttaaatttataagtaaatgtttcttcttttctttattcctcctatttcttctcctccttttcctctcctttttaaactattgtaagtatggcaggtgggtatggggggagagttgtttgtttttttgagacagaatcttgtcctttcgcccaggctggagtgtagtggtacgatctcagctcactgcaacctctacttcctgggtctaagtgattctcatgcctcagcctccccagtagctgggattacagatgtgtgccaccacacctggctgattgttgtatttttaatagaggcagggtttcaccatgttggccaggctggtctcaaactcctgacctcaagtgatctgcccgcctcggcctcccaagatgctgagattacaggcatgagcctctgcacacagtcacgtttttgttgctgttgttagttttcaactgttcattgctagtaggtagaaatagaattgatttttgtgtgttggcctcaaatactttagttgttaccttgctaaattaacttactagttttaggagattttaatagacttcttgggaatttctacaaatacaatcatgttttctgcaaatacaaacagttttatttcttcctttccaacctgtatgaccaaagccctgactaggacttccaatacgatactgaacagaagcagtccgagtggaccttcttatttctgatcttagggaaaggattcagtctttcagcaagtgtgttagttactggctttttgcagattccattctatctataatgtgcttagactttttatcactaaatgtatgttgaatattttcaaaaagcttttcggtattgatggacttttctttattaggctgttaatatggtagattacattgaaccaagctttcattcccaggacaaaccccacttggtcctggtgggtcatttttttatatatagtactggatttgatttgctagcatattgctgagtatttttgcatctgtattcataagaaattttggtctgtagtttcccatttttgtactttctttgggttgtgtttgagggtgatgctggcctcattaaatgagttgggaagtgttctctcctctttttttttctggaagagattgtgtagaattggtattatttcttctttcaatgattggtggaattcaccaatgaaatcatctgggcctagaggttttcttttctattattattattttgtgtgtgggggataaggtctcgttctgtcacgcaggctggagtgcagtggtgcaatcatagctcactggagccttgaactcctgggctcaagtgatcctgcgtcagcctcccaagtagctgggaccacaggcatgtgccaacatgcccagctaattttttatttttatttttgtagagttgggggtctcactatattgcccaggctgatcttgaactcctggcctcaagtgattctccctcctcgcctcccaaagtgctagggttacaggtgtgagccactgtgccctaccaacgtttcttttttgaaagaaaaagaactatgaattcaatttctttagtgcttataggactgttcaggtcatctgttgcatcttgggtgatttttggtacatatcatttttgaggaattggttcatttaatctgttaagtttctttatgtagagtttcccttcaggccacgaaaccattaaaaggttgattaaaaggttaataagggaattcccatcttaaccttttaatggtttcagggcctgaagttatgtggctcccattcctcatgttggtaatttgtgtcttctgtttcttttttctttgttatccttgctagaagtttatctgttttatggctcttttttcaaagaagtcacttttggatacattgatttttctttactgtttttctgttttcagtttcactagttcttggtttcttctacttgcttctggcttttctctttttctagttgcttaaggtgaagctttagattattgatttgagacctttcctctttataatgtgtacatttaatgacgtacgttgcccttaagcattgctttagctgcatccccaaatttatatataatatatatatatttttttcttttttctttttttttttttgagacggagtttcgctctcgttgcccaggctggagtgcaatggcatgatcttggctcactgcaacctcagcctcccaggttcaagcaattctcctgcctcagcctcctgagtagctgggagtataggcatgcgccaccacgcccagctaattttttgtatttagtacagatggggtttcaccatgttggtcaggctggtttcgaactcctgacctcaagtgatccacccacctcggcttcccaaagtgctgagattacaggcatgagccaccacgcctgacctaaattttgatatatttttattttcatttagttcaaaatatttttaatgttccttaagacttcctctttgacttgtggattatttagaagtatagcacatattttccaaatagttggatatttttccattatctttctgttactgatttctagtttaagtccattacagtcaaaagacgcacttggtatatttcaattcttttaaatttgttaagttgtgttttgtggcccagaatgtggtttcttttcaggaatgttctggtgtacttgaaaagagtatatattctgcccaggcgcagtggctcacacctgtaatcccaacactttgggaggccaaggcaggagaatcactgcccaggagtttgagcccagcctgagcaacatagtgagaccccatctctacaaaaagttggaaaaaaaaaaatagctgggcatggtgttacatgcctttggtcccagctacacaggaggccgaggcgggaagatcgcctgaatctgggagtttgaggctgcagtgagctgtgatgatgccaccgcactccagcctgacagagcaagagtgtgtgtcctgctcgttttaggaaatgtctgttctgtaaattagatgaaggtgtttgatcgtgttgttcagttcttctatatccttgctggttttctcaccacttgttctgttactaagtgaggggttgaattttccaactataactgcctgtttctgctttcagtttttgcttcatatattttgaaagtctgttgtttggtacattcacatttataatgattgtgtcttattggtgaattgactcttattaacatttaatgctctggtaatgctctttgctcttaagtttactttgatattattatagctattttaatttctcggttggagtttgcatggtatttattgttctatccctttacttccaacctacctgtgtaattgtatttgaagcaagtttcttatacacagcatacagttggattatgtgtgttttttaaatccagcctgacaagctttgtaattggtatgtttagaccatttacatttaatgtaattattgatgtgcttgaatttaagcctaccattttactatgtgtttactattgttccctgagagttttattgctcaactttactgccttctttgaggttattttttcatattccattttaatttgtctcttaagtttttgaccataaatgtctttgcatagtttttttagtagtagttccagaaactacaatatacatacttccttttttacagtctacttaaagtcaacattttaacacttccagaagaatgtagagccacatccctgcctccacatcggttacttaccctctgcctttagagtgtagtcagtgtaatacctgtatttgttgtaaactccgttagacaaaatggtaatttttgctttcaacagtcaaaaatatttcagagaacttgagaagaaaggaactcaacttcattcatccaaatatttgccacttctgttgcttttcctgtattcccaatataccaagtctccttctgataccagtttctttctgtctgaaggacattctataggaattcttttagatcagatctgcttgcaacaaattaccttatttttcctcatctaagaatgtctttatcttccttcctgaaggatattttcattggattaggaattctgggttgacaactattttctttcagcactttaaaaatatgattcttggctggatgtggcagctcatgcctatagtcccagcactttgggaggccaaggtgggagtggatcacctgaggtcaagaatttgagaccagcctggccaacatggggaaaccctgtctctactaaaaatacaaaaattagccaggcatggtggcacacacctgtaatcccagctacttgggaggctgaggctggaggattgttttaacctgggaggtggaggttgcagtaagccgagatcatgccattgcactccagcctgggtgacagaatgagagtctgtctcaaaaaaatactactaataatataactccacttctttccggcctccattgtttccgtggagaaatcagtgggcgcaggaacccttgttcctctctgtgtgtcagtgattggattatgatgtgtctgggcttggacatcttttggtttgtcctgtttgggattctctcagcttctttagtttataggcttatgttttcaccaaattttgggtttttagccaaattttatcaaacgactttgtgcacctaagtgttatcttttcttctgtcactccagtagcatgaacgttagccctctgtgtgttgactttcctggtgatttttctctgctgttcagattttgggtcatttctgttgctctgtcttcaagttgtcacgttcgtttcttcatcgtcctgctcctgaaccaatccatgagattctttatttctgtatttttcagtttttaaattattgtttggttctgctttatatctgttatttctttgttgagactttctgtttttccatttatttccaagtgtttgccctttctttctttttctttttctttttcttttttttttttttttttttttttgagacagggtctcactccgtcacctaggctgaagtgcagggctgcagtcttggttcactgcaatctccacctcaagcgatcctcctacctcagcctcccaagtagctgggactacaagcactgaccaccacacctggctagtttttatcttttttgtagagacagggttttgccatgttgcccaggctgttctcaaacacccgagctcaagcagtctgcccgcctcagcctcccaaagtgtgcccttactttttggagcatttttataatagtgctttaaagtctttctcagataattccaataactgtgttgtctcagtgctgttgtattctttttctatatgagttgctatttttctggttttttcccgtgttgagtaactttgtattgtaccctggatatttttaatgttagggatgagattcttggtcttgttgacattctgtgaagatgttgaggtgtttgttttactgtgacttggttggcttaactctacaaagtctgaccctccttccctgggattggtctcattgtcattttatttgtagggcctttgccttgctgtctctacatgtcccacaagtgtactgaccagtggccagtctgaccacgtcagtggagcagataaaggacagcagtggaaaaattcacgaaattcagataaagtccgtggtttctttgaaaaaacaaacacaaggctctgagcagccaggagttaggctgggcactgcacggaaagccccgtcaccatgtggggcaggtgtttcacccccgtgggtggcgtcagcccctcctggaggagcccaggctggcgggttggcagccccgtcatcatgtggggcaggtgtttcacccccgtgggtggcgtcagcccctcctggaggagcccaggctggcgggttggcagcaggacgacacactcggcagaggctgccatggggcagtgttggccccacggcgtttgagcgccctttctccacatcagatcagtgtgttctgctatttcgcagctacttccctggcccctggttttctgaagtccattccagatggcaggtgatgagcctcagtgagactcttgtacgcatcccttgacctccggggtcacagccagtcactttcacagtagagaagagtgagggtcgtggagctggcagctgctcatctgaagcccctgctccttctctgccctccccagaccctcctgacctatgagccgagggctcggccggtgtcttcacagacccaccgtgtccagggcctcccgtgccatctgttcctggtgctgcagggacccccagcccaggctcatataacccagcctccctcccgccctctccatggtcacaatagaagaacagtgaggctgtgtttcctggggccatggcagtgcctgcatgcttaacaggggcctccagggaccctccaccctcaggccccaccttcccttcccacggagtcttccctcttgtaattggtcactcagccctgtggagggcgctgcccgctccaagctgccccagcccctgtgggcaaggtgtggacaggtgcccgctgctgtgttccctggtttgagaaacgcccccgaagatgggatttgggcacaggttttagacgtggacaggctgcctgaatccagcccaggctctgagtgctgaggcctgggccggtaacatgctcaagtctagaggatggggtaggagcacgttcttctgtggctgttctgggaggaatgaaaggacacccagctcccggccagggcaccagggcccacagaggacggcgggaatgcttagctcagcatggttggcttccacctgtcaaagctgcgttttccaagcattccaacaaagcgctcagtttcagaaagcacgcggccctgggtgggccctgggtgggcagggagcagcccacagtttcagaaagcaccaatcccaagagggtgtgcccagctctgacctccatgttcttcatcctccacaggtgaccccagggtttgaagaaaaggagggggagctgctggtgaggggaccctccgtgtttcgagaatactggaataaaccagaagaaactaagagtgcattcaccctggatggctggtttaagacaggtaggacccagccccatgggagtggaggagaccccgaggggacaggcaggaactcattgctgcccacgttgagtgacaccgaggctgggagttcccagaattttcagccaaaggcagaagatggggtggagtggggctgggggccactgttacggcactgcctcctgagcacccggcctccccaccggcttctagagtgggctccttggccctgtccctcagtgccaggggccccagtgccccatgacaaggcttctacactgtccctcagcgcgacagccgctccggcacgcacgcaccctgaccacagacgccgggccccacgcagcccttcctggtggccctgctgcccctcgtgggctggggcaccctccacctccgaggtgtacccctgtacccagagacctcaccacccccacgcttagccacacttgtgccctccacatccttctccccaccagagtcagaagtcagctgacgcagtgcggttggtttgcagtgcggctgtttgtttactgttccacaaattagcacattctctctgcctgccagaacaggcctgtgggtgagtgggaacctgcccacctgattgaggtggcccaggaagcctgtggcggtcaggagagacggcggcgcccctggagcctgctggcagcccccactgccaccctcctgctctccctgagcctgccctgagctgctgctgcctgacccccctcctttgtgagaagctggcttggtcccaggatcccacatcccgccccatggggcgtatttggacagtggatatttcgacatttggatagtggacgtatatggatggacatttggatagcggacgtatgtggatgtgttactagggggtccttgctcccagagctcccaagatggtagcgggcagcttccaaaatggcggcaggctgcttccaagatggtggcaagcgtcgtgttctctgacctggggttcttggccttatggattccaaggaatggaatcttgggccatgcggtaagtgttatagctctattagaagccgtgggccacagaaaagaaccatggaacccagtgactagtgttcagcttgattaggatgaacgtgggtgcttagccgtgcaggaacaatggcgagcctttaggccagtcgggagtggcagtgggtgcctcgctggatcaggagcacagtggacaccctgcgggatccggaggaatagaagtcagcggcgggtctgcaacggcggcaagcagcagtggtggacggcgagcgaaagctcaacttgagccgtaactaccacggaccagaagagagtgtagttgcaagatttaatagagtgaaaacagagctcccatacaaagggaggggacccagagagggcagccgttgccaggtttatatcccgatcattgtccctcctgctgtgctctgaggagatagatgattggctattgtttacctcctgttttagcctaattagcattttagtgagctcgctttactacctgactggtcgggtgtgagctaagttgcaagccccctgcttaaaggtggatgtggtcaccttcccagctaggcttagggattcttagtcggcctaggaaatccagctagtcctgtctctcagatggacatttggatagtggacgtatgtccatggatatttggatagcagacgtgcgtgggtggacatttggagagtggacacacgtggttgtgtggctgcaggtactcactgtagtgtatttatccggaagatgtgcacgttgctcctgacccctgggtggtgagattgcggtggtttttcttttcctggtttttttttttttttttttggcctgtctatattttatgctgaacatcattattttataataacctttaagtaatattttccaaaaaaaagaggcccattttcatgcatcagaatctgctggcccaaaatcagaaacgcatctgccccatgcccttccacagggagcagagcggggggctgcagcgtgcaggcgggatgggctccttgagggatgctggaaggggcaatgttggcctgcagcctctccgcctcatggcctgatcctgtgggtcccagaggccctggagcatgtgctgctgtgaggcaggtgtgctaggtgtgtggcagttccgcacgtttgcaaagtgaaggctccgtgagcccctagagcagaggccagtgccccacgcagcatctcataggcttcccaaggtaccctgggaggcaccttcgtgggctggacatcagcagaggacccagggctggggccctagaagcctctctgtgacaggacgtggtcagcacatcaaacactccctcccaatttatcttttttatacatccccattagcgcatgctgatctggggaaacagcctgtccatgacttcccttcaaatgcagaattacaggaaccggacttgagcaggtcttgctctgagcatccctccagtgccctctgaatgccccgaccccaatccgactcacgctgcagttgttttatttatttagttagttatttttgagacggagtctcgctctgtcgcccagtctgcagtgcagtggcacgatctcagctcactgcaacctctgcctctcgggttcaagcaattctcctgcctcagcctcccaagtagctgggattacaggcgcccgccaccacgcccggctaatttttgtatttttagtaaagacagggttttgccatgttggccaggctggtctcgagctcctggcctcaggtgatccgcccgcctcggcctcccacagtgctgggattgcaggcgtcagccactgcgtctggccggttcttgtatttttaaattcaggtaaaagctgaagacgttttcttctttgaaagcacaggaaccacagccctgtggattttgcgagtcgcggggctcccggagccgctgggagggcagccgtgtgagatgcggggctgcgagcgtggaaacactcgcagtcgccagtgctgaggcatgtttcagccggggcggaatcacatgcattaattattgtacagagatgtctttagtagaaaatgattttgaaattcagtttaatttcattgtaatgtgctgcaaacaggaagggagtatgtgtgtttaattggctctcgggggtaaggcctggaagccgcatgtctttgtcacaggccattagcgatgctgctgcataatgagagcctgcaatcagctcacagctgccgctcctgccgggagagcatgatattaaatagaaatcaggagaaattaaacttaaccctttccctggccagcccctcctgccacacggattctggcataagccggcgggcacaggggacagccagggatggctggacacagctgaggatggccgaggccggcctgcagctccccaacggcctcctccgggtcaggatgagaggagaggttgccagctttgatgccagccgctcctgcctcccccacctgcctctgtgcctacagcccgcttctgcctcaagatcacacagcgggcttgtgaggccaggggtctccgctgctgctcaaggagatggcaaaggtctgtttcaggtaactcctctgacggccacaacgatgtcttcagacgtcaaaggtctgtctcaggtaactcctctgacggccacaacgatgtcttcagacgtcaaaggtctgtctcaggtaactcctctgacggccacaatgatctctgcagatgctctgactccacgtgccctcgctcagagacacacgcgcacatttgccacctggggcgagtggaaggtgacgtggaggtgggcacctctgccgggcagatgcgggagcagcagcagcagcagcccctcctgggggcatccaggggtcaggagaggggcggtagggcagggcggcatccctgcaggggtgaatggcgtcttaggctccagccgggtgaggaaacctgataaccgaactccttagagaagagccagggatcccgggaggaccaccaggagcttgtggggaaggactgaggggaagagccccaggtctcgggaggaccaccaggagctcacggggaaggattgaggggaagagccccgggtctcgggaggaccaccaggagctcacggggaaggattgaggggaagagccccaggtcccgggaggaccaccaggagctcacggggaaggattgaggggaagagccccaggtctcgggaggaccaccaggagctcacggggaaagattgaggggaagagccccaggtctcgggaggaccaccaggagctcacggggaaagattgaggggaagagccccaggtctcgggaggaccaccaggagctcgtggggaaggattgaggggaagagccccaggtcccgggaggaccaccaggagctcacggggaaggactgaggggaagagccccaggtcccaggaggaccaccaggagctcacagggaaggatggggagaggggagtggggggctggagaacccccagactgagaaattctgctcggagcgagaagggagctgggcccaggtggccccatcccccaaggttgaacatcagcccagcctcccaggccctccacgtgctcatgggcaccactgccgggcactagcttacttgtcaccctgtctgaggcgtgttggggtaggagcaagagtccgctgcttccagggcccagctggggctccatgtgtccctgggcaccccagaaccctctgggtctcagccgttgggttcttacatctgggccagtggcaaagggttaaagggaccttgtgacttagttgggactcactggcctcaagaagcgaaaatcagagggacagcagccccagccgccggggattccctgtggcgccagagctccccggcaggcactgtggaggccaagtggggaccggcagtgtcgtggtcccggcccacagcctctcagcctcccacagcctctccctgtggtaacgaggtggacgctgagccccaggcctgatggcacatttgaggtcaggtgggggcacctgggctgttcctgtagctgtcccctcgtccaggggagggaccttttcagaagccctggggcctttgtctcattgaccaaaaccctcctggccatgctgccttcacaggacactgggcatctctgtggggcaagggaaggaacacaggcctcctggtggggccccaagacccaaccaaggctcgtctggctggtgccagcctctgcgccaagggtgccgaccaaggtcagagccgatcgcggggatgacaggtgccgaaatggccatgcttgccccagcccctttcatccggcagagggacctcgctgggcctgccacgctcagccaggctgtgctgtgaagcccctctcttcccttctcagagccatatgtccacgctgacagctcctgagagggaccatgttttgctgcctgcaggtgccaagctgactgatgggccatgctgaggagggtgccccagccctcctgcaagatgcccttctgtgcagcctgcagggccaccaggcccacgaggcggccatggtcttcagatgtgtcttagcctgggttccctagaaaacacatgaggactctgggcagaggctgagtgtttttacatttttatttttaagccaaagttacacacctgtggcttaaacacccaagtagttgtagcagtttgagaagaagaatcacagccgtgccccttccccagactcgccggctgctgcttctgtgcggtccccgcatcccgagggccgccagcaccgccacctccaggctcctttttgctgccatggcttgagtcccgcagaggaggcccctcctcaggcacggcccggctcagtcccgtatggcatctgcactattgagactatggagtcgccgctgagaactgagcccaggagacactgaggtttttcctctttctttgttttccagagtcgggaaagtcttggttttcttggtctcctggtgccaattcctcgtgggctgggctggtctccccatggcgcctccttccccatcaccaccaccccttccctcctaccgggtcaggacgtcggctcccagcccacagcatcctcgtcttccctcttccgcccccagctgtggggactgctttcccctggggcttcctgaggcgggtgtgtagggtccgtacttggagacttgcgtgtctctccgggtcttcgttctgccctcagccttgcttgtcggtttggctgcgtatagggttcagggttagaagtcgcttctctatcattttctggccttcagatttgctgctgccacagccgtgctgaatcctggcacttggtgaccccctcctttttttttctgtttttttttttttttttttcgagacagagtcttgctctgtcgccagactggagtgcagtggcgccatctcggctcagtgcaacctccgccttccgggttcaagcaattctcctgcttcagcctcccgagagtagctgggattacaggcgcccaccaccacacctggctgatttttgtatttttagtagagacggggtttcaccatgttggccaggatggtctcgatctcctgacctcgtgatctccccacctcagcgtcccaaagtgctggaattacaggcatgagccaccgcacccaaccatgaccccctctttttaacgtacagggtgtcctctgtccccagacccctgagcccaggttgaggagccaccagctgaggacggagccaaggtcacggagctgccgggtgagcgctgagcccaggtcagggagttgggtctcaggccgtcactgggactccctctgccttcaagaagcctctttcacccttggcccacagaggagacctggatggcactggggtccaggtgcagaagcctccagtgtccacgggcacctgagcttccagcaccttccctcctgctgggcggtggcctgtgcctggccgcaatggaggccgccttccccactgcccctctgagcctcagtctgtcctccctgcagccacctcccctggccaggtgccccggggtaactggtggaggctttcacgtaacttggtttccagctgcctctgtacacacacaggcacctgttccaggcttggcctctctgtacacacacacgggcacctgttccaggcttggaggctgagaacttgggggcagagatctcagggcatcggcttgggcggggtccttgggcagggccttgggcttccctcggcactttcctcaaggactggggccaagcttcacattctgttgctggcatcagtgccatttgggagcaaaagtccgacaggctgggtctgggcctctcttcaccttgtttcctgggatcgcgctttgggtgctggtgtcactccagatccaggctcgggaaccacatctgcacagcagaacaggcgctgttcttatcttgcgtgcgggtcaggacatccccccggccaggagtgcttcctccgaggcccacagacaagttctcgctgggggactggggaccacagcacctcactccacctacactctagagaattcaaatctgagtattggaagatttattttcagttacagtggaaggcagagacatgaaatagcaccaaattcaaaagcagctcataaatccaggtaataggagtttattgattgctacattgtatctgtcagaagaaaactcctttaatgaacacatcaggccgaggacatacacagcccattggcagccgactccgattccagaatcgatgcattttgataaataggttgttatggaaagtaaaggttatttaacttgtttgacttgcatttcacagtgatcgcaagttgccctggagccctctgaaccttctgagtcgccctcgctgccgcaggacctcctcccgcggggtgtccgacccgctcttgcttggctgagactttgtttaaaccctggctccgatgcctctgagcccttgatagcagcgtcccagcctggaagaacaaaaccagccacttttccccttggcaaaggcacagcaaggcgggtgaggcgggcgctgagtagtctgggaatgggcagggagatgtcgaccctcggagctgagactgctctgtgctgagaagctagaacaaagcctgacatgttccaaggggcaagctcagggctgggagggaagcagcggggccgcccctttgggtgggggtgcccaggccttgcagacaagacactggccagaggaggtggagcaggggtactggggcagaggggccatgtttgtgcagcaggatggaccctggagggccccggcctagagggggcctttgccaggaagatgccaggaacgtccaggccaaggcgtccgggcaaaggcatccaggcccgggagacgcatgtgggacttgggctttcctctgtgggcagtgggaagtctctccctacccctggaaggagctccaggcagcagtgaggatggggattctgacactggagtggggagccggccctgtggtgctggctgggctgagagcggcaccaccttctgatgcccagggtgggaaggacacacgactgccaccatgcactgagggccctgcacgccacacacgtgctctgagcactgagggtcccctcatgccacgcacaagttctgggcacagaagcacctctcagaatcatccccgagacaggcgtccatcacagagacaggtctcagtcctgcactgattggcttcgcccagtgctgctgggggagtctcagacacagcctttttccgacaggtatagctgccactttctccggcacagaagcctggggccctgggaatggcaccatgttgcgcgccgacccctacggttcttccctccgcatggctcagtggaaaccgtgcgtgcagcacagcaggcagctggggcctgtgacgaccctggggttggaggccaggcagggctatcactgagaagcagggatttggggcctggggcccagggaatggacaactccccaagctgcccccaccagtccttcctgagcactggctctggaagaagcatctcggggcagaggcagccaggcccaggcagggagagacccccaaacaaggcctacagcagggtctcagggcctgaccatgccagaaacagcccagagccagagaggatgggcagatactcagtgccaccactcctgggagatctcagcaccagggcttcgacctctggggatacacacccacacctgctgagatataacacatctgcagagacacagccacgcctgcagagacatacccacacctgcagacacacccacacctgcagacacacccacacctgcagacacacccacacctgcagagacacagccacacctgcagacacacccacacctgcagacacctacacctgcaggcacacccacacctgcagacagagccacacctgcagagacaccctcacctgcagagatacaggcacacctgcagagacacagccacacctatagacacacccacacctgcagagacacacccacacctacagagacacccacacctgcagacacacccacacctgcagacacacccacacctaaggagacggggtctcgcagtgggcggagaggttgggtcttgcatctaatcagccattgatgggcctctcctgtgaagggcactcattccttgtattcataaattaagctcatgtgagtttgttctttaacaagttattgcgcgatcataatccattgccgacgttggcgtgactcaccatgtcatgagcccactcggggctggtgctgctggagatggggaagaaaattgctccataaaccaaaaagcaacattttaaaacttataaaaaagattcgcaggaaattagaaataacacacaggggttccttgtgccgtccccccagtttctcccagcatcagcctggtgtgtaacggtggtacatcctcagtgccgtgcgtagctttggtgcagtctcagccccgtgcgtagctgtggtgcagcctcagccccgtgagtaactgtggtgcatccttggagccaggacacaggcagctcaagagggtgccggggacttgtcagccttgggggcaggcagtgatggcctctccggcaggaccagagcagggcagtggctccatgctgcgctgggtctctgggtggtgcaggccagggtggagccaggccagaagctgtatggagggccctgagcacctggcagcctccctggtgtcagcagctgtggcatccgtggggcaggagcagcctggacggggtggctcggtgcgattaagagatgctattggaagattggtggctgtctggtccagaggggacacacaagccaggctgcacagcaggagcaggagccatggcgggtcccacgggacttgggacaggctgtgtccaaccccgcccacagcccaacctgcacacccccttccagccgcccagactaccccaggggcgcagtgagaccactctcctgtcggggagcctctggtttttctgctacccatcagcacagagttccagagttccagagctccataaataagcctggagcccacctgggcacacccatccgtcttgtttaatagactgaggagcacgccatgggtctcaaggagtggtgaggtggatggatggggcctttctgcgtccaacagcatgatgtataatgaagtatttatgatttattccagctaataacccatgtggagtgcagggtatgtggaagcagacagttgaggcctcagcactgcccttacatgccctgcatgctcccacagccacggcacacatgtgtgcgtgcacatgctcacagtcacgcataccgcgccctcccagctgcacacacgctcgcaggcacgcacactatgggcccatgcgtcatgagacagcttcgggctgggagtacaggctctgaggctgcagcccgctcttcccgactccccaccctcagtggctggtggtgtctgtgttgagctactcgagaaaggaagaaaacgaaggaagcttggttcccacaggagctccaggaactgcacggggaggagcaagggccacgtcgtggctttgccttaggaaggaaaacgtggggcagccccggccattgttctaggaccagcatggtcaggtgtggagggcacaagatgggcaccagcaggaggctccaggcacccaggaaaggccctgtcctcctcagccaccagcccctccctgtggcctctgcgtgggccttggtgcctctcccatccagaggggctgggcattcactgctggagcccaccgtggtgggatgttgtaatgtgtctggttcacttcttttactgaatatttggcctggattcttttgtgggcctgagagaaatggcaggacagggcctggtgggcctcggcccctctcccagagcagcctgcctgcatgaggggcggcccctctatgctgcagtcccaggggctccgtctgggggcccttgcagcagtagcagcacagccaggaggcccagcacaccctggcacccatcctgagggagggtaaagcatcagaccctgtgcttgttgctcagaaaaggccacgcatcccacccatggccagtggttatcaatcactgtcacagaaacagggcctgagccggcttcctaatgcagggtgtctgcagaccacaggcccagcagggcttctggcacctcctgctcctggcaggctctggacccactgctgacctgcccctggaggaagtgcatacagctgagcatggggaagggaccccacaggaagggcagaccccacatcatgggcacagtcccaccttgggacgcacgtcgtgaccaccaggaatgtgggcttacctggcatagctgtttctccgttggggttgccacagggtagtaaccagagccccctttcctcagaggacaccgtggtgtttaaggacggccagttaaccagagccccttttcctcaggggacaccgtggtgtttaaggatggccagttaaccagagccccttttcctcaggggacaccgtggtgtttaaggatggccagtactggatccgaggccggacctcagtggacatcatcaagactggaggctacaaggtcagcgccctggaggtggagtggcacctgctggcccaccccagcatcacaggtgcgtggccggacttgggccagggaggccaggctagacgggtgctgccttccatgtttgagttttagacgactgcagatgagtcgacgccgtcccagctgcctgcaggggtccctgtgatgctcacctctggtccctgccctggccagggaacatggggctagtgggggtgcagcctgctcggtgttggagccactgaccccgtgcccaccagagctcccaggcctggccgggcgcagctcccatctgcatgattcccctgcaggaaggtggcagggagagtgcagagagccaaggggcgggaaggcagagcccctgtgagtgcccagtccccagatccaccgtggggagcccgtcctcactcccctccccacaggcccagccagcaccaggacgagtgattggagtggggcctgtccaaggacgggctccagggctgcggccagactgcgctcttcctgtgtgtccaggcactcttcggcctgtaagggtcactgaggcatccccatgttctcaaactgttcttctatccgcagatgtggctgtgattggagttccggatatgacatggggccagcgggtcactgctgtggtgaccctccgagaaggacactcactgtcccacagggagctcaaagagtgg

SEQ ID NO: 15364 - DNA, 62382 bp, Homo sapiens; identical to SEQ ID NO: 15357

SEQ ID NO: 15365 - DNA, 63460 bp, Homo sapiens
ctcggccgcctgtcagtgcaatgctgccccatgtggtgctcaccttccggcgcctgggctgcgccttggcgtcctgccggctggcgcctgcgagacacagaggaagtggtcttctgcacacagccccagtggcccgctcggacaggagcgccccggtgttcacccgtgccctggcctttggggacagaatcgccctggttgaccagcacggccgccacacgtacagggagctttattcccgcagccttcgcctgtcccaggagatctgcaggctctgcgggtgtgtcggcggggacctccgggaggagagggtctccttcctatgcgctaacgatgcctcctacgtcgtggcccagtgggcgtcatggatgagtggcggtgtggcagtccccctctacaggaagcatcccgcggcccagctggagtatgtcatctgcgactcccagagctctgtggtccttgccagccaggagtacctggagctcctgagcccggtggtcaggaagctgggggtcccgctgctgccgctcacaccagccatctacactggagcagtagaggaaccggcagaggtcccggtcccagagcagggatggaggaacaagggcgccatgatcatctacaccagtgggaccacggggaggcccaagggcgtgctgagcacgcaccaaaacatcagggctgtggtgagtgccgcctggcgccgtgatggtttcggtgaccgcacagcactccgggtgggctccgggccagaagcacatcttttcattcgcttttctgtggagtcattcacagttgtcaccatcctgcagacccgtgtgagatacagggacgcaggccctcggggtgtggccgctggcctcactggccacgcaggacggctctgggagcgtccaggtgtagagggattgaggggccgccgagtgaccctgccaggaccatgcggcatgaggtcagaagggaccactcactgcctgtgatgctgaggggcttttcggaggccagccacgtgttaggatgcgtggtcaggaccccacatacacccgggtcttactcgttttttgtgtgtcctgtgacctcagtcacatcttcacagaactctccaaccacatcacttacctggcatttgtacagtgtcataacgtctcctatgcacttgaagcaatcaagtaaaaatgaaaaccaaaagccaggaaggggaaggcaggaagtgtaccccacggagtcgtgggctgacgaggcgccatgagcacacagcaggctgggccctgggtggcctgcgccgtcactcctggaagcggcgcgcctgtcgggagggacgggctctggactcctctgtccttgctgaggggagtgacatgcacatgtgcttctccctggagcctgtgcaggcagcaggcagtgtcctccgtgagattggacagaggattcagtgggccgtgcctcacgctgcttctcagtaagagctgagggtgtgctctggagcctggcctgggttctgtcccggctgagcaggtgacgataattcacgaatcggcagagctctgtgtgggcagtgctgtcacctgagccagtggttgggctgggagtcgattccagcctgaatggcgctgggtccctgagtcccaggcttgggcaggggcggagctctgtcgacctggtgtctgcagagccactccccgaccttctaaattccctaaagcctctggctgtgtgtggcgctgtcctctgtccccagggtaagtgagtgacccagcagatctgctgtggttttgtcgtcatcttgagaggctgctaaaggggagcaacaaagagccagccttctccttccccttcctcagtggggaggcccagagctcctttccgtgagcccgaggtctgtgtgtgctgttgcgggccacagtcttgctcttgctctcagctgtgctctcgtcccctgcaggtgaccgggctggtccacaagtgggcatggaccaaagacgacgtgatcctccacgtgctcccgctgcaccacgtccatggtgtggtcaacgcgctgctctgtcctctctgggtgggagccacctgtgtgatgatgcctgagttcagccctcagcaggtgagttggggtcagggctctcggttgcaccctcagactaggcgcctttcccctgtcggggccagggctctcagccgcgccctcagcctaagcgcctttcgctggttggggtcagggctctcggccgcgccctcagactaggcatcttttcctggtgtgcagtcgcccctatccacaggggacgtgccaatgccgagaccctgggtagcatggaaccctgtacctacgatgctttttgctatacatacgtacctatgataaagcttaatttataagttaggcacagtaagaggttaacaataacagaacagttataaccatgtactgtaatcaagttatgtgaaagtgctctctctcttcaaaataccttccggtactgtgctcgtctgttgtgagactgcagtgggccacgcgtcattgaaaccgtgaatagtgagactggatgagcggaggtgactgtacaggccctgctgcccgcgagctcctgcggctgcggcgaatgctcacgcgcttggtttaaaataatgcgagtttgttcttacatgcttggaggccaggattctgagacgagtcttgcggagctgatgctgggtgtggtagggctgctccgtcaggaggctccagggcaaagtccgttcctgcctcttgcagctctggaggccgcctgtgcccttggctccagctgcttcacgtccagctctgcttctgcaggcacacggccttctctccgtagtcagggctccctcggcttccctttgtgcagcctatgcggatattccaagatcatctcccatcttgaggtccttcgcttcatccacctgcagttcccaccactgcgagaggtgacacattcggggtgtagggcgtagggcgtgaccctttgagctatgatgtggccactgtggcagccctcggttactccagagtactggcccagctggagagctgcttgctgcggagggttactttggagtattggcccagctgaagggctgctgtggagtctctgtctcccctctctgcatggcttcctctgtagcgtctcccttggagcaggcagggagggaaggacgcggtgctggtcacacagagcgctggggtgggagcagtcatcgccgagctgctgcgcgcagccttgcctgtgcagggctgtctccaggcagatcagggatgctgctttggagggaaaggacctgggctcgaggcgggaccctgtgcacagcatcgggcctcgcctgtcagttggggatggcggtggcttttaggagttgctgtggccctgtgtgcattctagctgactgcaggcaagagtcactcaccaggctgcagagggcatgaggggcaggccttgagcccacaggaaggacacggtgtgcgtatgtcacaggtgtggtgaagcagagccctccggtgaggccatggacgtttaccagcctctgcccgtataatgaatatgccttttattcacaggaaaaaaagtttaacacgtgaatgtatggaaaagcccttagaatttggatcgtatcatgatggttctcagcacagaggagcccatctctgaggccagatgcctgggactgggctcttggtctgtgcggggttgttctgcagggcagacgtcccggccagcagaggcacagccctaaagcccagagcacagcagccaccagtggccggccccacactcaccgctcttgccaggactcttcctgtctgaagtctttctggccccatcgaaggctgtgtggagctctgaggcctctgaccgggagctcaggacccaaaccctagtcaggtgtgaatttcgccaggaaggggtccctgcaagcagtcagccctgcccaccttccctctgcttctcctgccgctgagaggcccatcctcttctctgcagggcatccagccccacacggtggctggaggtggagagaaggcagcttttctggccctccacctctctgaccttcagtctcatccccggaaaataaggttggaggccggctcacagtgggcacaaacttggaaaagagaaggggctcttctctagcctccactggaggcaaggtctcacaagagaagccagtatgtagaacagctttgtacgagcaagtgagcctgtttcttcacagatgataacattgggctttagagaaagacctctttaaaatctagcagttactaccgtgccaaagagaggtggctgccagcacacttgcgtgattagccgtcagctccctccactgctcttcaggacgcctgtagccacagagcctccctgagggccccgtcgccagggtcacctcctgaagagcctccctgagggccccgtcgccagggtcaccccctgaagagcctccctgagggccccgtctccctaacacattccacattcttgttggcttcagtccttatttttcacagacatctcagccctgaccccagctgcgacacagcagtctgttaagatggcagacactgcggctgcctcatctgcgtggtccatcccggagacatctgcctggcgctctgctccaggccttcctggctcccctggtagggatctggctcagtgacccgaccctccttgcggctctctctggggtgcgccctgcatggacacagctgtccttggtgaacgtctgctgagtcaaagtggttttgctgcagtgagttccccgtgagtgcactgtgtgggtggtgcagcgcctggtgtgtagggaacttccatgcctttgctgtgtctctgggggctcctctgacggggcagctccctcctctccgccttaagctcctcctttcctttggcggtcagctctgtccagggtgtcagtttctgtgcctgtgactgggccccctcaacctgccccaccttggcctctgctccttggcagcctggccctgaacctctgttgggggctgcccgggcgctgacggtggctggtctaccatggtcacttgggcagaggcagcaacggccattgtcgtggaccgtgccagggcgagatgcagctggcaggggcagaggcagaacatctcccagggagctgagggcaggttggttccatcgtcccggagggcaggttggttccatcctcccaagtaaagagtgtgttaccctcagggcgagaggcaggtgggtgtgggtgctggcgcaggccagctgtcaaggatctgggctttctggtcttgctgcttctccagcactgcatgaatgacaccacctggccctttccagtgcccacaggcacacggcttgggagctgctgctgcggcgtctctgcccaggggcatctgccagggggtccctgccttggggtctgtgtcccaagggcgtctgcccagggatttctgctccgagagtgtctaccctggggtctctgcctggggatctgctgtcatcttccagacactgcagactggctcattaatggacacgggaaagcctcagaccttcaacggacacgggaaagcctcagaccttcaccgtttttgacacttacttgggatttttctttaaactatgctgtgaaaacttaattttttttttttttgagatggagtctcgcactgttagccgggctggagtgcagtggcacgatctcggctcactgcaacctccgcctcctgggttcaagcgattctcctgcctcagcctcctgagtagctgggattacaggcacctgccaccacagccagctaattttttgtatttttagtagagacggggtttcactatgttggccaggctggtctagaactccggacctcatgatccacctgcctcagcctcccaaagtgctgggattacagacgtaagccactatgcccagctgaaaacttaatatttaaacaaatttgatgctgtggctacaaaggattgcaactcttttccataaactccaagtttcagggttttccaactttaggaatttctatgtgtaaaatccagctgtcagcgttattgaactttgggattttgtctaagattgtgtggaagaatgtgtaggatacaagtgtggggtgaccagacacctgcggtggtgctgaacgatctcagacgcggtgtcttcaagtcatcctgcacagagggccgtgggtgtcagtgcctgcaggtgacggatggggttgggggagaggaggaggatgccggaagatggatgtgcagccacagcctctggagatcaaagtcaccactgacgagacagccagaggctcagatcagtcactcgtctccaacagcactgccctggccgacttcctcaggatcgcagcatggactcaggagggctgccatctggcagggtctgtgctgtggcagctcaggttagagcaacaggcctgctcctgccacctcagaagcacttgctagttagtcaaatgttatggcgcccttcagggggcctccaggtctttcacgtcttggaagtgtggcaacacattgggatgtgctggaggaagaaggtcaccctcggctctcagtgcccttctttagggcagcagctgccctctgaagatttggatgaattccaagaaagaccgtccttcgtgtctttcacctccgcgcctgctccctgcccctcagccttgtcccgttgcgtgcatgctgtccccgcctcagcaccatcctgctacacgcatgctctccccacctcggcaccatcctgctacacgcgtgctctccccgcctcggcaccatcctgctacacgcgtgctccgttttccgtgcctcagtgtcacgtttgtgtttctggttcactgtgctgttgatctgtgtgttacatcaaatgcagtttgttctttttacgttgctgtgttgtatttcctggtgtgcagaagccacagtgcgcttatccattctgctcttgaaggacttgagattgttttcagtttgtggctattagaagtcacggttgctatgaacattctcacacagatgtccctgtggacagttcccttggatccgcaactcccagtgccggctcacaggctagatgtatgtttcatttcagtggaaactgcggaagagttctcaaacgtggctgcatgtttcacacaccccagccccaaatgtggctgcatgtttcatacgcccccagccccattctgctggtaccaatttactgtattagtccgtgtgcacactactgataaagacatacccaagacagggaagaaaaagaggtttaattggactcgcagttccacatggctggggaggcctcagaatcatggtgggaggcaaaaggcacttcttacatggcggtggcaagagaaaatgaggaagaagcaaaagcggaaacccttgataaacccatcagatctcatgagacttattcactatcatgagaatagcacaggaaagaccggcccccataattcaattacctccccctgggcacctcccacaacacgtgggaattctgggagatacagttcaagttgagatttgggtggggatgccatcaaaccatatcaggagtccttaaatttgttaaattccccacatgtctcctcttctggtgccttcatttgtccctacagaggttctccgcgaagcactgtgcttcccccaacttgtttcccttcagcctggagaacttcttttcaatagttcttgtagtgcagctttgctgacaacaaatccctcaattttgtttcactgaaaatgtttttattgcaccttcccttttcaaaaacagctctatcgagatacagttcacacaccgcaaaattcattattgtaaattttgaattaagtagccattacctcaaaccagtgtccatttccccccattcccagcccctggcaaccacgaatctgctttctgcctctaggatttccttgtttgagatggcagcgtgtgcaaatggggcgtgtcacactcagtcttttattccagcttctttcacttgcaggatggttctgagtttcatccatgttctactgtgtgtattaataacttgttcctgaatagtacttcatcatatggatataccacattttcctcatccattcaccatctgatgggcatttggactgtttcagtttggagctattatgaataatgctgctatgaacatttacatataaatctctgtagacattcattcatcttacatagacacagagggatagaattgatgggttgtatggtgactttctgtttaatgttttaagaaactgtcaaactggccgggcacggtggctcacacctgaaatcctagcactttgggaggccgaggcaggtggatcacttgaggtcaggagtttgagaccagcctgaccaacagggtgaaaccctgtctatactaaaaatacaaaattagccaggcaccgtggttcacacctgtaatcccagctactcgggaggctgaggtaggagaattgcttgaacccagggggcggcgattgcagtgagccaagatcacaccactgcactccagcctgggcaacagagcaagactgtctcaaaaaaaaaaaaaaaaaaaaagaaaagaaaagaaactggcaaactgttttccaaaatggctgtgttgctgtacgttctcatcagcagcgtatgagagttttcatttctttacgtcctgccaacacttgtcactggcttcagtttgcgtttccctaatgactactgatgttaagcttttttttttttttttttttttttttgagatggagtctcactctgtcgctcaggctggagtgcagtggctcagtctcggctcactgcaatctccgcctcctgggttcaagcgcttctcctgcctcagccatctcagcagctgggattacaggcgcacagctccaggtccagctaattttttgtatttttatagagaccaggtttcaccgtgttggccaggctggtcttgaactcctgacctcaagtaacctgcctgcctcagcctcccaaaatgctgtgattatagccgtgagcccgccgcacccggccagatgttgagcattttttgtgtttatttttacttttttccttttaaattatttttgcagaaacagagcctccctatgttgcccaggctggcctcacactcctgagctcaagggatcctcccgcctcagcctcccaaagtgccgggattacgggcatgagcactgcacccagtgctgttttttacgttcttgtttgcatccgtatgtaatctttggtgaactgtctaatgaaatctttggccatttttaaattgggctgtttgtcttcttactgagttgtaagagttctatgtgtattccggatacgagtctcttttcagatgtacggtttacaaatatttcctccaactgcagcttgtctttttattttcttaatgtgtcttttggagcacacattaattttgatgaaattcattttataaaaaaaattttaaaaataaattcattttatcaatttttaaactttatagattgtgcttttggtatctcatctgagaagtctttgccaaaccacaggtcatgtcatgaagatattcccttttgttttttcttagaagttttctagttttagctcatacgtggaggtttctgacccactttgggttaattttgcatatggtgtgaggtagggtctaggagtcaccttctgcatggagatattcagtgtgtcagtgccatttgtgagaaagattatccttttgtccttttccctattggggacttggtttctttgccaagaatcacttgaccagatatctgtgcattcgtttatttctggactctccattgtgttttgtgggtctcttgtctaatcttacacagcatcacactgtgttcgttacttctggtttacgtcagttttggagttgggaactgtgtgttctcacctttaatctgccttttgaaatttattttggatcttctgggtcctttgccttttcgtgtaaaacgtaggataagtgtatcaatttctgcaaaataaagcttgccggaattttgggaagattgctttgaagctggagctcagtgtgggaagaactgccatcttcacaacatggagtgttcccgtctgcgagcctggcctctctccacccgcttatctgttcccctccctccctcgatggcagtgttgtgggtgctgctccgcggtgctgctgtctcccgcactctggtcgcctgtgtctttgctttcccgtctgtgggtcagcctagatcacccccgttgactgtgtctgacttttttcctcttttctgctgcgtcttgtttgttattaggtctattgaatgaattcattttggatcttgtgtttttcagttttatgattttttgcagttccacttctctttgcaattctccatcttccccacgttgttcatcttttctttgaaattccttaatctgcttattgcagtgatttgaagggccttgtctggtgattcggacgtttggatttcctgagacttcttcccttcagttggggatcacatctttgtgtccttacatgctttgtgactttgaagggttccagtctttgtctttgaaagaatgatattatttcttccccggagattcctgcctttctctgccaggcagctgcggtgaggcactcgtcactgcagtccagtgaggagatgagatgggctggggctggactgtggcatcggcatccgtcgaccccagtttcaacgccgtgtgggcgagatctgtcctgtgtgtcctgggcctcccttaggtgctgaccccacagcacgaagagtgccctcctccctccgccacacccttcggtgctccgtgtggaacaccgcgggtagagagggccatggaaggaatgcggctcaccagctcttcctgaagctttatgggcgacgcgagaacccgctaacgagtgaggaacttaaaacgtatttatatgtaagcaagaaatgtttattatggagtaaaatataaaattcacatgactcttttaaataaaagacttcacccgttcgctagtcactgcatgcctgtccatactgggaagcatgctgacttcaggtctgcgggcagccaggccctcctgccagcttccccaaggtgtacatccgccctctctgtgtagctggaagagcctgaccactcacgtctctccaggccacagatcccgaagcccttttctagctctgttcacgattgctcttcccctcacaggccagacgcagctgtcccgcgcaacatggcttctgtgggaaggggtcagagtttgaggcaccccttttagaagggaggcgctgcagactcttgaatgtgaaccatgagaacgctgtgcctggagccaggagcctccgccacgggccccagtgcctgctcatcttcctaccgagtgcttcctttccttcgtaggtttgggaaaagttcttaagttctgaaacgccgcggatcaatgtctttatggcagtgcctacaatatacaccaagctgatggagtactacgacaggcattttacccagccgcacgcccaggatttcttgcgtgcagtttgtgaagaaaaaattaggtaagtgaaaagagcccactttctcgttcagaaagtcttaaagatcaacagatacgacttatttctaataaatcactcctactaagttctgggaagcagtgctttccatttcctttcaatgttccctctctctctacccgtctccgtctctacctctctaactgtctctctctctctctacccgtctgtatgtatatctgtaatctcttccacgtcgatagctgcctggattctgtatcgctctctctgtcacactctgtctctctatctctctctgtctctctttgtctctctctctccatctctccatctatctgtcttctctgtctctcttgtcagactctccatctctgtcttctctctgtctctctccatcgctcttcatctgtctctccgtcttctctttctctatctctcctgtctctccatctgtctctatctctccatctgtctttgtctccgtctgtctgtctgctctctctcctgtccgtctctctctctctctgtcatggcgtctgaaggacaagggtgaggacagtgagctgacccgcttgctcctgcttcatctgcccacatgtcccacggcgcctgcctctcctatgcagtctctctgccttcgtgggcagccctgtgaggcctcctgcctggggcacgttctgctgcttttcctctcagccccgctcctcccctcccagctccctggataaacccctccctcccaggacaagctggtcttttgggccacccaggggcgtgtttgctctgcactctcccatgaacctgcaggcgtgggaacgtttcttttccctcgtggctgttgaggtgtggttcactaactggaaacgcacacgtgtggctcagtgagtcttcacacgcatcacaggcccgcacctccagcagagtcgtgggtggggtattttttctttttgtgagagggaggggtggcgtggagggtgcactgcaggaactgaaggctccactgccatccagtttccagtgggatgtgtgtgtctgtggctgccgcgcgctcctcccagtccccaggaagtgcacagggaagcggcacctttgttcctggagagaattccgggttgtccaaggcacatgtctgaaccgcttcgctctctttgccgttcccttgccccttttctgtgaggccaccggagcccatggttttgctgctgctactgctgggataccctggggctgggcaggccccaagctgagcagggtgagcacaacgttttaccaaatctaaggaaccaagggcaagaacgaggtcagtgaaggagaggatcaggtgatttctggggtgacagaggcaatgagacctcggccatctggatctcccagcgggggtcctgtcagtggtgcctcctcgtaaagcaggggcagcagcagggaccactccgctcagaccgcaaacaaaagcgccttccctactgcccgtgaggctgcgggaaatgctgtgtgagagcgcggggactcggagttctcagggcccgtgttctcctgccaagcctgagctgaccctgtgggccaagatggctgcagttctgcgggtggttctgagccccttgggtgtgcccggccccaccccttgggtgccgcggccattcacccatgtccgcgttctgctgcagagcctgcaagctgagccggctgtagtccccggatgtgcctggccgcagcctgcagcgccgtggctgttcacccgtgatcagctccgtggtcggcagctgcacggtcactgctgttcttgagcgtggttgtgaacagcgcaggaactttgcaggggacaccgcggaccctaagcacattgtttaccctcattagctgttggacctgcttccttctaaaatacacccaacagatcgttttcaaaaaacaaagtcacgccgtagcgcagactgcagcgttggtcccgggtgtcgcacagtggtgctgtacccacggcctggggctcctgcactcgtgaaggagctgccacttttgcaagcaagggccgcctcctgaggggctaaacctgccacctttgcacgcgagagccacgtcccaaggggctaaacctgcctttggttgtgccgcgtaggctgatggtctcaggctcagctgccctgcccctcccagtgctggagaagtggaagaacatcacgggccacaccctgctggagcggtatggcatgaccgagatcggcatggctctgtccgggcccctgaccactgccgtgcgcctgccaggtacgagcacttcccacagctgcgttcctcttccactgtgctctgagccccccaaggtgggccagtctcgaaccacccacattcggactgaagggcggcatggaggatgctcccccgtgggacaggccactcggccaggagagcactcaggatgcactgcgacctgtcccctctgggtagatcagccttctcccaagtctcagtcgggtggatgggggaggtgtctgtgctggcccctggctgtatgactggggagacaatgggaagaacagcaatgcctggaatgcaggcgtcagtgcatgtctcagaggaaggcggggggccatgctgttggctccagaccacatcagcagtggtggcagcctccgtctgtctggagtccgggtgccacacagcgccagcagcagtgccaggagaggtgggtgtggtgggcagggtgggatgagtcaagcacctgtcttccttctctagatgtgggctcctgataccgggcccctcttgtccagccttccctaacacatcccattctgactttcatctgacccaaccatttgagccctgggtcctccgctgggacttctgggaacagagcccacagctggggggccaccctgctgctttctgcgcagcccttccagtctgtctagagtagaagagagatctcagtgcagacttaaagtgagaccatcccgcacatctgtctgtgcagctgcttacctgcagacccagtaaaaattcacccctctggcgtgcagctctgtgtgtcttaagaaacatcatcacagtcaaaatagagaagggttcctcgcctcagaaactcccttcctagtgctcagcacctcctccacccccgaggcctggccccttgttcctgtttctcttcttgtggttttgctttttctgggaggccacgtggctaaatcctgcaggacgtggcctctgagcctgtctgcttccgcccggcttccgcccacagtcaactgcctgtgctgtgtgcgtcagagcccgcgcctttccctgctgagtggcatccgtggtgtgggtgcggcaccgcttgtgaccctgttttaagcaatgacacgtgagatgttatcaacatttgtgtgcaggtttctgtgcgaacgtggttttttatttcacctgggcagatacctaggagagagattgctgtgttgtctgaagctttcaagctgttctccagagcggctacaccatccccttccccctgcaatgggtgggaggtcacgagcacctgctgctccagcgggcggtggtggtgtctcgttgagttcatgattctctcatgatgggtggcgttgagcacctcttcctgttcgtgtcattccgttttcaactggggcctttgttttcttgagttttgagagcttttaaaattcgggacccaagtgtcagctgtgcgattttaaatatcatctcccagcttgtggtttgtcttcccattcacctaacagcgtctttaaaatcaggagttttaggttttggcccggtttatcaatttgttttgtgaattgtctgatgtcatatctaataaatccttgcgtagcccaaagtcacagagaatagtttcagctcttacgtttgggaccatgatccattttgagttaatgtttgtacatagtgcgagatacggaccacagttcttttttagtgtgtgaatgtctaactttttagcactgttcgttgaaaagactcccttctccatcgaacagccctttggatctttgttgaaagtccgtcgactcctgaggggtcggctcctgggctctgctctgtcccattgctttccgtgtgccctttggctcattccatgcctgcttggttcctgggactctagggtaagcgtggacatgggggttcaggcccaggcagggaccagctggtgccaggcagcgatacggtgctggggcctgcaaggtgagtgtgagggctggctggctgctgggctgggaggaggagagactgtaggctcacgcccctttgctgggcctggggagccatgggggctgttaagtgtattctgagtgtaaagtctcggtttggctggggcatcctgagcagaatgacagggccatggcagcgagatcctcagctgccgtgcagagctgccagtggggtggccgcacagagtgcagtgcctgctgcaacagtgcccagggcagtgggcgggtgggggcatgttgtgaaaagaagtcagtgtgagtgatgagaaatacatcctagtctcagaccccaggaaaccgccgtcagtgctggtggcccctgccctgggccggctcccgcgttagtctcagaccccaggaaacctccacctccgtcagtgctagcggcccctgctctgggctgactcgcgcatctccacgatggctgcggcaccagctgtttcttcggtggctaaagctctctggtggaaataagatggggaccttgaaatcaaatgtgactggtctgttgagtctctgtccttatcgttgtccttcttagtaggatgtgctggttttgtccagtgccaccggccacagtcaccacgtaatatggacggaatgagcaaagcccggctcgctgaggctgcaggctgcaggcaagtgaggactgaaagggtaacgggctctgggctttgtcctctctttgttccggacatgtgagcaggacaagttctgtgtattcagaatctgtctgcacagtttgtagttcatgatgactgttcatccacagcattgctttgtgggcgtcctctcttttgatcttctcgaaacagcccctgcgatggggtcatattttgcactcacatacaagaacccatgagcctgcccacggtcacgcggctggtgagtgatgcacttcccaggagcacggtgacctcttcaatggccctcactagagaagatggacagtgcccccctagccttttttactggaacagatacaaggctgagaagctgaaatcaggagcagcccagggaccactgtctacaccgagggagtcatgagcagcccagggaccactgtctacacccagggagtcaggagcagcccggggactgctgtctacaccgaggatgtcaggagcagcccagggaccactgtctacactgagagcgtcaggagcagcccagggaccgccgtccacaccaagagcgccaaggagcagcccagggaccgccgtccacaccgagggcgccaaggagcagatagtagcccagagacccaggggaggctcagcttccccacgctggaatcagaactcctaggcgaacaggaaggagccccagacagatggcacagggagaggagtccccggctgaggagggggatccagagaccctgaagcttcagggttattgggcaagaaacctgagtgcaccaatccccgagtcttcagctaccgacggcaggttccctcgggtgccggggatgctccctcttctctaaggcagagcccacagtaggttccctcaggcgccaaggacattccctcttctctaaggcagagcccacagcaggttccctcaggcgccagggacgttccctcttctctaaggcagagcccacggcaggttccctcgggcgccggggacgctctctcttctctaaggcagagcccacggcagattccctcgggcgccggggacgctctctcttctctaaggcagagcctgacggcaggttccctcgggcgccagggatgttccctcttctctaaggcagagcatacggcagtttccctggggcgccggggacgctccctcttctctaaggcagaatcaaatatctgtgattttatccttgcctttaaatcaccagcagtgtgagttctttggtttggaaaaaagtaagtaaagtcacctcagcattaaatccaatatgccccacaaaaactccaaaatgcagcctcctgagccatgtttctagagggcacggtggaggagagctttcctcactctcaggctctaacccccaccctggtggccatggccttgacccttgggtcggctccagccacaggctctgagctcatgcttggcctcgctgctcagtgcactgtccgtgctcggaagagagagaagctgggtggagggtgagctctgtcgtgtgttatggttacaggcctgctccgtgcggttcctgtggagggagatgaataattcatggccgaccactgctgggcctcgtcacactctaattggaggttgagctcagaggtgctcacggctcctgggccactctgtggcattgacagggagctccagggcctcattggcggtttccgttccctgggtcccagtccccagtcagagttatcagggaggggctggctgacagcgattttagaggtgggctgtggcaggaaggcagtgccccccacctgcctgcagctgcgctcccatctacattggcctttgcggggccagcctctgtccactctcttgagctctcatgtccacactgtcacatgcccggggcacagcgagcggcacctggagtgtggggacccctccctcgagctctcacgggtggcacctggagtgtgggggcccctgcctcaagctttcatgggtggcacctggagtgtgggggcccctccctgaagctctcacgggcggcacctggagtgtgggggccactccttgagctctcatggacaataccactgcttggctgctgcagaatccagacaccatcccagagcctcttcagcctctgcagatggtgtgggacggccacacggcctccccacctgcggcccccgcccctaccccagccgtgccgtgtccttgcgctgcgtccccgccccagtagaggcatcaccaggaagaggcgaaaggccgcctgtgatggtcctcttcttatgaaacgcccagaacagaaaaaccacggacgcggacagcagacctggtgccaggtctggggagggagggtgtggcggtcgtgggctgtgcgggagttctgactaggggaagtggggggctgtgcaatgtgtgtgcggaacaccgccgtgccgcgcactgaaatgggaagtcatgtgttatgcgggtttcacccccatttaaaaatcttcagaagcaaaacataaaggaggagaaaggatggaagaaagggggctgaagctggccccgccacaccccccatagtggtgacacgggtttctgaccagagtggaggttcggggcgtctgcatacctggaaccacagagaactcccgaggtgacactccgcacaccacactagcccggcttcgcctgcaggaccccaggtgtggacaggcccagcaggatcagcaagaccgagccgggcaccgacagcccctcaccaagcgtctggaggccgggacgccccatggattgcagagttcactgcactgaccctcgatgctgacccttgaagtgccggaaatctcagcgtggactcagacatgataagcgttcaggcactcccctgacgcaggccagggcaaaggcctcacgccccgggatagacaggaagtcccacgtctgctctgcccctaggtcatgcccgtgctgacgccacatcgccagggccgcactccatgagcagcctctgccgtcccaccagcaacctaaaccacaggcagagcgaggctgcggcagccctgcgtgtgccggcgggacacgtctcgccacctgggctctgcccccaccccggccagtgtaagatatgattttagccacgttgagactgtgcaggtgggatggatacactgagcaaatcatgggtgtctaataaatgagccagtacaaagtgtggtccacctgccatgcagagttcaggacagcccctcctggggacatagggcagatcctgccttagcccgtcgtgtgccgggcacacacaggtcccctcatcgtggacagccccggggccatcagggcaaggcgccagccctccctggccagcaagtgtgtaaaagtgggaatgacaccagaatctgtgggcagctgtgaggctttgggaagtaactgggaaagtgatgtatgaggggcccagggcaggccaggcccagcgtgccacgtgagtgcctgctgtgccacatggccatcactgtggcatcggctgggcctgagcacaccgtgcttgccagccacgtatcgtgtggcttttcacctgctggtgcctacaccatcttctctctgggtcacagggcacgtcgctccctccacacagactcccgcacgtggcacacgggagctcagcgggatccgagctcagtgtgtgcttctctcctccaggttcctctcactccagcctccccttcagtgtttctcctctcctgtaggttccgtggggaccccactgcctggagtacaggtgcgcattgtctcagaaaacccacagagggaagcctgctcctacaccatccacgcagagggagacgagagggggaccaaggtaagccactctgctcttggcaggtgggcggccgtgtgtccagtctaggccccccagggtggttacactggtgcatctttcccctggaggcagactcccctccacgcaggggaccagccccctggacactgcaggtgctggctggtgttgcaagggcactggctggtgttctgggccctgcctgctgcgtgtccgtctgtgcgttcacagagcagtgggcagagggagcccagggcggaacgccaaagggactcacacccgggcacacagctcctcccaggggccctgtccacggggacaggctgacgtgggccatgatggccttggctaagcggaagagataaagagcagaggccgttgttgttgatgggaatctggttagaaatatgaactggcctgaccctggcacccgtcctgaggggacgctgaccacaggcccccatagtaggtgtggggagattcacggggccctgcacgcggaggtgggtgcctgtgcagtgctctgtggctgcctccttgtcttgtgcgttattctaaagctgacaagggtgaacaagaacaaaggacattgtctcatttctgtgaggattttaacatgagagtctgctcatcacacgtgaactcatcacagagaaaggtttagggattatggggaaatggaatcttgatttaaaaggaaattattttctctgaagccagtatccacacctgataccacacatgattgactgtgttgccctgaggttttcaaagatcgagggatcctgagtctcatctctgtgcatttccttctctgtgacaccatcttggccctcacgggcacaactgagctccctgtgcagaggctgaggggccgtgggccttgctctcgtgagtgaacagccacacgccctccttgtaccttggtttccacacatgaccacgtgagggttggagcgatggtcgtggttggacgttttagctccagcaaccaagtaggatgtgggtggctttcagtgtcattaaatgacactgaaaggtgcagtggccgcaccttgtgtggagggccacacggcgtgtcccgcctggcctgggccccccgcagtgggctgttatcccccgtggccctgaagtgggtattctgtttccccgtggaaacctctcacctggggccacctgcagtggccgcaccttgtgtggagggccgcacagtgtgtcccgcctggcctgggccacccgcagtgggctgttatcccccgtggccctgaagtgggtattctgtttccccatggaaacctctcacctggggccacctgcagtggccgcaccttgtgtggagggccgcacagtgtgtcccgcctggcctgggccccccgcagtgggctgttatccctgtggcccccacagagccatggggcaacttgctgaaacccacctgggtggctgccccttgctatacccacctcccctgccctctgtagggccccagcccatgctgttgtcctgacatgcctctcctgggattcctgcctctgccctgctggtactaggctgctggccacaccccacatctcaggttcctgaatacaccggcccttcctggctctcaagtctgtgccctgcagtgcccctgcccccaactcgaggacctcccagctcagccagttccaaccctgtctgcagggacggggctcagcctgtgcctgggttggggacaccatctagtcagaaatgtccccagcagagagcagaacgtgagtggcgtgtggaggagtgagacgccccgtggctgtgcagccctctccaggtgtcagtcagctgacactcctgcctctgagcacctgctctgccggaaatggcagaaatgttgccagagaaaggggcggagcgggggtggggagcatttctgtcttaaattaaaacaaaacttaactgcttcacacctgcattggctgccgcgccacctgattgctcctgcctgagtttctttaattatttgtgtctgctggtttcttccctgaagcagtcttgaaatagaagcagcagcctcagctacctgggcaccctgacagtcagagacaccgcacaggggcctctgcgacaggcatgcaggcagaccctgcaaggtgaagccgcacagatgctctggggctgcttaaatctcagcgtacggggggtttgcatctgctgacagcaggcccgggaacatttccagttcagccaaggagtcggtgcagcaggtggagtacagctgccctgcggggcctggctccaccaggggccaagacccttcgtggggaggagcacagcctgagggcctcagggtttgtgccctccgacacctgagattcagggctcccagaggggtgggtgggcgccccaggacaaccaggtgatgatgggcgctgtgaactctgaaaagccccagcatcagagacctgctgctctctcatgtgaagggactccccaccccacgctcacactcgcagacgcacttggtactttcatctgagtctcacgcagtagcccttctctccacagcatcccagaacccgagggtgcccctcactaccacggtcccggatccacgtggctcaagtgaggctgtggccgacagctgggctgtccgatccactcttgtctgtgccgaggcgtgggtcccggccagcgtccctccccagaaggtctccctcaggactagtcatgagaatggccatccctaggcctgtggagtgactcatgactgttcctgggcagatgatcagccaggccttcagagctgaattaagaggcttggtgtcatatttgtcaggaaacagaaagtacctgcagaaaggaatgtgccctgtggggatgggaggacaccttcccaggatcatccccggggccagagtatctggaccctccccaggtggcagctggcctgccaggcccagggctcagcctcctccatcacctcgctgaggggctggctcctaccactccctcacatcctgtgacatatcacaggtaccacacacacatgcagtgcgcgcacgggtatcacagatacacgcagtgtgcacacggatagcacacgtagtacgcatgggtatcacatgcagtgcacacacaggtatcacacgcacgcagtgtgcacactggtatcacacacatgcagtgcatgaacgggtatcacacacatgcctagtgtgcgcatgggtatcacacacatgcctagtgtgcgcatgggtatcacacacatgcagtgtccacacaagtatcacacacacatacacattgtgtgtgcacagctgttacacacataaatacagaaaaaaagacctgatggaaaccccagaagtcaatatggctgagctccaggccggactccctgacgatgtcataggacgagggggcgcgtgtgcacactgcatatatgtgtgtgtgagacccgtttgcacactacatgtatgtgtgtgatacccctgtgcacactgcatgtgtgtgatacctgtgtgtgcactgctcatgtgtgtgttacccgtgcgtgcactgtgcgtatgtgtgtgatacccgtgcgtactctgcgcatgtgtgatacccgtgcacacactgagtgtgtgttacctgtgcacatgctgcatgtatgtgtgtgtgttacccatctgctcactgtatgtatgtgtgtgagatacccatgcgcacactgtgtgtgtgatacccatgcatgcactgcgtgtatgtgtgtgatacctgtgcacataccatgtgtatgtgataactgtgcacgcactgcgtgtgtcacatatgcacacactgcatgtgtgtgtgatacccatgtgcgcactgcatatacgtgtgtgttacctgtgtgcaacactgcatgtgtatgtgacacctgtgcgcacactgcatgtgtgtgtgatatttgttgaaaagactaccctttctgcattgcattgccattgccactttgccaaagattaattggacatatttgagagggtctacatacaggttatctgttctgttcccttgatctatgtttccattcctctaccgacaccacattatcttgactgttgtggttttatagtaggtcttaacaattgtagtgtgatttcaccagctttattctttctcagagttgttttggtgcacatattaattttagaattagcttgtctagccgggcctggtggctcacacctgtaatcccaacactttgggaggccaaggtgggcagatcacctgaggtcaggagttcaagaccagcctgaccaagatgatgaaacccgtctctactaaaaatacaaaaattagccaggcatggtagtgggtgcctgtaatcccagctacttgggaggctgaggcaagagaatcacttgaaaccagaaggcggagtttgcactgagccgagatcacgccactgcactccagcctgggcaacaagagcaaaactctgtctcaaaaaaaaaaaaaaaagaattagcttgtctatatctacaaaaagttcttttgaggtcttgaatggaaagccaggtgtagtggctcatgcctgtattcccagcattttgggaggccaaggcaggctaatcaacttgagaccaggagctcaagaccagcctggccaacatggtaaaaccctgtctctactgaaaatacagttagccaggtgtggtggcacacgcctgtaatcccagctactcgggaggctgagtcacaagaattgtttgagcctgggaggtggaggttgaagtgagccaagactgcaccactgcactccagcctgggcaacagagtgagactgcctcaaaaaaaaaaagagagagagagagagagagatgttgattggaatttagccattctgatcggggagatcacttgggggagaattaacaattactatgctgagtcttccaatccatgaacatggtatgtctctccatttacttagatccgtgaacacggtgtgtctctccgtttacttagatccgtgaacacagtgtgtctctccgtttacttagatccgtgaacctggtgtgtctctccatttacgtagatccgtgaacacggtatgtctctccatttacttagatccgcaaacacggtatatctctccatttacttagatccgtgaacacggtatgtttctccatttacatagatctgtgaacacggtctgtctctccatttacttagatcagtgaacatggtgtgtctctccatttagatatactttggtttcttctgtgttgtattcagcatatagatgctgtacttgtgttaaatttataagtaaatgtttcttcttttctttattcctcctatttcttctcctccttttcctctcctttttaaactattgtaagtatggcaggtgggtatggggggagagttgtttgtttttttgagacagaatcttgtcctttcgcccaggctggagtgtagtggtacgatctcagctcactgcaacctctacttcctgggtctaagtgattctcatgcctcagcctccccagtagctgggattacagatgtgtgccaccacacctggctgattgttgtatttttaatagaggcagggtttcaccatgttggccaggctggtctcaaactcctgacctcaagtgatctgcccgcctcggcctcccaagatgctgagattacaggcatgagcctctgcacacagtcacgtttttgttgctgttgttagttttcaactgttcattgctagtaggtagaaatagaattgatttttgtgtgttggcctcaaatactttagttgttaccttgctaaattaacttactagttttaggagattttaatagacttcttgggaatttctacaaatacaatcatgttttctgcaaatacaaacagttttatttcttcctttccaacctgtatgaccaaagccctgactaggacttccaatacgatactgaacagaagcagtccgagtggaccttcttatttctgatcttagggaaaggattcagtctttcagcaagtgtgttagttactggctttttgcagattccattctatctataatgtgcttagactttttatcactaaatgtatgttgaatattttcaaaaagcttttcggtattgatggacttttctttattaggctgttaatatggtagattacattgaaccaagctttcattcccaggacaaaccccacttggtcctggtgggtcatttttttatatatagtactggatttgatttgctagcatattgctgagtatttttgcatctgtattcataagaaattttggtctgtagtttcccatttttgtactttctttgggttgtgtttgagggtgatgctggcctcattaaatgagttgggaagtgttctctcctctttttttttctggaagagattgtgtagaattggtattatttcttctttcaatgattggtggaattcaccaatgaaatcatctgggcctagaggttttcttttctattattattattttgtgtgtgggggataaggtctcgttctgtcacgcaggctggagtgcagtggtgcaatcatagctcactggagccttgaactcctgggctcaagtgatcctgcgtcagcctcccaagtagctgggaccacaggcatgtgccaacatgcccagctaattttttatttttatttttgtagagttgggggtctcactatattgcccaggctgatcttgaactcctggcctcaagtgattctccctcctcgcctcccaaagtgctagggttacaggtgtgagccactgtgccctaccaacgtttcttttttgaaagaaaaagaactatgaattcaatttctttagtgcttataggactgttcaggtcatctgttgcatcttgggtgatttttggtacatatcatttttgaggaattggttcatttaatctgttaagtttctttatgtagagtttcccttcaggccacgaaaccattaaaaggttgattaaaaggttaataagggaattcccatcttaaccttttaatggtttcagggcctgaagttatgtggctcccattcctcatgttggtaatttgtgtcttctgtttcttttttctttgttatccttgctagaagtttatctgttttatggctcttttttcaaagaagtcacttttggatacattgatttttctttactgtttttctgttttcagtttcactagttcttggtttcttctacttgcttctggcttttctctttttctagttgcttaaggtgaagctttagattattgatttgagacctttcctctttataatgtgtacatttaatgacgtacgttgcccttaagcattgctttagctgcatccccaaatttatatataatatatatatatttttttcttttttctttttttttttttgagacggagtttcgctctcgttgcccaggctggagtgcaatggcatgatcttggctcactgcaacctcagcctcccaggttcaagcaattctcctgcctcagcctcctgagtagctgggagtataggcatgcgccaccacgcccagctaattttttgtatttagtacagatggggtttcaccatgttggtcaggctggtttcgaactcctgacctcaagtgatccacccacctcggcttcccaaagtgctgagattacaggcatgagccaccacgcctgacctaaattttgatatatttttattttcatttagttcaaaatatttttaatgttccttaagacttcctctttgacttgtggattatttagaagtatagcacatattttccaaatagttggatatttttccattatctttctgttactgatttctagtttaagtccattacagtcaaaagacgcacttggtatatttcaattcttttaaatttgttaagttgtgttttgtggcccagaatgtggtttcttttcaggaatgttctggtgtacttgaaaagagtatatattctgcccaggcgcagtggctcacacctgtaatcccaacactttgggaggccaaggcaggagaatcactgcccaggagtttgagcccagcctgagcaacatagtgagaccccatctctacaaaaagttggaaaaaaaaaaatagctgggcatggtgttacatgcctttggtcccagctacacaggaggccgaggcgggaagatcgcctgaatctgggagtttgaggctgcagtgagctgtgatgatgccaccgcactccagcctgacagagcaagagtgtgtgtcctgctcgttttaggaaatgtctgttctgtaaattagatgaaggtgtttgatcgtgttgttcagttcttctatatccttgctggttttctcaccacttgttctgttactaagtgaggggttgaattttccaactataactgcctgtttctgctttcagtttttgcttcatatattttgaaagtctgttgtttggtacattcacatttataatgattgtgtcttattggtgaattgactcttattaacatttaatgctctggtaatgctctttgctcttaagtttactttgatattattatagctattttaatttctcggttggagtttgcatggtatttattgttctatccctttacttccaacctacctgtgtaattgtatttgaagcaagtttcttatacacagcatacagttggattatgtgtgttttttaaatccagcctgacaagctttgtaattggtatgtttagaccatttacatttaatgtaattattgatgtgcttgaatttaagcctaccattttactatgtgtttactattgttccctgagagttttattgctcaactttactgccttctttgaggttattttttcatattccattttaatttgtctcttaagtttttgaccataaatgtctttgcatagtttttttagtagtagttccagaaactacaatatacatacttccttttttacagtctacttaaagtcaacattttaacacttccagaagaatgtagagccacatccctgcctccacatcggttacttaccctctgcctttagagtgtagtcagtgtaatacctgtatttgttgtaaactccgttagacaaaatggtaatttttgctttcaacagtcaaaaatatttcagagaacttgagaagaaaggaactcaacttcattcatccaaatatttgccacttctgttgcttttcctgtattcccaatataccaagtctccttctgataccagtttctttctgtctgaaggacattctataggaattcttttagatcagatctgcttgcaacaaattaccttatttttcctcatctaagaatgtctttatcttccttcctgaaggatattttcattggattaggaattctgggttgacaactattttctttcagcactttaaaaatatgattcttggctggatgtggcagctcatgcctatagtcccagcactttgggaggccaaggtgggagtggatcacctgaggtcaagaatttgagaccagcctggccaacatggggaaaccctgtctctactaaaaatacaaaaattagccaggcatggtggcacacacctgtaatcccagctacttgggaggctgaggctggaggattgttttaacctgggaggtggaggttgcagtaagccgagatcatgccattgcactccagcctgggtgacagaatgagagtctgtctcaaaaaaatactactaataatataactccacttctttccggcctccattgtttccgtggagaaatcagtgggcgcaggaacccttgttcctctctgtgtgtcagtgattggattatgatgtgtctgggcttggacatcttttggtttgtcctgtttgggattctctcagcttctttagtttataggcttatgttttcaccaaattttgggtttttagccaaattttatcaaacgactttgtgcacctaagtgttatcttttcttctgtcactccagtagcatgaacgttagccctctgtgtgttgactttcctggtgatttttctctgctgttcagattttgggtcatttctgttgctctgtcttcaagttgtcacgttcgtttcttcatcgtcctgctcctgaaccaatccatgagattctttatttctgtatttttcagtttttaaattattgtttggttctgctttatatctgttatttctttgttgagactttctgtttttccatttatttccaagtgtttgccctttctttctttttctttttctttttcttttttttttttttttttttttttgagacagggtctcactccgtcacctaggctgaagtgcagggctgcagtcttggttcactgcaatctccacctcaagcgatcctcctacctcagcctcccaagtagctgggactacaagcactgaccaccacacctggctagtttttatcttttttgtagagacagggttttgccatgttgcccaggctgttctcaaacacccgagctcaagcagtctgcccgcctcagcctcccaaagtgtgcccttactttttggagcatttttataatagtgctttaaagtctttctcagataattccaataactgtgttgtctcagtgctgttgtattctttttctatatgagttgctatttttctggttttttcccgtgttgagtaactttgtattgtaccctggatatttttaatgttagggatgagattcttggtcttgttgacattctgtgaagatgttgaggtgtttgttttactgtgacttggttggcttaactctacaaagtctgaccctccttccctgggattggtctcattgtcattttatttgtagggcctttgccttgctgtctctacatgtcccacaagtgtactgaccagtggccagtctgaccacgtcagtggagcagataaaggacagcagtggaaaaattcacgaaattcagataaagtccgtggtttctttgaaaaaacaaacacaaggctctgagcagccaggagttaggctgggcactgcacggaaagccccgtcaccatgtggggcaggtgtttcacccccgtgggtggcgtcagcccctcctggaggagcccaggctggcgggttggcagccccgtcatcatgtggggcaggtgtttcacccccgtgggtggcgtcagcccctcctggaggagcccaggctggcgggttggcagcaggacgacacactcggcagaggctgccatggggcagtgttggccccacggcgtttgagcgccctttctccacatcagatcagtgtgttctgctatttcgcagctacttccctggcccctggttttctgaagtccattccagatggcaggtgatgagcctcagtgagactcttgtacgcatcccttgacctccggggtcacagccagtcactttcacagtagagaagagtgagggtcgtggagctggcagctgctcatctgaagcccctgctccttctctgccctccccagaccctcctgacctatgagccgagggctcggccggtgtcttcacagacccaccgtgtccagggcctcccgtgccatctgttcctggtgctgcagggacccccagcccaggctcatataacccagcctccctcccgccctctccatggtcacaatagaagaacagtgaggctgtgtttcctggggccatggcagtgcctgcatgcttaacaggggcctccagggaccctccaccctcaggccccaccttcccttcccacggagtcttccctcttgtaattggtcactcagccctgtggagggcgctgcccgctccaagctgccccagcccctgtgggcaaggtgtggacaggtgcccgctgctgtgttccctggtttgagaaacgcccccgaagatgggatttgggcacaggttttagacgtggacaggctgcctgaatccagcccaggctctgagtgctgaggcctgggccggtaacatgctcaagtctagaggatggggtaggagcacgttcttctgtggctgttctgggaggaatgaaaggacacccagctcccggccagggcaccagggcccacagaggacggcgggaatgcttagctcagcatggttggcttccacctgtcaaagctgcgttttccaagcattccaacaaagcgctcagtttcagaaagcacgcggccctgggtgggccctgggtgggcagggagcagcccacagtttcagaaagcaccaatcccaagagggtgtgcccagctctgacctccatgttcttcatcctccacaggtgaccccagggtttgaagaaaaggagggggagctgctggtgaggggaccctccgtgtttcgagaatactggaataaaccagaagaaactaagagtgcattcaccctggatggctggtttaagacaggtaggacccagccccatgggagtggaggagaccccgaggggacaggcaggaactcattgctgcccacgttgagtgacaccgaggctgggagttcccagaattttcagccaaaggcagaagatggggtggagtggggctgggggccactgttacggcactgcctcctgagcacccggcctccccaccggcttctagagtgggctccttggccctgtccctcagtgccaggggccccagtgccccatgacaaggcttctacactgtccctcagcgcgacagccgctccggcacgcacgcaccctgaccacagacgccgggccccacgcagcccttcctggtggccctgctgcccctcgtgggctggggcaccctccacctccgaggtgtacccctgtacccagagacctcaccacccccacgcttagccacacttgtgccctccacatccttctccccaccagagtcagaagtcagctgacgcagtgcggttggtttgcagtgcggctgtttgtttactgttccacaaattagcacattctctctgcctgccagaacaggcctgtgggtgagtgggaacctgcccacctgattgaggtggcccaggaagcctgtggcggtcaggagagacggcggcgcccctggagcctgctggcagcccccactgccaccctcctgctctccctgagcctgccctgagctgctgctgcctgacccccctcctttgtgagaagctggcttggtcccaggatcccacatcccgccccatggggcgtatttggacagtggatatttcgacatttggatagtggacgtatatggatggacatttggatagcggacgtatgtggatgtgttactagggggtccttgctcccagagctcccaagatggtagcgggcagcttccaaaatggcggcaggctgcttccaagatggtggcaagcgtcgtgttctctgacctggggttcttggccttatggattccaaggaatggaatcttgggccatgcggtaagtgttatagctctattagaagccgtgggccacagaaaagaaccatggaacccagtgactagtgttcagcttgattaggatgaacgtgggtgcttagccgtgcaggaacaatggcgagcctttaggccagtcgggagtggcagtgggtgcctcgctggatcaggagcacagtggacaccctgcgggatccggaggaatagaagtcagcggcgggtctgcaacggcggcaagcagcagtggtggacggcgagcgaaagctcaacttgagccgtaactaccacggaccagaagagagtgtagttgcaagatttaatagagtgaaaacagagctcccatacaaagggaggggacccagagagggcagccgttgccaggtttatatcccgatcattgtccctcctgctgtgctctgaggagatagatgattggctattgtttacctcctgttttagcctaattagcattttagtgagctcgctttactacctgactggtcgggtgtgagctaagttgcaagccccctgcttaaaggtggatgtggtcaccttcccagctaggcttagggattcttagtcggcctaggaaatccagctagtcctgtctctcagatggacatttggatagtggacgtatgtccatggatatttggatagcagacgtgcgtgggtggacatttggagagtggacacacgtggttgtgtggctgcaggtactcactgtagtgtatttatccggaagatgtgcacgttgctcctgacccctgggtggtgagattgcggtggtttttcttttcctggtttttttttttttttttttggcctgtctatattttatgctgaacatcattattttataataacctttaagtaatattttccaaaaaaaagaggcccattttcatgcatcagaatctgctggcccaaaatcagaaacgcatctgccccatgcccttccacagggagcagagcggggggctgcagcgtgcaggcgggatgggctccttgagggatgctggaaggggcaatgttggcctgcagcctctccgcctcatggcctgatcctgtgggtcccagaggccctggagcatgtgctgctgtgaggcaggtgtgctaggtgtgtggcagttccgcacgtttgcaaagtgaaggctccgtgagcccctagagcagaggccagtgccccacgcagcatctcataggcttcccaaggtaccctgggaggcaccttcgtgggctggacatcagcagaggacccagggctggggccctagaagcctctctgtgacaggacgtggtcagcacatcaaacactccctcccaatttatcttttttatacatccccattagcgcatgctgatctggggaaacagcctgtccatgacttcccttcaaatgcagaattacaggaaccggacttgagcaggtcttgctctgagcatccctccagtgccctctgaatgccccgaccccaatccgactcacgctgcagttgttttatttatttagttagttatttttgagacggagtctcgctctgtcgcccagtctgcagtgcagtggcacgatctcagctcactgcaacctctgcctctcgggttcaagcaattctcctgcctcagcctcccaagtagctgggattacaggcgcccgccaccacgcccggctaatttttgtatttttagtaaagacagggttttgccatgttggccaggctggtctcgagctcctggcctcaggtgatccgcccgcctcggcctcccacagtgctgggattgcaggcgtcagccactgcgtctggccggttcttgtatttttaaattcaggtaaaagctgaagacgttttcttctttgaaagcacaggaaccacagccctgtggattttgcgagtcgcggggctcccggagccgctgggagggcagccgtgtgagatgcggggctgcgagcgtggaaacactcgcagtcgccagtgctgaggcatgtttcagccggggcggaatcacatgcattaattattgtacagagatgtctttagtagaaaatgattttgaaattcagtttaatttcattgtaatgtgctgcaaacaggaagggagtatgtgtgtttaattggctctcgggggtaaggcctggaagccgcatgtctttgtcacaggccattagcgatgctgctgcataatgagagcctgcaatcagctcacagctgccgctcctgccgggagagcatgatattaaatagaaatcaggagaaattaaacttaaccctttccctggccagcccctcctgccacacggattctggcataagccggcgggcacaggggacagccagggatggctggacacagctgaggatggccgaggccggcctgcagctccccaacggcctcctccgggtcaggatgagaggagaggttgccagctttgatgccagccgctcctgcctcccccacctgcctctgtgcctacagcccgcttctgcctcaagatcacacagcgggcttgtgaggccaggggtctccgctgctgctcaaggagatggcaaaggtctgtttcaggtaactcctctgacggccacaacgatgtcttcagacgtcaaaggtctgtctcaggtaactcctctgacggccacaacgatgtcttcagacgtcaaaggtctgtctcaggtaactcctctgacggccacaatgatctctgcagatgctctgactccacgtgccctcgctcagagacacacgcgcacatttgccacctggggcgagtggaaggtgacgtggaggtgggcacctctgccgggcagatgcgggagcagcagcagcagcagcccctcctgggggcatccaggggtcaggagaggggcggtagggcagggcggcatccctgcaggggtgaatggcgtcttaggctccagccgggtgaggaaacctgataaccgaactccttagagaagagccagggatcccgggaggaccaccaggagcttgtggggaaggactgaggggaagagccccaggtctcgggaggaccaccaggagctcacggggaaggattgaggggaagagccccgggtctcgggaggaccaccaggagctcacggggaaggattgaggggaagagccccaggtcccgggaggaccaccaggagctcacggggaaggattgaggggaagagccccaggtctcgggaggaccaccaggagctcacggggaaagattgaggggaagagccccaggtctcgggaggaccaccaggagctcacggggaaagattgaggggaagagccccaggtctcgggaggaccaccaggagctcgtggggaaggattgaggggaagagccccaggtcccgggaggaccaccaggagctcacggggaaggactgaggggaagagccccaggtcccaggaggaccaccaggagctcacagggaaggatggggagaggggagtggggggctggagaacccccagactgagaaattctgctcggagcgagaagggagctgggcccaggtggccccatcccccaaggttgaacatcagcccagcctcccaggccctccacgtgctcatgggcaccactgccgggcactagcttacttgtcaccctgtctgaggcgtgttggggtaggagcaagagtccgctgcttccagggcccagctggggctccatgtgtccctgggcaccccagaaccctctgggtctcagccgttgggttcttacatctgggccagtggcaaagggttaaagggaccttgtgacttagttgggactcactggcctcaagaagcgaaaatcagagggacagcagccccagccgccggggattccctgtggcgccagagctccccggcaggcactgtggaggccaagtggggaccggcagtgtcgtggtcccggcccacagcctctcagcctcccacagcctctccctgtggtaacgaggtggacgctgagccccaggcctgatggcacatttgaggtcaggtgggggcacctgggctgttcctgtagctgtcccctcgtccaggggagggaccttttcagaagccctggggcctttgtctcattgaccaaaaccctcctggccatgctgccttcacaggacactgggcatctctgtggggcaagggaaggaacacaggcctcctggtggggccccaagacccaaccaaggctcgtctggctggtgccagcctctgcgccaagggtgccgaccaaggtcagagccgatcgcggggatgacaggtgccgaaatggccatgcttgccccagcccctttcatccggcagagggacctcgctgggcctgccacgctcagccaggctgtgctgtgaagcccctctcttcccttctcagagccatatgtccacgctgacagctcctgagagggaccatgttttgctgcctgcaggtgccaagctgactgatgggccatgctgaggagggtgccccagccctcctgcaagatgcccttctgtgcagcctgcagggccaccaggcccacgaggcggccatggtcttcagatgtgtcttagcctgggttccctagaaaacacatgaggactctgggcagaggctgagtgtttttacatttttatttttaagccaaagttacacacctgtggcttaaacacccaagtagttgtagcagtttgagaagaagaatcacagccgtgccccttccccagactcgccggctgctgcttctgtgcggtccccgcatcccgagggccgccagcaccgccacctccaggctcctttttgctgccatggcttgagtcccgcagaggaggcccctcctcaggcacggcccggctcagtcccgtatggcatctgcactattgagactatggagtcgccgctgagaactgagcccaggagacactgaggtttttcctctttctttgttttccagagtcgggaaagtcttggttttcttggtctcctggtgccaattcctcgtgggctgggctggtctccccatggcgcctccttccccatcaccaccaccccttccctcctaccgggtcaggacgtcggctcccagcccacagcatcctcgtcttccctcttccgcccccagctgtggggactgctttcccctggggcttcctgaggcgggtgtgtagggtccgtacttggagacttgcgtgtctctccgggtcttcgttctgccctcagccttgcttgtcggtttggctgcgtatagggttcagggttagaagtcgcttctctatcattttctggccttcagatttgctgctgccacagccgtgctgaatcctggcacttggtgaccccctcctttttttttctgtttttttttttttttttttcgagacagagtcttgctctgtcgccagactggagtgcagtggcgccatctcggctcagtgcaacctccgccttccgggttcaagcaattctcctgcttcagcctcccgagagtagctgggattacaggcgcccaccaccacacctggctgatttttgtatttttagtagagacggggtttcaccatgttggccaggatggtctcgatctcctgacctcgtgatctccccacctcagcgtcccaaagtgctggaattacaggcatgagccaccgcacccaaccatgaccccctctttttaacgtacagggtgtcctctgtccccagacccctgagcccaggttgaggagccaccagctgaggacggagccaaggtcacggagctgccgggtgagcgctgagcccaggtcagggagttgggtctcaggccgtcactgggactccctctgccttcaagaagcctctttcacccttggcccacagaggagacctggatggcactggggtccaggtgcagaagcctccagtgtccacgggcacctgagcttccagcaccttccctcctgctgggcggtggcctgtgcctggccgcaatggaggccgccttccccactgcccctctgagcctcagtctgtcctccctgcagccacctcccctggccaggtgccccggggtaactggtggaggctttcacgtaacttggtttccagctgcctctgtacacacacaggcacctgttccaggcttggcctctctgtacacacacacgggcacctgttccaggcttggaggctgagaacttgggggcagagatctcagggcatcggcttgggcggggtccttgggcagggccttgggcttccctcggcactttcctcaaggactggggccaagcttcacattctgttgctggcatcagtgccatttgggagcaaaagtccgacaggctgggtctgggcctctcttcaccttgtttcctgggatcgcgctttgggtgctggtgtcactccagatccaggctcgggaaccacatctgcacagcagaacaggcgctgttcttatcttgcgtgcgggtcaggacatccccccggccaggagtgcttcctccgaggcccacagacaagttctcgctgggggactggggaccacagcacctcactccacctacactctagagaattcaaatctgagtattggaagatttattttcagttacagtggaaggcagagacatgaaatagcaccaaattcaaaagcagctcataaatccaggtaataggagtttattgattgctacattgtatctgtcagaagaaaactcctttaatgaacacatcaggccgaggacatacacagcccattggcagccgactccgattccagaatcgatgcattttgataaataggttgttatggaaagtaaaggttatttaacttgtttgacttgcatttcacagtgatcgcaagttgccctggagccctctgaaccttctgagtcgccctcgctgccgcaggacctcctcccgcggggtgtccgacccgctcttgcttggctgagactttgtttaaaccctggctccgatgcctctgagcccttgatagcagcgtcccagcctggaagaacaaaaccagccacttttccccttggcaaaggcacagcaaggcgggtgaggcgggcgctgagtagtctgggaatgggcagggagatgtcgaccctcggagctgagactgctctgtgctgagaagctagaacaaagcctgacatgttccaaggggcaagctcagggctgggagggaagcagcggggccgcccctttgggtgggggtgcccaggccttgcagacaagacactggccagaggaggtggagcaggggtactggggcagaggggccatgtttgtgcagcaggatggaccctggagggccccggcctagagggggcctttgccaggaagatgccaggaacgtccaggccaaggcgtccgggcaaaggcatccaggcccgggagacgcatgtgggacttgggctttcctctgtgggcagtgggaagtctctccctacccctggaaggagctccaggcagcagtgaggatggggattctgacactggagtggggagccggccctgtggtgctggctgggctgagagcggcaccaccttctgatgcccagggtgggaaggacacacgactgccaccatgcactgagggccctgcacgccacacacgtgctctgagcactgagggtcccctcatgccacgcacaagttctgggcacagaagcacctctcagaatcatccccgagacaggcgtccatcacagagacaggtctcagtcctgcactgattggcttcgcccagtgctgctgggggagtctcagacacagcctttttccgacaggtatagctgccactttctccggcacagaagcctggggccctgggaatggcaccatgttgcgcgccgacccctacggttcttccctccgcatggctcagtggaaaccgtgcgtgcagcacagcaggcagctggggcctgtgacgaccctggggttggaggccaggcagggctatcactgagaagcagggatttggggcctggggcccagggaatggacaactccccaagctgcccccaccagtccttcctgagcactggctctggaagaagcatctcggggcagaggcagccaggcccaggcagggagagacccccaaacaaggcctacagcagggtctcagggcctgaccatgccagaaacagcccagagccagagaggatgggcagatactcagtgccaccactcctgggagatctcagcaccagggcttcgacctctggggatacacacccacacctgctgagatataacacatctgcagagacacagccacgcctgcagagacatacccacacctgcagacacacccacacctgcagacacacccacacctgcagacacacccacacctgcagagacacagccacacctgcagacacacccacacctgcagacacctacacctgcaggcacacccacacctgcagacagagccacacctgcagagacaccctcacctgcagagatacaggcacacctgcagagacacagccacacctatagacacacccacacctgcagagacacacccacacctacagagacacccacacctgcagacacacccacacctgcagacacacccacacctaaggagacggggtctcgcagtgggcggagaggttgggtcttgcatctaatcagccattgatgggcctctcctgtgaagggcactcattccttgtattcataaattaagctcatgtgagtttgttctttaacaagttattgcgcgatcataatccattgccgacgttggcgtgactcaccatgtcatgagcccactcggggctggtgctgctggagatggggaagaaaattgctccataaaccaaaaagcaacattttaaaacttataaaaaagattcgcaggaaattagaaataacacacaggggttccttgtgccgtccccccagtttctcccagcatcagcctggtgtgtaacggtggtacatcctcagtgccgtgcgtagctttggtgcagtctcagccccgtgcgtagctgtggtgcagcctcagccccgtgagtaactgtggtgcatccttggagccaggacacaggcagctcaagagggtgccggggacttgtcagccttgggggcaggcagtgatggcctctccggcaggaccagagcagggcagtggctccatgctgcgctgggtctctgggtggtgcaggccagggtggagccaggccagaagctgtatggagggccctgagcacctggcagcctccctggtgtcagcagctgtggcatccgtggggcaggagcagcctggacggggtggctcggtgcgattaagagatgctattggaagattggtggctgtctggtccagaggggacacacaagccaggctgcacagcaggagcaggagccatggcgggtcccacgggacttgggacaggctgtgtccaaccccgcccacagcccaacctgcacacccccttccagccgcccagactaccccaggggcgcagtgagaccactctcctgtcggggagcctctggtttttctgctacccatcagcacagagttccagagttccagagctccataaataagcctggagcccacctgggcacacccatccgtcttgtttaatagactgaggagcacgccatgggtctcaaggagtggtgaggtggatggatggggcctttctgcgtccaacagcatgatgtataatgaagtatttatgatttattccagctaataacccatgtggagtgcagggtatgtggaagcagacagttgaggcctcagcactgcccttacatgccctgcatgctcccacagccacggcacacatgtgtgcgtgcacatgctcacagtcacgcataccgcgccctcccagctgcacacacgctcgcaggcacgcacactatgggcccatgcgtcatgagacagcttcgggctgggagtacaggctctgaggctgcagcccgctcttcccgactccccaccctcagtggctggtggtgtctgtgttgagctactcgagaaaggaagaaaacgaaggaagcttggttcccacaggagctccaggaactgcacggggaggagcaagggccacgtcgtggctttgccttaggaaggaaaacgtggggcagccccggccattgttctaggaccagcatggtcaggtgtggagggcacaagatgggcaccagcaggaggctccaggcacccaggaaaggccctgtcctcctcagccaccagcccctccctgtggcctctgcgtgggccttggtgcctctcccatccagaggggctgggcattcactgctggagcccaccgtggtgggatgttgtaatgtgtctggttcacttcttttactgaatatttggcctggattcttttgtgggcctgagagaaatggcaggacagggcctggtgggcctcggcccctctcccagagcagcctgcctgcatgaggggcggcccctctatgctgcagtcccaggggctccgtctgggggcccttgcagcagtagcagcacagccaggaggcccagcacaccctggcacccatcctgagggagggtaaagcatcagaccctgtgcttgttgctcagaaaaggccacgcatcccacccatggccagtggttatcaatcactgtcacagaaacagggcctgagccggcttcctaatgcagggtgtctgcagaccacaggcccagcagggcttctggcacctcctgctcctggcaggctctggacccactgctgacctgcccctggaggaagtgcatacagctgagcatggggaagggaccccacaggaagggcagaccccacatcatgggcacagtcccaccttgggacgcacgtcgtgaccaccaggaatgtgggcttacctggcatagctgtttctccgttggggttgccacagggtagtaaccagagccccctttcctcagaggacaccgtggtgtttaaggacggccagttaaccagagccccttttcctcaggggacaccgtggtgtttaaggatggccagttaaccagagccccttttcctcaggggacaccgtggtgtttaaggatggccagtactggatccgaggccggacctcagtggacatcatcaagactggaggctacaaggtcagcgccctggaggtggagtggcacctgctggcccaccccagcatcacaggtgcgtggccggacttgggccagggaggccaggctagacgggtgctgccttccatgtttgagttttagacgactgcagatgagtcgacgccgtcccagctgcctgcaggggtccctgtgatgctcacctctggtccctgccctggccagggaacatggggctagtgggggtgcagcctgctcggtgttggagccactgaccccgtgcccaccagagctcccaggcctggccgggcgcagctcccatctgcatgattcccctgcaggaaggtggcagggagagtgcagagagccaaggggcgggaaggcagagcccctgtgagtgcccagtccccagatccaccgtggggagcccgtcctcactcccctccccacaggcccagccagcaccaggacgagtgattggagtggggcctgtccaaggacgggctccagggctgcggccagactgcgctcttcctgtgtgtccaggcactcttcggcctgtaagggtcactgaggcatccccatgttctcaaactgttcttctatccgcagatgtggctgtgattggagttccggatatgacatggggccagcgggtcactgctgtggtgaccctccgagaaggacactcactgtcccacagggagctcaaagagtgggccaggtagggctgggtggggcgggcagggagcactcatggggtcttgggggtccagtcttgagggccaccctaggtattggcatcgtccgtcttagaggtggagatgagggatcaagaaagaccagcagtgagggtccttagagacctgaaggccgcacacagcaggtagagacgagggcagggggcaggagccgtgctcagatttgacttggtggcaatattccgagggggcagaaactcacattcctgggacagggccctgtacggcctgtggtgggttccgtcctggtcccaggagagatcccggatgagccaggccaggcccatgcaggaggtgcatggagctgagatccagggttgacaccagctggccgcacgcgctgggcccttccccgccaggccacaggcagcctgtccacctgccgccccaaagccagtgctgggccccagcagaactgcaaggcccacccattctccgtcggcacctgcacggcctctccctctcctgccctgggggtgggtcctgaaggtgcctcacacacctccagtcagttccacggagaccccagcaccatcaccatcccctcagtcatttcactttcccctccatgtccagggcagggcctgttcctcagcggtggccaccacccagtccttaaactcacctgcattttttgttttgcctttaccttacccagaacctttccccaaggactttctcccacctgtctcacccccagtggtttctgatgcatgggatccacagaccctccacttttgccagcagtggtggtggtcacgcccagggctgaacctgagctatggccttgtcaaaggccgtcaggacggaagggtatcccataggaccgtcagggcagagccaggctgagctcagaaaggaagcttttagtttcacctacagtaatttcttttgtttttttaatttataaagaaacggggtataattggctcatggttccacaggctatacaggaagcgtggctggggaggcctcaggaaacttacagtcatggcagaaggcaaaggggaaacaggcacatcctacatggccggagcaggagggaggagggaggagccacagagtgagtgagggaggagggagggtccacagagggagggagggtccacagagtgagtgagagaggagggagggtccacagagtgagtgagggaggagggaggggtcacagagtgagtgagggaggagggaggggccacagtgtgagtgagggaggagggaggggtcacagagtgagcaagggggggaggggccacagagtgagcgggggaggggccacagagtgagtgagggaggagggaggggtcacagagtgagtgagggaggagggaggggtcacagagtgagtgagggaggagggaggggtcacagagtgagtgagggaggagggagggtccacagagtgagtgagggaggagggaggggtcacagagtgagcggggggggggggaggggccacagagcgaggagggggtgggaggagccacagagcgatgggagagggaggtgccacgcactctcaaacatgcaggtcttgtgagaactcactcactagcacgagaacagcaaggggaaaatccacccctgtgatgcagtcacctcccaccaggtcgctcctccaacagcggggatcacaattcaacatgagatttgggtggggacacagatccaaaccatatcgttcctccctggcccctcccaaatcttacgtcctttttacattgcaaaatacaatcctacttcccaacagtcccccaagtcttcactcatttcagcattaattcagaagtccacagtccaaagtctcgtctgagacaaggcaagtccttttcacctatgagcctgtaaaatcaaagacaagttacttcccagatacagtgggggtgcaggcattgggtaaatacaccagtgccaaaagagagccgccagccaaaacaaaggggctgcgagccccaggcaggtccaaaacctagcaaggcagtcactgaattgttttttggtttcttcttttttggtttttttttttttttttttttgagacggggtcttgctctgatgcccaggctggagtgcagtggcatgatctcagcttactatagcctctgcctgcaagcaattctcctacctcagcctccctaagtagctgggactataggcatgcaccaccacacccagctaatttttgtattttttagtagagatggggttttgccatgttgtccaggctggtctcgaactcctgacctcaagtgatccacctgcctcagattcccaaaatgctggaattacaggcgtgagcaaccccacccagcccaataaatcttaaagccccaaaataatctcctaagacccatgtctcacatccaggctacactgatgcatggaggtggctcccaaggccatgggtatctctgctcctgtggctctgtagggtacagcccccatgctgctttcataggctgctgttgtgtgcctgcaacttttctaggtgcaccacacagtgcaagctgtcggtgggttattctggggtctggagaacggtggccctcttctcacagctgcagtagccagggccccactggggactctgtgtgggggctccaaccccatctttctcctcttcactgccctggagcagtggcctgagctctatctggagcccttttagccccagagcaacagggatgcaggggccagtgtccctcagggcagtggcccacaaaaccattcttccctccgaggcctccaggcctatgatgagaggcacttccatgaaggtctctgacacgcctagagacattttcctcattgtcttggcgattaatattcagctcctctttacttacgcacatttctgcagccagcttgaattcctccccagaaaattgtttgtttgtttgttttctaccatgtgatcaggctgcaaattttccaaattttatgctctgcttaccttttaaatctaagttccggtttcaggtcatctctttgctcatgcttaacaaaagcaatctttgctccagttcccaataagttcctcatctccctccgagtctacctcagcctggacttcattgtccatatcgctattagcattttagtcacaacaatttaacaagtctttaggaagttccaaactttccctcatcttcctgtcttcttccgagctctccaaatcgttccagcctctgcctgttacccagttccaaagctgcttccacatttccagatgtcttaacagcagtgccccacttccctgtaccagttttctgtgttagtccagtcttgcattgctataaatgaagccagatttttctcagccactttgccaaccggggacctccgtggctggtgacacccccaacccaggcctgccacagaaggcacccacacactcgacccactgggccatgcttggcttatgcactggctcagcccacctgtgttatagcttatacctgcattcatcggttcccaagttcttgtcccgcgtccaagaagaatgaggttacactgacaattcaaagggtgaggagagtggagaagaattttattgagcaatgaaacagctctcagcggagagggtatgcgagggtgctgaaccgcccagagttgggtgtggctgggtctagggcttttctgggcacagaatggggaggggcaggctgtaggtagcactggaaaaggtaacctttggttggttaaaaagcattattcagaaagaaccagtgggaaagagtgggcaaacaggaatagaagttctcactccaggctgcaggtttcaggctgtttttggcttgaaggtggggtttcaccagggacccacccctgtctatctgggcatttgactgcttcctgttgctttcataaggaactacccaagatggtaatttataaagaaaagaggtttaagtggctcacagttccacaggctataaggaagcatggctggggaggcctcaggaaacttacagtcatgacagaaggggaggcaggcatgtcccacatggtggagcaggaggaagagctcacctacagcaaattatttaagaccgagcatttgtctctgttctgttccctctctggacgcaccctcctgcctccaccctgacttgccgtctcctgagcactgaagatatttttggcttgtccgatgtgactccacagacagcagaaacgcttgcttgatcagggcagcatcagggcaccacacatgcctgggcttgcacaacacagcgggagcactgccactcagcagcagctgctgctttcattaaacagttaccttgagaagaaaagataggtgtcgagggctgagagctgtgctagagtttcagggtccgagttggcaggaactgaagtcccgatgctcctcagcccttggctgtcctcagggctgccctctgcgtggggacaccaggccgcccctgcccagggacaccaggccgcctgctcctgctctgtgcatctctcacatcaggctcctcacccagcattgtttgggctatgacagtggctgtgacaagaccctaagacgggaagctgcgtgcagggcacttgagggcccgctgaggagaagccgcctgtgagggacaggactgggcagggaaggccaccagccatgcggtcacagcccaggactccgccagtcctgcaggagccctggagccaggcccttgctgtccaggccacttgctgtacctggcccacagctacctcccctgcagccctgagtcctgcttgctgtgcccggctcaggctgagactgcagtgcttgtccattcaccatgaaagaaagaagaacaggaagggaggcaggaggaagtaagttagaggattaatccaaatgttccaactgtctaatgggagttccaacaagaagatatccagggaggaaattcacagtcaaatttccccaaaccaaaggtcatgagttttcaggttgaaagaacacccaaccaagaggagagaaaacagcattctaaatatcggaaggaaacgaaacctcgcctcaggcatgcgggctctgacgggcaggatggcggcacggagggctgctgtatccagtgaagtcagcagttcagatgaaacagataactcccttaaaagacacaaattgccaagactgacgcaaacactgaaacagactgaacagttctgagttaccaatttaaaactgcaaagcaaatagcaggcccaaaaggcttcactgataaattatctcaaacattgaaggcaaaaaataaaaccagacacagcaaagtaagtctctgatgaaacagagtggggaggaacacttcctaactccccgtatgggaccagcactaccctgaaatcaaaaccagacaagaaaacgagaggacagtgttcccaatgggcagacacacaaaatcctaaacaaaacgttagcaaattaaatccagttaatgcacaaaaagacaacacgtcatgatcaagcagcatttaagccaggaatagagggttactttcatattcaaaaatcagtctgtgtaattcaccatatattttttttttttttggatggagtctcgctctgtcgcccaggctggagtgcagtggcacgatctccgctcactgcaacctccagctcccaggttcaagtgattctcctgcctcagcctcctgagtagctgggattacaggtgcgcaccaccatgcacagctaatttttgtatttttattagagacggggtttcaccgtgttggccaagctggtctcgaactcctgacttcaagtaatcctcccgcctcggcctcccgaagtcctggaattacaagcgtgagccactggtaattcaccatatttacagaatgaagaagaaagatcatatcatttcaatagatacagaaaaagcatttgcaaatgtcaaaacccttttataacaagcactcttagcaaactaggagaagaaggaaaatccttgaacctgatgagggagtctctcaaaagctaccagatgacatcctgctcgatggggagctgctgggcgttttcctcctgtgaccaggaaggggcgcctgccctcaccactgccacccagtctcattcaacacagagtttgtcccctgttagaaaccgagacgttggttacacgtggaggttgggagtggctcaggcaggcagaggggcttctgggaacctggccatgttccctttcagtctgggcgctacttagagcagggggcagttgcttcaataaaactttagattcccacacaggccaggcgtggtgctcacacctgtaatcccagcactttgggaggccgaggtgggcagatcacctgacgtcaggagttggagaccatcctggccaacatggtgaaaccccgtctctattaaaaatacaaaaattagccaggcatggtggtatgcgcctgtagtcccagctagttaggaggctgaggcaggagaatcgcttgaacccgggaggcggaggttgcggcaagccgagactgcaccactgcaatccagcctgggcgacagggcaagcctctgtctcaaaagaaaaaaaaatctacacatccctcaccacactgtacataggacagctgggtgtaaattacatctccatttaaatgcctgtcatagttttatacaactataaaatatatacgtgccaaaataaatttgataggaacattggaaccaggtaaggtgacgcatacctgtagcacttcgggaggatcctttgagcccaggaagtcgaggcttcagtgagccatgactgcaccactgcactctggcccaggcaacagtgagatcctgtcctagaaagaaaagagaaaaaaagaaaaatgcgatttggaaatgtggaggtcgaggttgacagcgacaccgaggtcgaagccagttgcccctggagagcgagagactgggctgggccgactcccacctctgtcgcgagaggcctacgggcaggggcaggtgggcagggggactgtgctgggtctctggccgcgtctggacggcaggcgacactttctccacaaaaagcgtcaagaaaccacgacacttggtttctggacttttccgcggaacagtaaccagaacaatcgccatgaaggttcgtttctgtcatggctcagtgcagcctggacgccctggaccagcccctcctgcgcctgggccacggccgctgccttcagggcatcactggtgggcggcacaaccatcctccctttggggggttaatttcatttctttcctcccttctttaatggtgaatggaggagcaccgagcaccactgcagtctcagtttcagatcccagcgcctcgtccctgcccactgccctcggccccgcccgcctgcattggcagtgccctggccccacccacccgtgtcagcaccgcccaccgccctggcaccacccaccgagttctcgcccatgaggaagggggaccctgagtggaggtttcaaaccttaggggccgtccctgccgtgcagggctctgtgaggcctcttgccacataggcttgtgtctgcaggactgtgcggcatttactcccatctcaaataccccatacagggcagactgcccctgccccacctgcccacccactccccagcctcttccgcacgcctcctctggaaggggaacgggccacagagtgaaatggggccttccagctccagtgcggggacttggaaggcctggcccggtgtgggggcccctctgccctgcaggccactctgtgcaggcctatcctcaggtgtgccctcgcccaaggcctgcacgcaccatggcttctgtggtaccagtgataacaccatgccgggcacctcctgcagtcaccacccctgggctgctagggcagagacagctgcggtggcccggtgcacctgcctggcctcaggatggccgaggcgcctggcaaggctgcagggtcccaggggcacctgtccgtactgctgggcgcctgagttcctcctgctgggcactgtcagggcagtgcgcctcaggctgtgcttgtctctgcagaaatgtcctggccccgtacgcggtgccctcggagctggtgctggtggaggagatcccgcggaaccagatgggcaagattgacaagaaggcgctcatcaggcacttccacccctcatgacccggcagactgggactgcgggtctggtggggagcagcagacgtccccttcacaccgagaaccacgggggcccgtccaagacctggcctcccttaaacctgaaccccccaaatcaggtcacgtagaatcaagaactgtttgggatgaaatcaccatgtggggtccccagcctcgggccagttgttgcagctcaaggagaccgtccctggtgtcacctctgcctggtcaccgccgacctcatctgtgcagcgcggtgcagccagcccctggccccacgtgctgaggcacctcccgccccacagtgccctgcagttgccaggctctccagggcaggtcccagaggtttcccacaaaaaacaaagactccactggaggaaacaagcccctgtcccacgccgtctgcacgtgcctgtgcctcacccagagccagtgtctcccggcccacataggaggtctgggcagccacccagggggccctcctgggaggagctgagggttcacaagcctcccagaaccagccctgtcccatgggttccgtgcatttcctggtgctgctcttggaggagagcagctcccactgtggggacacctgccaccctgcacactactgtgtgtccatcagcatgtgtcacagaaagtgcgtggacggatggccccggagctgctctgccgtgaccctgcctcaccccccagcgcagggactttccaggtcatctccacaccagcccctcagccggtgaaccctctctcccatcaccgtctccacccagacccccacctgccccatggcccccatttcatgtctgtggctcaccagcttttccccagacccagctccggagcccacaggcgtggccgatgcagaaacctcaggaaggtgtgttgtgaatgttgggtgcacccacgttgcatttacttagcggggccaattcagatgcacaggggccacatgcagaatccagaagtttctggacaattttcagaagaataggctgcctcctccccacagcctgggggaagtaacagtcatcgcccagcagtgtctggcctgaacttacccagaacattctgcccccggaatgcacgtctgaaagagtggccagaaacgagtgtgccgggcaggaggccagccccatctcaggctcacgtgcctctgacaggagaccagccccatctcaggctcacatgcctcgcggacagttggacgtggcctggggcccctgctcacttgagcatgtcgcccaccaagcttgtctgaggccacagagcagcgtcccagccctgttttccaggactggtgggtgccccagtccacggccctgccccacccgaactcctgcctcacggtgtggccttgtgcatccccatggcctgaccccgggaacagtcagaggaaggggtcccgccctcccgccagaggcctggacccaagggaacggcagtcagagactacagtccagacgtttgtgtctaggccttgctggtagctaaggaaatgccttctgttgggaaaaggtcaaatttaacatagcaaaatttttacttaattccactaattttacatttgcatctctctcctttaatcctgaaacttttgattcctaaaaagcttacataatcatttgctttatccgatagtatacatcagtatatcatgctttcgaaataatgagtgtaactttctgctgacaatactacaaactacagaaagcctggagctcattgaccagaaactgcagagagcctggagctcgttgaccacaaactacagaaagcctggagctcgttgaccagccggttgaccagaatacggtgctccaaggacatgcggttgaatgccgtgttctaaagtcacgagtgactctccagctggtccctgtgccaggctggtcggccttcgtgcacacagtccgccagtgcccagccaggcccctggttcccctctgctccaccagccgagaacaagcccgtcctggagggaactcatcctctcctccctccccattaaagcccagtttattccccatcttggcctctggtgctgacctggcctctggagacacaggccggggggtgctgtttgcgaactcaccgtgactgagctccatgaggataccacagtcccacgtggctggcagcgcccaccccacacaccctgccccttgctgggcggccccatgccacaaaagttagacccaggagcaggtgccctgggagcaggctgccaccagctgggtcagaagcccctctacatgcctggtgcttttgacctcctagggaggctggcttgaatctggaaagtcaccagttctgaccccagccagacacaggggtgctgccaggagctgctcccaggcgggtggcccagcttctctcaggcaccaggggatggcaggactcctggtgaccagctggtccccaaagccgtggcaccgcgcctgctgctgccagcaaagtcccacacacagcctgtggcaggtgccgccccattctttctgcccctccctcatcaggggccagggtgaagcccctgccgccctctgccttccctccacctgcggcttccctggcagggagaccatggacccagctcctgcctcctccattcgtttaacagatagggcccaggccagcagcccaggcattaggctggccggtccactgaggcctagacaggccaggcctgaggcagctcaggagtgccaagctggccccacgttcccacccaacagcggcccttggggctgccttcctgccaggtgtccaggcccaacacacaagacctgagcctgctctgcctcagtttccctactctgtgaactgcggctgctgctctctcggggcccttctagccctggccaaggggtgggggctttgttccctcgggcgtcctgtccctggggactggccacacacacaccacacactgccctcccacctggactctgtcccagcggcaccagggtcaggagcaggagcctcaggacccacgcagcaccaggcacagcacggagtgaggcagtgggcggtgtggcaagcgctgtgtgcaccactaacctggaggagccacggctcccggaccctcgtgtcaaagctgccggcctcctttgctgggagcctgagaggaggtcctggtgcagaacagcagcttgttgccagccacagtgagaaggtggtgagtgtgccagccactgagttaaccatcagtaacaggaggcgtgtgcagacaggtgtggaccacaggtatgtatgtcacatgcctgcatacgtcacatgtatgtgtatctcacacgcctgcatacaccacaggtatgtatgtcacacgcctgcatatgtcacatgtatgtgtctcacgcctgcataagtcacatgcatgtgtgtctcacgcctgcatacaccacaggtatgtatgtctcacgcctgcatgtcacatgtatgtatctcacacgcctgcatgtcacatgtatgtgtatctcacatgcctgcatatgtcacatgtatgtgtatctcacacgcctgcatacaccacaggtatgtatgtctcacgcctgcatatgtcacatgtatgtgtgtctcacacgcctgcataagtcacatgcatgtgtgtctcacacgcctgcatacaccacaggtatgtaagtcacacgcctgcatgtcacatgtgtctcacacgcctacatgtgtcacatgtatgtgtatctcacacgcctgcatacaccacagggatgtatgtctcacgcctgcatatgtcacatgtatgtgtatctcacatgcctgcatgtcacatgtatgtgtctcacacgcctgcatacaccacaggtatgcatgtctcacgcctgcatatgtcacatgtatgtgtatctcacacgcctgcatgtcacacgtatatgtcacacgcctgcatatgtcacatgtatgtgtatcacacacctgcatacaccacaggtatgtatgtcacgcctgcatatgtcacatgtatgtgtgtctcacacgcctgcatatgtcacatgtatgtgtctcacacgcctgcataagtcacatgtatgtgtctcacacctgcatacaccacaggtatgtatgtctcacgcctgcatatgtcacatgtatgtgtatctcacacgcctgcatatgtcacatgtatgtgtatctcacacgcctgcatacaccacaggtatgtatgtctcacgcctgcatatgtcacatgtatgtgtatctcacacgcctgcatacaccacaggtatgtatgtctcacacacgcctgcatatatcacatgtatatgtgtcacacatgcctgcatacaccacatgtatgtcacacacatctgcatatatcacttgtatgtgtctcacacacctgcatacacatatatgcctcacacgcctgcatctatcatgtgtgtgtctcacacacctgcatatatcacatgtatgtgtctcacagctgcatacaccacaggtatgtgtctcacacacgcctgcatatatcacatgtatgtgtatctcacacgcctgcatatgtcacatgtatgtgtatctcacacgcctgcgtatatcacatgtatgtgtgtgtcacacacacacctgcatacatacaggcacatggacacctgtgtgcacaccagtccctcccttccccgtcaccatcaggttcagccgggcctgtggtcactgcttccccgaggcagctgcaatggggccccggctccccctacatggtgcgtctgatcaggttgggactcgctcaggtagctctcatcacaaggtccttgtgcactgttgcggctgctcttggtggcccttctagagccttcctgagccagagcagactcctgctccccccagaccccctgggagtcgattctgtccccttcttcctggccgcaggtcggtgcagccgctttcctgcctggaagagtaaagtggaccctgtgtgaaaacattgacgacgtggcaaatgagcagcaaattgatcaatacgaatgatcacgccccatgtgcatctcctcagcagccacaagagagacgaggtcactggaggataaacatccgtgactgcacctcatgatccatcacgcacgacggccgcagcatctcctgccagctgccggcacagacaagagcacgggatggacgaccgcggtagcaacgtggggctcatctgcctctctctgagcaggaagcccgtaggtccccacaggcgggtgcacggaaggggtgggtcctgggcccaacaggcaccccctgagcaccagcccgtctgagggtgggcggagggcgctgccgcaggtccccacatacccagcgcacgctcaccccacactggaggcacctgccgggttctgacacccctcgaggtgccttcccagggttctcacacccactgaaggcagcgcgctcagcctgctttgcacatgagccgctgaggcaggcgagttgagggcgagggtgtgaatcacgagcttggggccaaagcccaaggtcgtcccctctggccggcaagctcaggctcacacggggagccaccaggctggactgggtgcagcttacggacgtggcgcgtgctgtgggcgtcgggccgcggctcctccatgcagtacttacactgctgtctgcagatcgcacccaatcaggagggaatggtccaggcaggtgggcaaggccacggtttggccaggtaaggctgggagggcccaggatgattgtgcgttgagccaggcagatctggagaggcggagggatggggacggagcgccatgcagaggccgctcggtcctcaggagctgagcatcaccctgggagtctcaaggagggtgtcccctggccttagcgggcagccagggccagcatgtggtctgtggcagccggtctcagaggtggcctggttcgcagtcttgctggatggagatccccagctcctagggcaagggcaggtggggtggggccgcctcggtcagctgataggaactgaactgagaaggctgtgagccgctgagtcgccctaactgcagggtggtcctgcgggcagtactgagcccgccctgctgggcaccccacagcccctgtggctctccagctgccactgaggccggacgcctcatgaggaggctcccatctgtgggtggcagaatgacggccccgaagaccccccgcttcctcacccgaagaccccccgcttcctcacccgaagaccccccgcttcctcacccgaagaccccccgcttcctcacccaaagaccccccgcttccttgccccgaagaccccgcttcctcaccctgggacctgtgagttcacacagcagcggggacctgcgactgtggacggcacatcagctccctcaacagggaggctgccctgggtgacccgcgagggcacagggtacctccgtcctgctgagtggaagagggaggccatggcggaggcgggcgtgagggggactggcctgccactactggcttcgtgaggggcccccagccaaggagaggcctcccgaagccggaagaggcggaaaatggattctcccaggagcctccagaaggaaccttggtgttggtggaatgggatgtgagaggacacgcgggtgatgtgtcttgggtcacaccagttcccggtccccgcaccagcccgccctgggcgggaagcctaagaggaatggaggggccatcgtggggctctcccggaaactggccccgggtgcctcggtccctgcgtcagtgcggggtttcggtggccgccctgctggctccgggcactccctccgtcttcctgccacgcggctggtccttcctgggctgggctgagtcaccctccatgcccacccgtcatacccggcaagagctgggggcgtgaagccaggcccaggtgggctgtggcggcatccaggtggaaggacgtggaggactcggaggcggaggggtctccagggcagggcagggccagttgcctggggccatctgctgtgtccaggagcccggcgctgccactggccttgccccaaggcccagctctgcccttcatcccttcagcacctccccgtaccttccttccatgggtcttaagctgtggcaagtccttaagctgggacggccagcgccagccctgcccccaacaggtcactcagcggctcggagcccacgtcctcctcggtgacacaggaaaatggtgcagttgtgcaagggcatgagagggtcccgtggaaggcacattccagaaggttctgtcccatggaaggcacgttccggaaggttccatcccatggaagccacgttccagaagtttccatgctgtggaaggcatgttccggaagtttccgtcccgtggaaggcacgttctggaaggttctgtccggtggaaggcacgttccagaaggttcctagcccagctccaaacacaggctgcaggctcagcagaggggtcttcttcttgcccacagtccctgaccagtgggctccccagggccctgtcggagctggaatgggtggagcttggtgcctgcaggccagtcagcacatcttcagaatccatggtgctcccaggctggcccagggccttaggagcacagggtgggcacaggaccccaggctctgccagccaggccctgaccgtcctgggccagccgctgcccccgttctgcatccgcccctgtgcgatgcgacctctctggtggcgcccatcccagcttcattcccctgtgggccctgcttcagtctgcctgggacacgtgggcgcgtgtgtgagttcgcatcagcgagcatgcgtgcagcgtgtcacatatacatacacgtgggcgcacctgcacacccatgtgtcacagaggagggagacggactcacacgtggtggccctagccacaccctcagtcctctctaaagcaccagccggtgcccacccaggcagcccctcatcataggctcacagggcacgccccccattgccagtctgaccagacactcacaaccattcagttactctagccacggagtcatcagtctccttcattaccacctgcccaccctcctctgccgcacagcaaagcccattaagacagcagcaatgcgagcagcacgtggtgcctttcatgcatcagccgcttgcccatattcccaccccatggggaagagcttcatcttagctagaaaaagatgacaccccacaccagctgaataggctgcgtgcacacacacctccacacgcgcacatacacacacatgctgacaggtgtgcacatatgcgcacgtgcacacacaaatacgcacgcacagcacacacagacacataagtgtccataaacaacacagatctggcctcagagccaccctccaggtgcggctgccccgggccccaggtgcggctgcaccgtgctgtggtgacagccacagcaggatcagagcagcctcaaggcccttcaggagccggcagagctggccccaggctgagcttggggaggtgagcccaggcctgggaccgacgcttcctaattggcgggcagagtccatgcagcccctcccagtctacacggaagcccacgtgtccacctcctgcttctgctgtccccaggacagtgaaatttactaatgtggattaagaacattttttaaataaaaaaacattttacacattgaggacggaagagagaagattacggccaaccaaccccgtgcacttccccgcccaggttcatggagtctgagccctctggcctcctgagcctctgggctctgtcaccaggtgggcgccttccccagcccgtgaggctcgctgctcacgggggccccgatgcctgagtgatgtcatggatttaggtttcagtgctggcacatgtggcccgcagagctcagctcctctgtgagggacgtttcggctcctgtgggctttgctgtcccccatgctgactctgcctcacttggttgtcctcaggtcactctgtgcggtgtgcactgaccccagccagtggatgttccccgtccaagagcaaagctacagtcggctgcaggtgcagtgacttttgcacagtggaagaatttctccagaagatattcctgcaggtggaatcactggatcgtaggcccagatgtcttccacttacttgattttgcctgatgccttccaaggaggctgtgcacagcaggtgtgagatgccccatctcaccaaccggccaacatcccgatgggagatgttgagttttcaccacgctgctgagtgtgacgtggaatcttcttattttagcttgcatttccctgattacaagtcaggtggaacatctcgaatatgtttctgggccatttgattttcctgcaagtcacctgttccagttctttgcccatttcctgttgggttggtcaatattttttgtgattacacgttggatacgtggctggcctttggcttgcctttgacttcgtttgttctatcgaagcatgtgcagaattgttaaattttaatgtattcaaatgcattaatctcatttcttatttttgttgttttattttttgttttttgtttttttgagacagagtctcgctctgtctcccaggctggaatacagtgacacgatcttggctcactgcaacctctgcctccccacttcaagcaatcctcctgcctcagcttcctgagaagctgggaccacaggcatgtgccatcatgtccggctaattttctttttaaaatgttgtagcaatggagcctgggctcaagccatcttcccacctcagcctgccaagtagctgggaccacagacatgtgccactgctgcgcccagctagcctttaatatttttaaatgctgtaagatctgcaggtttttttccaaccaagtttatagcttttcaccccacggatccccgaggccatgacaggcagtgacctccttggggcacccgcagagtcctcccccccatcttgggagggcttgtcc

SEQ ID NO: 15366 - DNA, 83941 bp, Homo sapiens; identical to SEQ ID NO: 1127

SEQ ID NO: 15367 - DNA, 81710 bp, Homo sapiens
gcggcggaatggtggactaccacgcggcgaaccagtcgtaccagtacggccccagcagcgcgggcaatggcgctggcggcgggggcagcatgggcgactacatggcccaggaggacgactgggaccgggacctgctgctggacccggcctgggagaagcagcagcgcaaggtgcgcggcccgcgggccggacgggctggaggggcttttctgagggggcccggggaggggtgggaggtcctgaaaggtaactggagcgtctgtgatgggaacgggggggtcccgagaaggaattggcgggtccgggaagggaattggagtcctgaggaggaatcgccgagctagaggaaggaattgggaatctgaaaagagaattggcggctgggtggggaatatgggagtcaaataaaaggaatcgggaaggctgatgaaggatttggagggtctgggcgtgccattaggggaaaccgaggagatgactgggcaggctgaaatggaactgggatccgaggcgggcttgaagggtcggagcatgggttgggggtgctgggaggagaatcaggggaggctgagaagggaatttctgggtctgggaagtgtgaggaggagcttgagtgtggaggggttggttatttggagagcagaaagatctgaaggagattggaattgggggagcctcaggttgggggagttataaaggggatgaagaatcaagtgtgaggatggagtggagattgtggggtctgaagacgggtgggaagactagggaggctgggaagatgaaaacaggggctaagggtagaattgagcatgaaaagacatgggcttagggtgtgaggagggtagaggtgccaggactgggggtctgaggagggtggggtgcggaaggaagaagttaaggggcccgtgaatcagacgtttttgaagggggtgagatttatttgtggtgccctgttccaaaggggagaagattaagagataggaggaataataagaggaattgatgagggatggagaagccgaagtagaggggatacggagagtggggataatttggggagggatttctaaagaattgatgggaagctgaaaagctaaagcgttggagagaatgaggaagtgtagagggagaaggtgagatcggtgggagggagggtgagctggaatggtggataatgggagagaggttcgtttaggaaaatgaaagtctcattagaaagggaatgcgtaatggatagactgagaaaggaatttgaggagggggtgctggctcctggaggtgcagtcccgggactggagagcgtgtgtgtgtcgtgcaggcagaatgagtttggggaggaagcgttgagagtgtccaggaagaattgtgtcttttttggagagaccggaggtaggtgaagggatcctgaagcagagactgtgttcaggtggcactgtttttttggggggcggggggggcaacttggtagggccccacagcagtgaaaaggtgatcagaagtggagtgggatccccgagcgaggtgtcagtgtctgtgggggggggataaatccagtgtggttgaggggggagctctgagtgtgtgcaggaagagctaaagaaaggagcgtggtgagtgggtgtgtgtggggggaaggggttgttcagaagttttgtgcgtgaaatgggtgggaggtacttgaagttggaagcatttcgtgggatctggagatctggattttctttccagatttgttactgattcgctctgtggccttggacaagacccttgaactctccgggcagttttgttatctgcaaaatgcaaagggatccgagggttccctgcggtgattctgttaataaagagggatgtgtgtagagttgggactttggacagggctctgaaggtttgggagagtgagtttggtggagatttttcaggaacaggctacagggctttgagtggtgacctggcagagtggggagtgactggaagcctctcgagggcgcgagttggtggccaggagcttggcacaggcagcctagcccaggctggaggggaaagggtgggaagggtggaaggagcagctgttccaaggcagcctgaggtggggccgggcataaccttgggtccattaccagcgttgcttgaatttcctcatccgtagtaactgaggggcatggcagtggcttggtgggaggggtgtccttatccgtggccccacctactgcaggatggacaggttgcgatagttggcataaattcactttttgaggggaaggtgagatctgttctggagtctcaacaataatttattgcctgaggcagtgccaggttggaaaaggttgccaagagacctggaaagttgggagggagcaggggccacagtggtggttttgagaatgtctaggctttgtcttctgcagctgaaggtgctggagaaaataaacccctcccccttttttctcaggtgataagggtggggggaccttccttttctctcccttcctgtcttctgccactcctcaagtgactccttttgcgagccgggtttcactccctcccgagagttagggtgtgggctttgttcgtggttatagtgtcccttgcctacagggtgaggctggggcaccattcaggccctgggtggaaaccaggactccccagaacctccaggccttgctgccatgtgtcattctcttacctcccagctcccttcctctggggccgggcaggtttgagggaaaagggtggctcacagagtccgctaataccatctgctttcgtgtctcagccagagccagattctagtacctcctgctttacacctcctccagcaaatatttacccttagctgctctgtgggggaaactactgcttcacctctgtgccctttcctgttatggggtagggattctttttgaaatgggggaaggagtaatggaaaggaatacaccaatctgtgtggctctctaccttcctactaagaaacatccctgcactcccaggctggctgggttgtttgtttgtttgtttgtttgtttttggagacggagttttgctcttgttgcccgggcgtgatcttggctcaccgcaacctccgtctcccgggttcaagcgattctcctgcctcagcctcccgagtagctgggaatacgggcatgcgccaccacgcctggctttttgtatttttagtagagacggggtttctccatgttggtcgggctggtctcaaactcccgaccccaggagatccgcccgcctcggtctcccaaagtgctgggattacaggagtgagccactgcacccagactggctgggttttttctacattgcagtgttgctttagtgaatgacagattgcccttcttgcctctccaaggctgagccactgggcacgggaagaatgacagtcctgggggttctgtacatgcatactccaaaaaaatatgcatccagaacagctgtaggccctcaaagtgggtagaattgaattcttctaggaattaagcaagagttggcccaaatcagaggggacgtgtgtctcacttctgcttggaagccctttgctctgacttctagggacccctgtaacccgtaagtaggttatgcaacggtttttacatgagagggccatgagtgttctcctggcgggatggagaagcattgttctggtctttgagcaaattcttgagcaattacagttctgggccacagttccctctcccaatttctaaaagtggcctgggtaacctcatcaccctctgttgtcctggaagggtgagatctcttgaaggttatgccaaatctcattacagcaagaagaaatgactcacttgctaagttttcgtgttcattgaaacatcactatttcaggggcctcaatgtttcaaccctgaccgttggctttttttttggagacggagttttgctcttgttgcccatgtggctgtattaggtatgagttaactatttgaaagtttttgtttgttttttgtatttgttttttttgttttgttttgttttgttttttttgagacagagcctcactctgtcaccaggctggagtgcagtggtgtgatcttggctcaccacaacctcttccaggttcaaggaattctcctgcctcagcctcctgagtagctgggactacaggcgtgtgctaccgtgcctggctaatttttgtgtttttagtagagacagagagtttcaccatgttggccaggctggtctgaaactcctgaccccaagtgatccgcctgcctcggcctcccaaagtgctgggattacaggcgtgagccactgtgccctgccttgtttttcttgaagtagatctttttttctttttaaaggctgataatggaggccccaaagtagccatctgttactttgttccattactctaattgcttgcctcttaggatctggctaggactaacagttttcaaaattgagtaacacacttgacaaaaaaaaaggaaccaaactcaaactcaactgttatctagaaaaaagactgtgtaaatatgtgtgagaggcaagtatactctgtttgccctcttgtaagagggataggggaggccactcagctgctagcactctgttctctcccctcatcctctccagaatgtattttagaacttgactcttctaatgactgaagaaaaggtggggtatgggaagatggcctgggactgcagggtcacttacactcacctggctaagagttgagatctggctggtgccctggagtggcacctgccactcacctaatcctaaacaatccagggtgtgggcccaggattgccctctgccttttgaaacaccctccctggttccggcttctaagaccaacagggaggctactttggtggcagggagctgactcaccctccagttggaactggtgctaaaagcctccatttaacggcagccgactgcttggccccaagtgggctgccttgtgggggggaaagttcagtggaaagtgttggaggaagcagggtggtgtgtgaatatccaagtagtgctggtgctattaagctctgacacagtcagggaggtcagttaaaatgtggtcttatggccgggcgcagtggctcgcgcctgtaatcccagcactttgggaggctgaggtgggcagatcacctgaggtcaggagttcgagaccagcctggccaacatggtgaaaccccgtctctaccaataatacaaaaattaactgggcatggtggcaggtgcctgtaatcccagctacttgggaggctgaggcaggagaatcgcttgaacctgagaggtggaggttgcagtgagccaagatcgcgctactgcactccagcctgagtgacagaacaagactccatctcaaaaaaaaaaaaaaaaatcagatgacagaggggagcggggacaagttttaagtctaagcctcctgggtggggagttctgctgtttcaacatatgctccagtcatggcagactttggccagacagcgccctttttcagagtgaactgagtgtagcacaagttatctgccagtgctagttagcaaacagaatggagccaaaaaagaattgatttgggaaggcccaaggaatttgaaaccgttgagatgaacactttccgtttttgctacactgatttatgttgtgctgggaattgtacaagcctttgaccagaccttagggttgttctttaaaaaaaaaaaaaaaagattcccttgctgctgcttttacttttttgaagggcagaagggaagggcaaatataattagtgaacagctgtttgctctagtatcacttgctcgttcaggttttctgaatagctgaaatatcaacatgtttatctcttcccttgccttagtatatcctagagcagtgttttccccggctttatctttattccttcatttaatgaactccgtgttttcatcactcacattttgttcccttccctcagtttccttcctttgccttcatttatgtatttagtttacagaataacaaaagcactcgtgttacttttaaacaaggtaaaacttaaacagttttttcctccgtttctttttttatggaaataagaggcaagtgatagcaagtgggtaattcaatggcagtggtaactgaagcactgacctgttacaagagagacggaagcttctacttgagcagatacaaatactgtcatccgtggagatttgaaagaagtctttctatcactgggtagtttgagagctcattagtcttctttagaatgggtttaaacttggaaacatcaaagcaagttacaaggaaacttagttttacagtgttggcagcctaggcgccagaatttgttataaagtgtctgaaagtggcccaggtatcacttaacttttcttcaagaaggtctatgagttacattttactcggtatcccaggcatcaaggagtgtaactttcaatgaatcaaagagaaacagaatcattttaaattccagcctctgtttaaagaaggatcttatgaaggggagaaattaaccacctgacccagggaaggatcccgcctcctccagaaagtgaaatcgccgggtgtggtggctcacgcctgtaatcccagcactttgggaggtcgaggtaggtggatcacgtgaggtcaggacttcaagaccagcctggcgaacatggtgaaaccccatctctactaaaatgcaaaaaattagccgggcacggtggtgcacccctgtaatcccagctactggggaggctgaggcaggataatcactcaaacctggaaggtggaggttgcagtcagctgagatcacgccactgcactccagcctggacgacagagtaaggctccgtctcaaaaaaaaaaaaaaaagaaaaagaaaaggagttaaatctttgcatatatttaactggcaagagcatccttacatcagtgcatgggaagttttatccaagtagcagtttccctgggattataaaaatccccgaggcatttgtcttggtgttgtgcctttttttggttgtgttttttcacgtccctcccctcccctttctccataaacaagagaggcattaacttggaatgtccgtggaaagtcttagaagctgattggtgtaatttgcctgccttccctttagtttgaacagcgtttactctggaagaggtcagtggcctttttcttggttgtgatttatgcaagtgttatctgaaggcgagtggagtgagtttacgtgggatttgctgtttgccacctgttgttgtgctggctccttccttcctgggatgagttccattctctccccctcccccaggagtgaggctccccagccagagcagtccccctgtgcttatccccttccttcgtaaactgcagccatttgtgattttccataaccacttttatagacacataataatttcctttgaatcagtttgcattttaaattaagttttgaaaggaaaactgacaagagtatggcaactggaaaacccagctcccctggccataaatataatagaaggaaactgcaaaaataaacacattgaaaacaaaacagtgttgtttccaggtggttaccactcgggctgaaggccccccaggcttgaggcctgctccctttgttagaaagggattggcaagtgttggtgaggtgttaaagacccaccagcaccaagcagagactttctctttgaagtcatcaggtttacaagagaatcaaaggaaataactttctcaatgtgattcagggtgtaatgtaaggtgtagataacccttaaaattttccatgtgtgtatgtcacacttgggaaaaaaacttgatctcatctggtcgaggtgggcagggcagcaccttgtccaggagcacacagcccctcttggctctgtgtgtcatccggccatactagactcgaacatatggctcatgactggatgatgcttgattcatcttcagtttcaagtgttagtgcttttgaggttttgtaagaaaccaggacacattgaaaatacagtcatttctcagtatctgtgggggattggttccaggaacccccttatataccaaaatccacagatgctcaagttccttatgtaagataaaacgatgtgtaatttgcattttaactatgcacatcctcctgaatactttaaatcatctctagattacttataacctaatgctaaatgctacgtaaatggttgttacactgtgctgtttaggaaataatgacaaaaatatgtacatgttcagtgcagatgcaaccattcattttttttcttccagtattttcgatccattgttggttgaattcacagatagagaacccatggatacagagggctagctgtaagaaatgtgggtttatcatttgttcctcacacaacttttttctttcttcgtttttcttgcctttgttccttttttttgagacagggtgtcactctttttaccaaggctggagtgcagtggaacaatcttggctcactgaagctttgacctcgggctcaagccatccccccacctcagcttcccaagtagctgggactagaggtgcacaccaccacgcctgactgatttttgtgtttttgtagagatggggttttgctgtgttgcccagtctggtctcagcctcccaaagtcttgggattacaggtgtgagtcaccacgcccagccaactttttctcttaaggctccagttttcttcttagagttgggcccctcccacgaagaaagcacactgccaccccttcatcggatttgaaccctacattttgaaaggaaagcagtgccctcctgctgagttaacaaggcttatttaaatgtttttcttccaaatatcagagcagaacagattctttgtcttccagtggaactatccacatggggcagaagtagttggaagcggcagttactaccctgcagaacacaatgaagtcatcttgggaaatatcgtggatggtgttgcaatgattgaatgggatgctagaacaccagcaatacaatagcatttgtgtcttcagcttcaggcaggaataaagaagactttgtggtttgttttatgttttttaaagtttcccccccaaaggtgtggggctgagtgatgtctgtcactagctttctagtgggtttttcttttcatcttttcccctccctgatgtcttttgagagtgggtggaagccacagtctaggtggatcagaggaagcacagaaggcaggcagtataccccactttgtgttttccatgtctgaagggaacacatttggtttttgttctgttttgattttttagagacagggtttcactgtcacccaggctggagtgcagtggcctaatcataactcactgcagccttgaactcttgggctcaagggatctttcagcctcagcctccctagtagctgggattatgtgtgcaccaccatggccagctaattttaattttttttttttttgagatggagtctcactctgtcacccaggctggagtgcagtagcacgatctcagctcactgcaacctctgcctccccggttcaagtgattctcctgcctcagcttcccaagtagctgggattacaggcgcgcgccacgacgcccagctaatttttgtatttttagtagagacagggtttcaccatgttggccaggctggtcttgagctcctgaccttaagcgatccacccaccttggcccaacaaagtgctggggttacaggcatgagccactgtgcccgaactaatttttaaattttttgtaaagactgggtctcactatgttgcccaggcttttaatctgcaaaaagcccaagataaagagttttaatatcttacctcctgagtagtaatgactgattccagttctaataatgtcttaattacagctatacagattgaggggactgcaggaagtgaaatagatgcatttcttttttctttctttcttttccttttttaaatacacacttcgtttcggtggtgaaggccagtttgaggttaggagaggcatcttggaaggaagctcgcaggtggttcggcatctggacatgctgggaagttgcctgagggggacgtcacaataagaggactgtgggtctacagcctgccttagcaaaatgacaggccttcttttaccaaggccaagggcagtggtggaagctgacttcagttggtgtcatcaaggcctcagtatgtgtaacggttaacaaattactattctatgatcaatctccatctgggtgtgagtaaaaggtatttagttgctatcaccatggaaaccaagttgcttacttactgttttggggagtgccctcataccagaggcagtgctaatggtggagtgttaggccccgggcagaaaaaaagatcctgccacttggtatcacaggaaaatacctacaggcacagcagccttgccaggtaggggatgaaggccctctgtcctcggggcaggagttgggccagttgattgtgttgatgaggagtgtgcatttgtgcatgagagagggagaagaaaaaggagagcactccatgaaatccgctgctggctttgtagcctagaagagtgctttttttctctaggagtttggaactggaatctcagctatgtgacttcttaataataggacaaaatatgcctgtatcttttgcctacttccacaaacactgataaattaaaaagaactctaaatttcccacaaatcccaagcacaagtaactttttttttaaatccacatcctccctaatccaaatctaacagcaaatccttttctctctgtcactccctgcttttctttaagaaaatgagtaccttgccttaaactatatattggatgaaaatattaaacactttcacaaagtgcttctttggctgttactggtatgccttgcatttggaagggtcagagatttgaagacttctgtgatcttccagttctggcctatgaaatacagtcagtttcaaaattcaaaatgtctggaagagccaacttgccaggccggttcaagggcagtcagatgaatcgacccttcttacaggctgtctacgaaccagtcatgattcagatattcaagtcctggaaggtatccagacggtaaacatcaccaggattgtgaggcagttacttttttttttggatcgtttgagctacactgccaagactgtggtaggacttgtctgtgtaaaacagaaagggctgtctctaaatgtctttttcaagaatgtcggctataatcacccgacactgtgtctcatggtggggtgagatgaaatacctagaccggttaggggagggccttcttggccattttttgaactaattttccctttccctttgtaacttttttttcttcttttcttttctttttttttttttgagacggagtcttactctgtcacccaggctggagtgtagtggtgcaatctcggctcattgcaacctccgcatcctgggttcaagtgattctcctgccttaggctcccgagtagctgggactacaggcatgcattccacgcccagctagttttggtattttttaggagagacggagtttcaccatgttggccaggctggtcttgaacccttgacctcgtaatgcccacctaggcctcccaaagtgctgggattacaggtatgagccaccgcgcccagcccctttgtaactttcattaacactgatgaggcacaagccataggatagaattgaatccattgagagctgtgagccaattgagggatgattggttaatagattgtggcttgaagctgtggaaggtaaggggtgacacttgactcctattagccttgtagaaacacctcagagattcacaggaagcaaactttgaccataaaaatataagactcacagcgcaccgagttctcttagcagctaccttagagttgagaaagttttgggcctctttaataaacaagcacaaagcagttcttgccaaatacggcctgctctggggccacagggttagcttaggagacaactttcttgcctaaaaataaatgcatgttcctatcagacattccaagcatagtttaaacatgagacttctgagcagcagctcaagctctgtgggttcaattatgtcagagtatgggcagtgagggtctttggggagtgtgcccccttatttgggattggttgtggctaccaaggaaatcagatgatcaaatgcaaaacttcctccatcttatttctatatgatcttttttttttttttttgagttggagtcttgctctgttgcccaggctggagtgcagtggcaggatctcagctcactgcagcctctgtctcccagattcaagctattattctcctgcctcagccttccaaatagctgggactacaggcgtggccatcatgtccggctaatttttgtatttttagtagagacagggttttgccatgttggccaggctggtctccaactcctgacctcaggtcatccacccgctttggcctcccagagtgctgggattacaggcatgggccaccgcccccagccttatttctacacgttcttgatctatcacaggctggtgggggagacagcatgcatatagataatgaacaaggtaacttcagataggattatgtgcaataaattaaataacagctagcattttaccttgtgctagacactattctaagtgcttcccatggactgactggtttttgtttttttttctttcctttgagactgagtttcgctcttgttgcccaggctggagtgcaatggcgtgttcttggctcactgcaacctccgtctcctgggttcaagcaattctcctgcctcagcctcccgagtagctgggattacaggcacgtgccaccatgcctggctaatttttgtatttttagtagagacggggtttctccttgttggtcaggctggccttgaactcccaacctcaggtgacccacccgcctcagccaccccaagtgctgggattacaggcgcgagccaccatgcccgacccatggactcacttgtataatcttgtgaagcaggtgttgttacccttacatgcagaaatggatccatgggcctttaagccacttgcccctgtgacagtgccaggatttgaatgtagaagttgaggctttcaagtttatgctgttatttctacactacactgaagtctagtgattgggaatggctttgcgagcgggtggtgaggggaggagtgtgcagtgcaggtacttcagatggagaggaaggtctcaaagaggtggcatttcagctgttccttaacggatgagaaagagagaaccaagagagcaccagaggaacgcgcttccaacagagaaaaccaagcaagggggcccccgaggagcagaaaggcccgagtggtcagagcggagcccgtggaagagatgggcacagccagattgcttagagctgtgttgttagaagtgctgatgagtctacattcaacttgcgcctgcaaactcagtccctcttagatgccagtaggtcaggaacctcatgcttccaggactctggcgctcctaccctttcctcccaggcctcctggacaggccaaaccagaactgacttctaaagtgggaaccccaagacggcagaacatgaatcagccaaacaaaagctgcagttatctctgtgatgatttcggcagtcggcacgtgtatttgattaaagcgttggtaactttgaatctggagttttatggcactgtgtactactcataatggctttgtagtgtggctctcttagggagcttaacttttacaacatgaacaagttccagcctcctttggtcccatcaagaggccatttctacctggtgggatgccacttgctttacaaagcatcttttgtaaaatgttgagtctccttctttgaagttggaagccaggaagcctgattttttttccaataagtattgtagaagatggcagcctgatttatttttatttatttatttattttgagacggagtctcactctgttgcccaggctggagtgcagtggcacaatctcggctcactgcaagctccacctcccaggttcacgccattctcctgcctcagcctcccgagtagctgggactacaggcgcccgccaccatgcccggctaattttttgtattttttgtagagacggggtttcaccgtgttaaccaggatggtcttgatctcctgacctcgttatccgcccgcctcggcttcccaaagtgctgggattacaggcgtgagccaccgcgcccggcctggcagcctgatttttaaactggcttttctcctaggtcctttccttctctataaatccctctttcacttagtatttcctccttgtttcctttggtcagttggagtgagggtggttctagttcagagaaagagacaggcatacaggctgattcagtctgaggtgcttagctttctgtacctcactggaaaccagtccaggaatatgacaggtttcagtaggtttcattggacccacaactccccatttgaaggcagagcttgtcaaacgagttatgtggcttttactcaaggagggaggaacagcaacagggagctctgggctattgatagacactcctgcctctgaacacacagcacccagcaagaagttaccttcatgggttgtctagagtgaacatgggctgggattctctcagccttagcactgatgatttgacaacaaaaatcgccccgtgggtagagtataacggagcaaatgattatggtggcctgtgatggtgcagccagcccagctgcttcagctggaaagaagatggcgaggtttccattctcctggcagcatagccatgtgaacttgttaaatcttttaagtagctgtataggaggggagataagtgtgtgtgtgtttattcttatccccttaaatacaaaaacaaaacttccactttataaaatcaattcagagtgggaagaggtgcatggcacatggaaaatgtgtcggattaggttgagtcctaccccacgtttgggacacagctgtaagtttccatggtgggtggcttattatgcatttatgctgagctgaacctgctccaagctgctgcagataggaaagtctgtcttggagggggagctgcctctttctatcacactataaagacataaaaggtcctttgaaagactccagcagtcaccacttgggtaacagaattaggggctgctgagcaaagtgggtctgtttttttttttttttaaagacagagtttccctcttgttgttcaggagtggagtgcaatgtcacaatcttggctcactgcaacttccgcctcctgggttcaagtgattcttctgcttcagcctcccaagtagctgggattacaggtgccggccaccacgcctagctagttttttgtatttttagtagagacggggtttcatcatgttggccgggctggttgtgaactgctgacctcaggtgatccacccgcctcagcctcccaaagtgctgggattacgggtgtgagccactgcgcccggccacattttatagccaaccggcttcttgtgtaacatgagttggggcttcttgggccccagagtccagcactcaggtagaaatatgaccgccatggccagacagcagccctcgctgggcccctcttcagagcagagctctgtgccgagcctttaggggtatgagagaaaccggagacctggtccgtgctctcaaagagctcgcggtgtagctggggagagagcaaggccacatgagacctcagaaggacactaaacggcacaccgacaagctcacagcactctagctgtgtcccgggagaggaaaggggtgaatcagggcaggtggggtcagtcatggaaactttcataaaggaggtgagtgtgcaggaggggcgggcctttgcccccgctgcgggcaggttgccgagggcaagtattagggggtccggcgtgcaatcgaacatttcttagctgcctctttggagtagcgctaccagttcctgtccccatgagcatcgtcttcggggagctgctggtttgaaggatgaggtaccatgctcatcttggccatgtcttagaacctgtgatagccagacctgtcgttctgggtccgtatccattcatgcgtcctgtcactgtcacagatatcgtgagtgggccagactcttctccccaggtgggagggggtgccttctgaggcatatgttttcagcctgctgatggcctcttcagaattagcacaggtttcgacaaaaagaatggagagactcccttctcatgtccaagggtctccccaagccctgtgtctcagcccctcagggcgtgtggtgctgcacactgccgcccagatgaccacgcgcagccggaacggccgccctgtattgagaagtgggatcggctcccagtctgctggcgaggctgggttgccacagctcctctgttgccctgcaacgcgggtggcctaggagtgtgctgccttcagtttattcctgcctgccaagctacgcttccaggtgctattcttttctttaaataactgccttagtgctgcttgtggaacttagcgttcccatcccaggaaatactccagtgttgtgtttttttttttaaactcattcagatgctcatggccaaatgtgtgacttaaataccgcagtgtccttgatattgccttccccacaccgacaaaccgagttgcattctggtcccactgtgggataaggttagggtagcggcgcttgcctctttgtgtggtttcagatgtgtttctccccacttcagataacacatgacagctgtaatatagctcagttcgtgcaagtaaggtaggggcagaaatcatccaggagaactccagcctccatcctaaaggattagactgcctagcatcagtaggtttaccatagaaggattcagtggagatagcgagggtggtgagtgttgctggattgagcccgtccctgcagcctgggcacgggagcactgcagtgccatgaaggagagggctgggggatattagcacagccggttcctatttccttttccacctggttaagacttccggggaggccctgcccagcagtccttatgagatgctgccttcctcttttttgaaaggcatagatgataaggaggtggacatgttttgagaagagaacctagagctcattacttgtatttgaggcatgtattgcttcactcccactttgggagagttttttctggggaagttaaaggctattcaggatcagagagtttcctgcatggtcccaggggctgggaggagccacctgctcagctggtggttagctgatagcacccagcctacccaccaagataggaggcagctcagatgtcactgggattcgcagtaccacaggctgtccctgggcccaagcagttagctagctgcaccccgggagggggtgttgagagcactgaagctcctgtgggagagtgcctttgacatcccccactccccactgcccagaactaggaggtagtgaaaggtgtcagtggcaagaaggctgggccagagcatggagggaggccgacctgggctccacacccacctcctccaccaccggctggctgtgcgaccctgggcaggtggcgggggttaagcctcagtgtccttctttgaaaaggggcatcatcctatcctcagtttgaggattagacgtgatagtgcgcaggaagcactctggtgcctggtacattgtaagtgctcaataaatgcagcttcccaaaatgatttcaatggcacatggtcctgcatccaggtgggatctgctacttgagtctccccctcaaaggggcctgctgaaatacgcagctcagtgggaaaccaaaacatacacccctttcctccagtgctccccaggaagcgccaagtcctgagcccagccagcaacttcgaagaagtgccctccaacaagtggcagtgggcacttgagcaagtgacttaacgcagccctctccccagcccctgcatccatctgggcctcattatctgggaggtggcttcttgtttcagagttacaggccctgaacaattttgtgttgggatgtgccataggcagtgccaggaaggttctttcatgagtaatttaacttgttactaagtttgctatcagccggggggctctttccccgggttcccttctttccctgggtccccttccccgcaaagcaaagtccaactcaagttagaaacatcccacagcctggagtcaggctgccctctcttcagttggtgtgtgatgtagaagcaggaagggcttcccactgataaccctaaaaataactgcccagaaatgctgtcagatggggccaagaggtgcacaggagcctgtgcccagctgccgacctggaacgtgggactttctagagggcttggaggagccctgccccttccaggcctcttcccaacagtgcttctcacgcctgctgctccattcccttttcctccttcctcccgcgcccccccctttcctggggtcacttcctgatgccattcttcaacttcgcccctgtcccccccaaaagcaatcaaatccacaacctaataaggcaaaagaatgaggagaatgtccgcctcccagcctctcccctaacagggtgcaggcctgaagcaaatttggaaaatgttacaacggagtgacaaccgatgggggctgggggtggggcggtgcagccttgttcaggagctgcccattgttggcctgaggcaggaccctaagggaaggccacccggtttgcgctttcctgatcaggctgttgacacccttctagcacaagaaaatgtatggaaagtaactgcctgagtcagctgcatctccagttgtgggatccacgtgccaggagaacacgaagtacacacaggtccgcagtgggagcccgctcggagacacctccccgccatcacggctgggactgtgcatatccaaacacttcttgcctctgagatgagcagttttcttccccttgactgtgccagggttcaattagcctgggcattaattaaaacttgtcaacacttagagtggggcccccagaaatctgtcacccctcctagatcattatcccaggctaatcaaccctctctaaggcagtttccattcttgacttagtgggagggaggaacaagcccctcggtgctggggagctctgggggaggtagggactgactgggcccaacccactttgttttggaaggtcaagcttagtaattaacctgaatgcttgggggagggggtgaaggagaaagaactgagtctagggatgtgccaggtctttcaaattgctaattatcagcgagcatgaggtcatccgtaaatatatctaattctttagcttgtaattaaggtgctcattaaaagtgcagggaagtcttgttttcctaaaaggggaaaaaaacaacaacacaaaaagtctttgttttgacctgacacgatggctcagaacagggggaggactcaaggcacaggactagtttcctgccttaaagagcctttacaggaaattgactgcaaacagtattggtgaccctgccaaggaggcaaacctagggtgatgtcattgttcgaagctgtcaccgccaagcctctggccttggggcgaggagagttggtgggattaaaaaatgagtgtgtgtatgtgtgtgtgtgtttagcagtctctaaagaggcgagtcaagggaaaatcctagcgggagaaaaatcacaaggggtggggggtgtctcagaaatattcttagctgggttcaactttcctcgtttttctaagtttaaaaaatcctctcttactatttttgctcatcaaaatgctgctgctttttcagagacagccttttttgagccattccctatttagtgttttgggtaattggctgttacagtatggaatttgtggcccaaaggcagcgtggtaagttagacactaggtgcacggtgccccattgttatgaagtgtggaaactgagacgctggactagtctgatgtatctgtttcttccaccaaaaaaaaaaaaaaaccattttggagaactacccaatgccagtgacttggcatctctgagtcgctaatcttcccatgtgcctccaggaaccgtctggagcgtccctgaaaaaaggacaaggtttgtatcttgtcatttttcctctggctggaagtctaagaggtataaacacagtcttaaaatgaaagcaacaaaaataaactcaaagcagccctgcgtgaaggcattaatgcaaaatatgcaagctggcttcctatttatacggcggaaggcagtcagaagagccaggcctggttaaggaaggagttatgtctctggaggtgcctgttccttagaattacaaataaaccctgggtgattactcagatgaggttgtaatgtggtgtctcatttcatgctttgcacagtccagtttcttgatggaaccaacggcctctgaaatgctaatgcaggatcaggatacagttagagtgccccccttcctgtgcccctcctaacatcctaacagctttagaaggaagtttgaagattaaacaggagagccatgtaagtttcctgtgatcctagatcctgtgatttgttaatattctttctcttcaatccacctgacatttacccagataccatattaggcttggagatacaacaagaaagaaaaccaacccaaccctgtccttaaagaaaagatggacgatgaagggccaggcgcagtggctcactcctgtaatcccagcactttgggaggccaaggcgcacagatcacgaggtcgggagtttgagaccatcctggccaacatggtgataccccgtctctactaaaatacaaaacattagctgggcatggtggtgcgcgcctgtagtcccagctactcaggaggctgaggcaggggaattgcttgaacctgagaggcggaggttgcagtgagccgaggtcgtgccactgcactccagcctggcaagagagtgagactccatcgcaaaaaaagaaaaaagaaaaaaagaaaagatggacaatgaattgcatgatggaagtgaacagtgttagggcgatatgcagatgtaaatgtggtcttgttttactgctcactgacttactgaagtaaacccattgacttcgccttcatgggtttgaaaagggtttttccaatgtgctctgtgtgtctcggagctcaggtgttcagagctgcctcccttataaatcgacctccaggagagttgtgtgtttggttcttggtgtatggtttcgtaggctccccagggctgaggagtcaccttgggatccagctttttttcttttttcgagacagtctctccctgtcgcccaggctgaaatgcagtggtatgcacttggctcactgcaacctctgtctcctgggttcaagcgattctcctacctcagcctcccaactagctgggattacagacgcctgccaccgtgcccagctaatttttgtatttttagtagagacggggtttcaccatgttggccagattggtctcgaattcctgacctcaggtgatccactgccttggcctcccaaagtgctgggattacaggcgtgagtcaccgcgcccagccaaaatccagctttttcttagttcctggcttggggcatgttgctggaaaggaatgacagattgaggcaagaaggaggcaagaaggatgcatctcctggccaaggaaactagagtttggaggtgtcccctgtcaatggcatctgaagaatttctacattggaaaggcataggtgacccagtctggtttggagtagatgggactgggtaggggactagtcttgaagctgcaagcatgctgtttttacttagagcacaggtagctggggaggagatcactgtggtgtgggtggcagaagccatccctagccatcacctaggaagatggtggcccttgggttgcccgagctgctgcttgttttagtagctgcatttggtgccacatttttgtggtaactgccaggaagcggagcccagcgtggcctcaggaagttggtgaggtttgcaccactttttaacaggctggtaacagtgccggagctgacaccctcatggttgcagccctgggattttgttatttggggacactttggaatatgtcactcagaatgctggctcactagctccacaagcaaaagactccttgggtagctggaagcaagcgttgggggaaggagggagaggcaattgcagtccagccaagaatctcaaggctcagtcttcaatgtatggaaacttcagtccttttctgatctttagtggaaatagctgttcactcttagcgccaattggaaagtgttggcagctgaagggggtcgttcctcaggggtccccagagccagtgtatctggtatttctaacattttcctagccacccctttctcctccatatgcccctcccagccccaccattcagatagggtggctggaaagaacatctcctaggtcctctaggaaacttggtgtttccactcaagggagttggggatcacgtaacaccctccacttccacctgggatttcaggccatctgtgggagtgcaagagcatggtggggtggaggtcacaggaaggtggaagcaaagccagggcagctccacatgcagccccctttcaggaacagcaaggataggccggcctgtatcttgttgctcagagcaggtgatcctgtcatttggacccttgtgaggagaatggatgtgagtgtgcacctggttctcttctcctggggctgagggactgtggtcttggattatcacatggtaggtgaggtgacaaaatggagggaagtagcctgggtggggactggggtggccactgcagagctctagctgatggtggccaggtgggaatggggacctgggacttcacgaagctggaaatggagagttttatggggcatttcattcaacttaaaaacctggccgggtacagtggctcacgcctgtaatcccagcactttgggaggctgaggagggtggatcacgaggtcaggagattgagaccatcctggccaacatggtgaaaccccatctctactaaaaatacaaaaattagctgagcgtggtggcttgtgcttgtaatcccagctactcgggaggctgaggcaggagaatcccttgaaccagggcgtcggaggttgcagtgagctgagatgtcgccattgcactccagcctggtgacagagcaatactccaacttaaaaaaaaaaaaaaaaacctgcaggccatacaaaatagggcctattgggtgtgaagagctacccatttgtgacccctaaccttgcatggtcttgaccctgtctctgcctctcctctagtctcccctttcctcttgtctgaattgctgctgcttaatcctctcactaggagcgagaaaattgtactttgccccttagtgacagctctgataaaaggtggttgaagtggatggtagtaaaaagggtttgctttagctgtggttttccagcctccggactcctccccctttcccatcaccatagataattaagagttgactcctcaaaattcctcccaccatattgcatatttttaggcttcaggtttttgtgaaccaaaatagtggaaagtttttttgtttgtttgttttgggtagcccaaagcaacacttttctacagaggcagccattctgcacgcacaataacctggtgaacaatgccagctttctattaataaatgaactgccagttcagaatttgtacccatgtggcagatggacagaaatagtttctttaggattgatctcttaaatttgactttgggaagatactggcagtccaggttttgtgacagagatccatcctgagatctttgtaaatggaaaagcctgaatgcagcgtttcttattgataggagagttgatggatttcaggaaaatgggatatagtagatgtgcaatgaatttgttgacttggaaacaaatttggacacttatccctgaaaacttcaggccattttttcctaaactctaattgagtccctgtgattggagtactagccccacagtccttatcaaacttcgcatttggagcaggcagtctgtctgggaaaagccaggaagctcgccatgaaggcatcgccctctgcttttaacttttttaggctctgttacctctgcactggcttgagtatttcctggctcaattgtttctcaggctggccttgagtccttagatgttatttgtgtgcctagaaatagctggaagaaaaatggttgtaatgctttgcattgctcactgctctccatggatggaaattctgtgagggaaagagggctttccacccagaaaaagagctgggcagcgtagacttcattgtcctgctggcctgtcatgttattctgctatactacagcgattaggatgagagagtttctcgctctccctgggtgtgccacctaaggtacattagggtagggacgaacatggcgggagttctcatagtgggctttcctgccagacgtatggcccacacagcagtatttcttacatgtggttcttttttttttttttttttttgagacggagtctttctctgtcgcctaggctggagtacagtggcgtgatatcggcttactgcaacctccacctcccaggttcaagcaattctcctgcctcagcctcctgagtagctgggaccacagatgcatgccaccacacctggctaatttttgtatttttagtagagacgtggtttctccatgttggccaggctggtcttgaactcctgacctcaagtgacccactcgccttggcttcccaaagtgttgggattacaggtgtgagctaccacaccctgccaaggttctattatttgatctatgttctttgtttgtttgtttgtttgttttgagatggagtttcgctcttgttgcccaggctggagtgtaatggcacgatctcggctcaccgcaacctctgtctcccgggttcaagcaattctcctgcctcagcctcctgagtagctgggataacaggcatgtgccaccacacccggctaattttgtatttttagtagagacggggtttctccatgttggtcaggctggtctcaaactcctgaactcaagtgatccacctgccttggcctcccaaagtgttgggattacaggcgtgagccaccatgcccggcccctgtaaccatttttaagtgattgatcatctcagcatgattgatggagatgatggggttggccatccattcttttttttttttttttttggagacagtctcactctgtctccaaggctggagtgcagtggcacaatcttggctcactacaacctctgcctcctgggttcaagcgattcttctgcctcagcttcccaattagctgagattacatgcatgcaccaccatgcctggccagtttttgtgtttttaatagagacagggttttatcatgttggccaggctggtctcaagcccctgacctcaggtgatccccccacctcagcctcccaaagtgctaggattacaggcatgagccaccacacccggcctattcatcatttattgagcatttatttatacccactatgtgccgtaaacaaggtgctgagtaatgagatgtgaacagaatagtccttcttcttgtcctcatggagcacacagcctagtcggggacaataggcattaaaaaataccaacaatgaaaacccaagacatacatagagtgttccaaattgtggttttattttttatatatatatattcatatatatttatatatatttatatatatattcatatatatttatatatatgaatatatatttatatatattcatatatacttatatatatttatatatacttatatatatttatatatattcatatatatttatatatattcatatatattcatttatatttatatatattcatatatatttatatatatttatatatttatatatattatatatatttatatatttatatatattatatatatttatatatttatatatttatatatacttatatatatttatatatttatatatatttttatatatatatatttatatatgtataattttttttttttttttttttgtgatggagtctctatcacccaggctggagtgcagtagcgtgatctcagctcactgcaacctctgcctcccaggttcaagcaattctctgcctcagcctcctgagtagctgggattacaggtgcctgccaccacgtccggctaatttttgtatttttagtagagatgggatttcaccatcttggccaggctggtcttgaactcctgaccttgtgatctacccgcctcggcctcccaaagtgctgggattacaggcgtgagccactgcgcccggtgtgattatttttatgaaggaaaagaccagagtcctttaagaggggacagtgggggacttgcaatagattgtgtgggagctgtcaggggagactttccaagatgatgacagtgaagtgaggcctggagggagagttagagccaacctcagagaagggaacactgttctaggcaggaggacccagggttgtgggaagagagaaataaaatgagaccaagacagtggggagagcagtgtgagttgaagtcagaggggtgacagcagccagaatgtgccggtagcgaggatcttggattttattctagctgcaatgagagctttgattctacaaatatttattgcgtgctagtcactgttttaggtactgggtgtacaacagtgaaaaaagaacttcccagccgagtggaatgccgtggagcatatctgtttcgatgctgggacagatccctaacacagctcattaaagcagatagcaccattccgtctctttcttcagcttcactttacgtcagtcccagcatttttatccctacccttacagatgagagaactaaagttcagagaggtgacgtgacttgccccaggcccctcagtcagtaaaagacagaactgagaatccaaccagactcttccctttttaggttatttctctaacattagggccgagtatcgattctctttacctctgacttcgtgtccctggtattaagactcagggcccacagtgcctcttggaattcaggcatatggtgacatcagtgtgcctaccattcaggtcttggagaatagggtatggcgaaaggagagaactcgtgatatcgctgattcagtagcccagagttgtacgagtccttgggtgtttcaccttcatccaggcatctgagattggagacaagcatgtggctgaatgacgtatctgggggaagctgtctaaacagccgtgtggagttggagagttgaattagctctgtggccaaacctctgggctcagtctgcctatatatggcttgatctcaaagaacaggtgatagcagtaggagttgttttctgtgttgctggtgggagatgcccaggcacattcctttgtagacaagcacaaactagatatttttgaaatcggaggtctgaaaccagccgaagaattaatcctggcctggaaagcatatgggagagtacagccaacctggcttgggtgttgctttcttggttttgttgcatttttgaggcagggtcttgctctgtcacccaagtgggatcacagtggtacaatcatggctcattgcagccttaacctcctgggctcaagtgattctcctgccttattttttgattttttttgtagaggtgaggtctcaccatgttgcccaggctggtcttgagctcctgggctcaagtgatcctccaccttggtctcccaaagtgttaggattacaggcgtgagccgctgcccctggtgactttgttgctttttaataagcccagaaatttctttcaagagggaggatctttgtgaacatcttgagccgcgttcttgatcgctggctgtggaagcctccacctatcaggctcaagtccatgttgctatcatgtgcactttggctggtgaggtgctgagcagaggtttcagcctctaccacaaggtttcctgatgaaaggtcagctgggtgggcccagcttctccttacccaactgagaggcctcatagagcacaaggcctgggtacggaggttcctggggctcctgccatacccagccaggccaagcagagggccccagtgtgttgttgggtgctgagaggctgcccgcagctctcgcctgtgttggaaggctgtagacttggcttctcccaaacgtaagctgtgaagccatggactcagattctcagcctggccctgctacttactgtgggaccttgggcaaggaagtctccattttctcttttacaaaatggggccaataatctgactaccacagggctgtcaggatgcagcgggatggagcctttatagggtcttgttctgtgggatctggagtcccatatgggagttattagttgagggacgaggcatctgggaatctttattcaactaggaaacttcagccaaagaactaatgccatagagatgtcttatggtgtctgcatttgaagccagcggttctttgaaaatttatcctgagttccagaaagccaactgctagataagtaagcattgagcatttaaggggtcctggaagtaagattcctggaaagaagcagcaatctcttactcatccccgattatctcagacacagagtggtggatggaacctttgtggtttaggggctgactcttggtattgctggataaggaatatgagccagtagagacgagtgtgttgtatagcagtgtcctgcgactgggctggagacgtggctgagggaggccagggggcctcagagtgcacgggaggaggcttacagaggtcttttgcatcctgcagaacaccacatgtgtccttccctctgggaaacctcccacccgggcagggcctctggggccggatgtggaaggtaaacaggctgcctttctgctctctaccacagacaggcccggaaaggcctgagtaggagcttttcatctcaggaagccctgaggtcccacagcttctcctgaagcagcctcattgtccctttgtaagagcatgaccaggtgctctagctcctggagcaccagtggagaactagagtggcccaggtgctgatgccaagttcgagcaacagctcctggcgggtttccctgcatccccccactcactcccatctattcttcacataggggccaaagaacatcctgcttgacatcttgatcagtgtcccttgccctcaggatcaaacctgcaagtccccaaggccctgcaggatctgttttctcctctctgtgctccgggcgcatgccagctgcctctctgctccatgctcattcctgcctcctgagggacttcacacggggcccttgcctctgcccctttcgcctcagctcgccacctacctcctcctcattcttcagatggcagtttatgcttcactatttgtagggccgtcgcacctgacacctccagcctaggttaggagcatgtccatcacctctacttctccttttaactccaaccatccttggctctccctctcgagggtcacgagagcagagagagaatctattttgttcaccactgtgtccctaccatgtgggacattgtcaaggcaaatgtaagtgtgcactaaataaatatgtattgaatgaatagatagccaaacagacagaatggatctgccacaacacaaacaggatgcttttcaagtgggcagaagatggagacatcacttgtcgagacactcaaacaagtggctggatggatgagtggcagatccattctgtctttctgcttggctttaggagtagagggatcacccatggtccatcctctgaggacaagggtatcatgaccgcccaggccccactcacccctgccaggctcattgcatcccatctaaaagtgtgctctggaaggtcataagaagtcctcacctgggacacttctaggcccagtgttcagccagctgtcctgagttctgcatcagtccctgctagatatgaaacacaaacaggatgcgatgcttttcttttttttctttttcttttttgagacggagtctcgctgtgttgcccaggctggagtgcagtgggtgcaacccctacctcccgggttgaagtgattctcctgcctcagcctcccaagtagctgggattacaggtgcacaccaccatacccggctaatttttgtatttttggtagagacaatgtttcaccatgttggccaggctggtctcaaactcctggcctcaagtcatctgcctgtctcagcctcccaaagtgctgggattacaggtgtgagccaccgcgcctggccaaacaggatgctttgcaagtaggcagaagagggagacatcactgtcccatggagaggtgggaaaatcatcgttagcacaggataattcatcctattttgtgctcatgtttactgagctaggattgacctgtgtccgggcagcagggacacagaggtgagtaagacaaagagaaggcccttgcccttaaaaatgatacgtgtggctaaaacgctgtagacctttttgttttttcctttttgagacttcctttttatacagaaattgctacctgcaggtaaaattaacttacatcgtgaaagcgacagtaaagtgtttctagggatagctaaagacctaagaacacagccctgtggtttgactggctggccaccttcctgcagctgggtttactatggtgctgtgttctgggacagcccactcgtctccatttattgggctgagcctcgagacctgcaataccagggaaggaagggaagtctaggctgtctttggtggccattgttatttatggggcatcggcagagaagtcagtaccatggaaaatctagagaaagatagaggatacgcagtgtggttgagcagaatctgatagctccctggctctctccgggccatgggacccagggcgacacagccaccctttttctctctgctgtctggcttgggcttgggctttgtctcctgtgtccctccacaccttcttcgctgtcagtggtgaccaatcccgtggaatcagccactgtgtgttaccccaagtccttgcccctgggacctcgctctgttcggagacaaaacccgggactgtttctccttttaaatgcaaccttgttccacaggagaggagaaaagcaagaaagaggtggcttgtttatctgatggtagtggggtgtgctctgatatgcctttgaaaggggcccagctttgctttgcccagcggcctttgcaggataatgagagaaggaaaacacagggaacttagtgggaatttgaaactggagtgtgggagtgggaaagttcagcttttaccttggagcaatccagtctttctcctgtaggaaaacagaatggtgctgtatggcctccaagctgggttacatcctgggaaaaagacacgtgcttggctattggcctgggcgcagtttatgtgtaagcctttccttgtggattccattttcttatttcccgaatacttctcagccccacaagtccactgagtcttctgtctccagagactgcctggtttccatccccgagggcatctgcgcatcacttaccatggtgtaccatgcacctccagtgtgcccggcactgtgtcaggagctggggatacaggtgctggtccccacctcactcccctcaacctctgcaatatatgatacataacccacacacacagaccatatgcaaaagtggtgggactcctttgtacctgtcacctgcatcagtgattatcagcattttgccagacttgtttcatcagtgtctcccaacacactccccccagacattacccatacgtgctcaaatagatttgggtgtgcgtgtgtgtgtgtgtgtgtgtgtgtgtgtgtgtatttttttagagacagggtctcgccctgtcacccaggctggagtacagtggtgagatcatagctcactgcggcctctgaactcctgggcttgctttgttgcccaggctggtctcagaactcctggcctcaagcgattctgccaccttagcctcccaaaatgctgggattacaagtgtgagccaccgcacccggccaatgtatgtatttttaaacataaccacatactgttatatttaatgcttctgaccatgtcttaagaaaaaaacaaaaactccctttggcttccttgacatcacagtctctctgtttctctgactcttcttcctcatctcctatggctaaattctctccctctgtccactgcttacacatgggcatttcacaatgtcctttttccctgaaggaacttaccccctcccctcagccttaagtaccccatctgtggggatgatgcccatgcctgtagtcctgactcactcaccacgctctatcgcagttatttactgatgcatctctctcccctatcagacgctgaggtctttgatggagcaaccttgtatttgtccgtgtatccccagcaccacacctgtccatagctggagctcaggaagtttttttttttttttttttttttttttttttttaaagtcagagtctcactcagtcgcccaggctagagtgcagtggcacaatcttggctcactgcaacctccacctcctgggttcaagcaagcacgtctgggtaatttttgtatttttagtagagatggggtttcaccatttggccaggctggtctcgaagtcctgactgcaagtgatctggccgcctttggctcccagattgctgggattacagacaggcatgagccactgcgcccggcctcaggaagtagttgaatgagtgactgaatgaatgcccacgtgagcaaatgacctgtttgctgaactttagactgacgttgcctgatgcccactgcttgtgcagtacgtacttcagtctcagcgtgtctgagaccaaactcattttcaagtcccacttcttgggcttggcattgcccatttgtcagccatccgagtcagaaaccttggagtcagcttttgacttctcatcctgtaacaggcaccaagtttgatttctttcccttgaatatctcttagaaccctcaccttcctccttctctttattcctaccattgtccttactcaggaccatatagtgagggtttaaaagtgcagagtcttggccgggtgcggtggctcacacctgtaatcccagcactttgggaggccaaggcgggtagatcacctgaggtcaggagttcgagaccagcctggccaacatggtgaaaccccgtctctactaaaaatacaaaacttagctggatgtggtggtatgtgcctgtaatcccagctactcaggaggctgaggcaggagaattacttgaacccgggaggtggaggttgcagtgagctgagattgcgccactgtactctagcctgggtgacagagtgagactccaatctctagaaaaaaaaaaaaaaaaaaaaaaaagcagattctaaactcacagtgctgctgctggctgcctgagcttgtgtggctttggacagatgacttaaccactctgtgaagatggtatctgatgcacaggaaatgctccaacgttggctcttgtcgtcatctgtgcccatgtctccctcagcagcctcctgactggccttctccagtctcctggtttggattgaggctccctagaccctacctttctgagactggtatctagtcaggttactctgggagatctccaccccccactgcccagagagcaggttctgagctcttcagtctctccaccttctggccccggctgacaccatccctgccacttctcctggggtccccaaacatctgtggtacttttgtctttcttgcccttggtgttcccactctgcagaacaaccttctctccaggtcaccactgatcgcaatcgcgctctcctttcaaggcccagatcaggtgtcacctgacctttgctgtcctcagatcacacctccctgtagcgactggctcgccagtgtccctctctgaccgagctgtgcactcctccagggcagcactgtcagggtctcccccagacccttggttgtgattctctctccttgtcctgaatctcagttttcctgatacatgggatgctacctgaaggcaggtttcaactttcaatctttttttttgttttttgggtgagatggagtcttgctctgttggtcaggctggagtgcagtagcgccatctcggcttactgcagcctccgcctcctgggttcaagggattctcgtgcttcagcctcctgagtagctgggaccacaggggcctaccaccacacctggctaatttttgtatttttagtagagacggggttttgccatgttgaccaggctggtatcaagctcctggcctcaagtgatccacccacctcagcctcccaaagtgttgggattacaggcgtgagccaccgctcctggcctggaggatttcagatttaaagcaaagaggatattttccaacaaagcaactgcttttcttttttctttttaaattttgtttatttatttttaataaagatgggatcttgcatcttgcccaggctggtctcaaacttctggcctcaagtgatctgcctgcctcagcctcccgaagtgctgggattacgggtgtgagctaccatgccctgtctctttttttgtttgttttttttccaaattgaaacagggtctcactatgttgcccaggctggattgaactcctggcctcaagcagtcctctcgccttggcctcccaaagtgttgagattagaggtgtgagccaccatacctggccctgtagaggggaggcattgatgaaggtcaagaagtcctgttagctctgccttcagaatctaccccaggtccttttagttctctccagcctcactgctggaaccctcacccaagccaccaccttgcagtccacacacggccactgggattggggcggcgttctccgcgcgaaatctggctgtgctcctcccccatgaggccctccaaaggcttcctcttcttaggatgaaacccacactgccagccgaagctcctcaggctcccaccctctacaagctccttctgctccagccacactcaccaggcccgagttcccacctagcaccttccctgggaatgatctccccctggttggctctttctacttattcagcctcaaatgtcatctccactgagaggcctttcctgacctgctgagcttgattccctcccctccccagtcacattactccgtgttatggtacccatccctgtctccttagcttgtttttgtctgtattggctcttccactagactgtaagttgcatgagggcagggatgtctgtttaatcccagtgctcaggatagtgtatggctcgtgatagatgcctagtacattttaaaatgagaacgaatgaagtttgggagaggctcagagcagtgagtctcccccttgttgggggactggggagtgcctgggaggggctatctggtgccagcggtttggagtggctgggatgactctggaatcctgtgaggcccagtcagtttctttggttctcatgcagtgcagtgccctcagacctaaccattttgttccgtgctggcttgaaagggtctgcctccctcccagtgcagcccctgcctctcctctttctcgccccccgccctcctccagagaaagcaggtggtgagggctctctaacccagacaggacttgctgttcagccccagcttgaaattgatttcctccagccctccttgagccaggccccgtgaacagaggaggggtctgagccaggcctcctaggccattggtgggagggagaatgagacagccatttggcccacaggccaccaacttttcccccccttctctaaaagacacacaatggcagttgggctgcacctttgtgagtcaccggtgatagcccatcataaattgttatttcctatatttccagagcagctttatcgggcgttgcctgtgcagtccgggaaccgatttggtatggggtcagttaacatgctgtcttgttgaaatctgtcatcatgcccatataaggcaaactccttggattactttttaccttggcagaatcacaggaatgtcaaggtaaccaggccacctcagcatagctctgattctcacccggtcacctgacttgcccgccctcccccatgactcacccagtggctcagcatggggcctgctgcactgtggctgctggaatctgccaaggacctcctgggactgcccttggttttgtgtcttccttagagtagatcaaatgagaggaaccatgtgaagtagctcacacagggcctaacagagcaaacacaagacgtggaaagcagacttggtgaggcttgagtttagtttgggggttgcgggggtcccagctctgctgcttaacagccctgtggccatgggtatatcccccagcattcagagccttatctgtaaaattagagcacgcagaacaaaccctggtacacactaagtgctcaataaatgtgagtcatttgtgtaattatagtagggtaggccttatgccccacccagtcataaaaatgcctcttgctgttgttggttcaggctcagccccttagtggctttcatggggcaggttgacatggtacccagagtcctcctcggtcctcttcccatggtgtagtgagagcactcaggaccacctaggcctttcctagaaaactgaacccacaccttcccagtgctgccccaccctggtcccccaccccctgcaggacaaaccactcctcccttgttttggggccaggagtcagatctgcccctgagagcagcaggggcccctttgtcctttgacgtcatacccacaccgctcctggagacagccaccccttcatgccagccccaggaaggcttgtaggtggggcgagccagggtgagagtgtagccctgttcctcggccagggcagatgtttcaccatttttaatggagcaattatgagtcagaggtttcagtctctactggttcctcccgatcctataattactctttggctatagaatcctattttgatctcttcttttcttttctcttctttctctctctgtggtcatggtcaggtttttctttttttaaatcctcccaagacactgctaatgttgtctgtctcatgcatccaaggaatctgagatggactgaatattgtcaagggaaaaaaaaagagacccccaaatccagagtgatttcttaacccacccaaatggctttttgtttgtttgtttgtttgtttgagacggaatctcgctctttagccagggtggaaggcagtggcgtgatctcagctcactgcaacctctgcctcctgggttcaagcgattctcctgcctcagactcccaagtagctgtgattacaggcacatgccaccaagcccagctaatttttgtatttttagtagagatagggtttcaccatgttgaccgggatggtctcgaactcctgacctcgtgatccacccaccttggcctcccaaagtgctaggattacaggtgtgagccaccgtgcttggccaacccacccaaattgtgtaccctacaccatcctagtgcttgggagccaacacccactcacaggaggctaagggcaagtttaggtaactcttaacaccacgaattagttgcctgctggcaaacttcaaactccaagcctgaaatttctggttggagtcacctcccagatggactcagggattcattcaccccctcatccagtgctcacggagcctctgtgaggtgcaggcctggagaggagccctgtggcctcagcaaagggcaggcaggctggtgagcacccaacctctggatcgaggggactcaattatgcggataaaggcccctaatcctctcagtgctccaaactcactctgcttctgaaagggatcttcgtaccctgggttcagagagtaggaagcccgcagggaccgagtatgcatgaaacaagcccaagtctgtgggggctgtacatggtcaagatcacagatttccagaccaagccagctccaccctagctgggatgcccaccctgagacacccctctctgctttcactggaataggatggccctgacttggccgggtggactgttgaatcagagcctctcaaaacaggaaaaaggaaaaggatcaccaagcaggagtttcagttgtcaaagacaaaacccttaccacgattaaagattactccagggcctcgcatattcacccttccaccagcagggcccagtttacggatcatttgaatactagcaaaaaaacaagccatctgctggagagattgaacagagggagaaacaggagtgtttgccctgcttccagacacccctttcctgtggcagttcctgcacctggcaagatctactggggaattcccggggtcccactagctcaggacgggtgtgtagcacttgcctaaataacaatcccatcagtgccctgtctgaccttttctccccaaatgccaaaggcctcttgtctggatgaacaaatccctgggcggatttgtccagactaaaacgttaattctaaagactgggccccttaggcactcgctaagattccaggccacactgtctcaaggccagaattggcttacttggctatctttttgaaagatcaaagtttaaaccagatgatctgtagtcccccacccccaccctgaaacctgagcttagctgtaagcattgaaagtaaatggggtgtttgtagctcaccctccctgttctccaggtgaagggccccgtgtgcctgatcatttcatagcaaaatgctagatggggccagaggaggccccagcctctgctgctgccctaattttaaaactgccttttgggagtgtaagtttcctctgttaaaggtagttatttcaaggtaggcctcaccatctcctcctcctggtgagaagctctgcctggagggctgagcactgcctcccgctctgtgggccccacctgccttgggttgagacctatctcttcctggactctgtgtggggagtgcaggctcttccccttggggagaacccagttctttgacgtataatctgagtggtttgggttggttggttggttggttggttggtttcccatgtgtgggatggctccggaagtctgtttgagaacagaggcaggctcagatgggagcagctcctaccccgggccgcctatccccctttaccctggggtttcttttagctccaagcatccattccagtctaacaaatctggtggcagagtctcttttttttttttttttgagacagagtctcactctgttgcccaggctggagtacagtggcacaatctcggctcactgcagcctccgcctcctgggctcaagcgattctcttgcctcagcctcctgagtatctgggattacaggcgtgtgccaccacgtctggctaatttttctgtattattagtagagacggctggtctctactaatagttcaagacggctggtcttgaactcctgacctcaaatgatccacctgcctcagcccccccaaagtgctgggattacaggcgtgagcccctgcacccagcccctctggttctactgagacctcagatctttcatttatggaacaagggggttggattagattgttcgctctcagccctcacttcatgttagactcactaggtggactttgtcaaatgtcattgcccagggcccaccttgagggaatctgtctcattttgcctgtggtgaaattcaggtatttttaaaaagctcccaggtcccatacatctattgtcaattgattttcaacaagggtgcaggaccattcaatgggggaaagaatagtgttttcaacaaatagtgcaggaacaactattaatagatacccatctgcaaagaatgaagttgaacctttacctcacaccatatacaaaaattaactccaaacggatcagatacctaaatgtaagagctaaaactgtaaaactcttagaagaaaacacaagtgtaaatctcatgaccttgggttaggcaatggttattagatatgacagcagaaacacaaccgaagaaaaatagataaatcagactgtttcaaaactggaaactttttgcttcaaaggacactattaaagtaaaaggacaacccgcagaatatttacaaattgtatatctgataagggtctactgtccaaaatgtataaaggactcttaaattcaacagtaaaaagacacaccagttaaaaatgggcaaaggattcaaatagacacttctccaaagaagatctacaaatggtcaataagcacatgaaaaggtgttcgatgtcattactaattagggcaaatcaaaaccataaccactacaaatggtcaataagcacatgaaaaggtgttcaatgtcattactaattagggcaaatcaaaaccataacgtggttgggcctggtggctcatgtccataattccaacatttttggaggtagaagtgggaggatggcttggggccacgaattggagaccagcctgggcatcatagtgagaccctgcctctacagagaattaaaataaaaaattaggccgggtatggtggctcatgcctgtaatcctagcactttgggaggccgaggcgagtggatcacctgaggtcaggagtttgagaccagcctggcaaacatggtgaatgaaaccttgtctctaccaaaaaaaaaaaaaaaaaaaaacccacaaaaattagctggacatggtggtgggcgcctgttgtcccagctagtggggaggctgaggtgggagaatcgcttgaacctgggtgggagaggttgcattgagccgagatcacgccattgcactccagcctgggcaacagggtgagaccctgtctctaaataataataaaaatgagaaattggccaggtgtagtagcatattcctgggaggctgaggtgggcagattgcttgagcccaggagttcaaggctgcagtgagctatgatgacaccactgtactccagcctgggcaacagagtaagaccccaaccctaaaacaaaaaaaaacagaaaaccacaatgagataccactgcacacccaccatgatggctataatcagaaagtcagataataagtattgactaggatgggagaaatcagaaccctcacattgctggtcaaagtgtaatgtggtgcagcttcttgggaaaacagtctggcagttcctcaaaatttaaacatgttttgtatttttagtagagacggggtttcaccatgtcacccaggctggtcttgtctcagcctcccaaagtgttggaattacaggcatgagccaccacgcccagccaagttcctcaaatttttaaatataagaggtatcatatgactcagcaattttactcctaggtatatgcccaaggcagttgaaaacatgtccacataaaacttgtacatgaatattcacggtggtgctaatatccaaaagatagaagcaacacaaataatgcccatcagccaatgaattgataaataaaatgtggtatatccatacaatggaatgttattcagacaggaacgaagtactggtacatgctacaacatggctgaaccttgaaaacatgctaaggagaagccaaactcaaagatcatataccatatggttccacttatatgaaatgcccagaataggtaaattgcaagagacgaaagaaaggtaggttagtggttgccaggggctgggggctgggtaggagggaagtggggttggagagtaactgtaccagttttgcggtggtagacatgttccttgtatttttggttttttgttttgttttgttgttttgagataaggtctcactgtcgcccaggctagagtgcagtggcgctgtcatagctcactgtagcctcgaattcccaggcttaagtgttcctcccacctcagccttctgagtagctgggactacaggcaagagtcaccatacccagttaatttttaattttttttttctttttctttgagatggagtctcgctctgttgcccaggctggagtgcagtggcgcgatcttggctcattgcaacctttgcctcccgggttcaagcgattctcctgcctcagtctcctgagtagctggaactacaggcgtgcgccaccatgcccggctactttttgtattattagttagagacgaggtttcaccatgttggccatgagagacaggactagctggatttcctaggccgactaagaattgctaagcctagctggggaaggtgatcgcacccacctttaaacaccgggcttgtaactcagctcacacctgaccaatcaggcagtaaagagggctcattaaaataccaattaggttaaaagcaggaggtaaagaaatagtcaaatcatctatcatctgagagcacaggaggagggacaatgattgggatataaaccccaggcatttgaggcgggagtgggccaccccctttggttcccctcccactgtatggaagctctgttttcactctattaaatcttgcaactgcacactcttctggtccacgtttgttttggcttgagctgagctttcgctcaccatccttcactgctgttcaccgccatcacagacccactgttgacttccacccctccggatccagcagggtgtctgctgcatttctgatccagcgaggcgcccattgctgctcattcgggctagaggctcgccattgttcctgtgcggctcagtgctcgagtttgtcctaatcgagctaaacactagtcgctgggttccatggttctcttccatgacccacggcttctaatagagctataacactcactgcatggcccaaggttcaattccttggaatccgtgaggccaagaatgttaggtcagagaacaaaaggcttgctgccatcttgggagcagccactaccaacttgggagctctaagaacaaagacccaccggtaacagccaggctggtcttgaactcctgacctcgtgatctgcccgccttggcctcccaaagtgctgggattacaggcgtgagccaccttgcctagccttgttctggaattagtggtgattgttgcacgatcttgtgaatatactaaaactccctgaattttatgtaaaagggtgaattttttggtatgttatgtgaattacatttcaatttttaaaaattgattctccaaattatgtacatatttaaagagtacatgaaagagagggagagaaagaaaagctggatgcgagatgccgcaacctgattccactcactcctagatttgttgagtacctgctatgtgaaaggtaccagtccaggcagtgggttcccacagcaaacagaaccctcctctggggagcttatgctgcacttgggagggagactggttatgaacaaagaacatagtttttgatgatgaaaagtgcagtgagtaaaacaatgcagtgtgaggccgggtgtgttggctcacgcctgtaattccagcactttgggaggccgaggtgggcggatcacctgaggttgggagttcgagactagcctgaccaacatggagaaactccgtctctactaaaaataaaaaattagccaggcctgtaatcccagctactcgggaggctgaggccagagaatagcttgaactcaggaggcagaagttgcgttgagctgagatcatgccattgcactccagcctgggcaacaaaagtgaaactccgtctcaaaaaaaaaaaaacaaaaaaaacaaaaaaaaaaacccaacaacgcagagtggagtgatagcctaggggagatgacagagtccaggaaggcctcctgggttgctgacatttgaggcaagtcctgagtgatgagacaaaaccagctctataaagagctagacgaaagtcttagaccagtatttctcatgaggaggagacagcactccaaaatccatcctttggcctggcgcggtggctcacgcctgtaatcccagcactttgggaggctgaggcgggtggattacctgagatcaggagttcgagaccagcctggccaacatggcagaaacccgtctctactgaaaatataaaaattagccgggtgtgatggtgggtgcctgtaatgccagctactcgggaggctgaggcaggagaatcacttgaacccgggaggtggaggctgcagtgagccgagatcatgccaccgcactccaacctggcgacacagcgagactctgtctcaaaacaaacaaacaaacaaaatccgtcctttgcagcagcaacacgcacgctttctggcacctcaaaggggattgtccaagactggaacactggctgcagggagggggccgggtgcaaagagctggtttctgggtggacacgcaggacctttggaatgctcgctaccccactcagcagtatttatacctcttctccaactgcgaagtcagagctttttcatgcaggctgagaaaactccgaataaggcaacttcaggccaggacataagacgcattccatatttcactgtaattgctttcaaattaggttatgtcgtcatgtaacaggcacacacagtgcacttgctttgcccctggctggggttgggtcctggacaggctgccccgtgtgtcgctgaactgccgcagtgctagccctgattgcctgggcagtagggctgtctgcgtcccacgttgctgcacccatctaatttgtggctgtgttattgtgacctgctcgttttctgttctttcaacctgcttcctggcttttatctccttcagaatctggtggcagtggatcttcaaaaagtgctcaggtgtgcagtctcacaggccagaggctccacgggcccccttgccagggcgagcatctctgcctgtgccgctggtaacccagattccagaaggcttagccgtctggccctgaaagcgcctttatagttggtgatgaagcccatgggctggggagccgtttctgctttcaggaactgaaaagatgccccagtggggctaggccttgcctgaggtctggcaatagcctgccagatgggtgataagaaggcctacccaggtgataagcctacccaggaataaatagctgtacctcccctgtgtccaagccctggacacccttccctaggacccatggaagcaggaaccatgggcagcgtcagaggccacagcaggcaaggtggaagttcaggaggtgggacggcgccctccccctcaaagcaactgatgccccagcggagcgacaaaccctacacggtatttcagagccaaggtttgaaaactcccagggtgctagggagctccgtctggcctccgggtacctggggttggggctggctgtggccagttgcagtcaaccctgagcctgggcaaaatgcatgcaggctggtcctcctgggtgatatcctgctaggcgggtgggcagtgtacacggcagaagagggttgcggcatgaggcagcaaacgtttttttctaaaatcttgtcaagcgtggggtccgtggaatccacatgtgagcatcagcctggtgggtggggagagtgaagcctgcgatccagtctggatcatgtgctacacagtgcagagccggcatgctcacccctcctgagggatcgctcgagcctatttctaggcccaaagcgactttgcaagagactccctttattctgggcttagtggaattccagcttccaacagccatttccctccacccccttcagttctgagaacatgttttgtaacaggaaggcaggaagaaaagagaaggcgagtttgttcagctgggtcagccgcatcccaccaaggccctttcttccctccagctcaccatcgctctgcccactggaaccactcggttgccctgtgtctgccgaatgtttgtttcttaatcagcgccccagagtagagagggctttgcctcttcgggttgagggagggaatcattgatgaatggctcattaaagcccactgctgccacattcctgggtgcttaggtcacctcctgaacaatatccatcattcattcacctaccgccccacatcctggcggctgggaggggtccctgtgacgcaggaaggactttatgaccagagatgctaggtctccgtctccctcctgcagcccacagtgacaaagcagaaactgctcttggggccccctgaagcccgccttagctgggtcaccatgggccttggcacacggaggggtgacagtggatcccaactcaactgacaagcttgcctttctctgttcttccaccccccttccccgcactcacaccctgtgctattttagcaaccagagaagcctctttaataggctgcccgtgtgcaggggcaagctctgaagcctcctctctgtggtttggttcacatgtgttctcaaagacagatgagtccacatccttccttcctccctagataggtcaagggctgggtgcaggctgccttcacaggagggccagggacaggctgggaggagcggggccaccttttgcgaagcgggtgatctgctggggcgttgctctgcctgcctgccttgttctctgagtttacctctagcttggggaccaagggtgggctggggccttctttttttttttttgaaaccgagtcttactctgtctcccaggctggagtgcagtggcgcgatcttggctcactgcaacctctacctcccaggttcaagcgattctcctgtctcagcttcccgagtagctgggtttataggagcccgccaccacgcccaggtaatttttgtatttttagtagagacgaggtttcaccatgttggccaggctggtcttgaactcctgacctcaagtgatccgcccgcctcggcctcccaaagtgctgggattacaggtgcgagccactgcgcccggccctggctgggggcttcttgacctgactctgctgtctctccctcactggccagcacctcccattctactcagacatcgtggaatgaatgcccaccccgtgtttgtatgtatcatctgtgtctgtgtgacattaagcaagtcactgaacctctccctgcctcagtttcctcatcaaatggagatatatcgcatgtgatcatggggttggaggttttaaagagttgctaatgtgtaaatagtaagaactagcaattagccgttatagcataattacctttaatatgtcatgccccccgcacccccgtgctgaatgtaattttgcgggggggcgggttgagacagggtctggctctgtcaccgaggctggagtgcactaacacaatctcagcttactgcaacctctgcctctcaggcacaagctgtcttcccacctcagcctctcgagtagctgggactacaggcgctcagtaccacgcctggctaatttttgtagtttttgtagagatggggttttgccatgttgcctaggctgatctcaaactcctgtgctaaagcaatcctcccgcctcggcctcctaaagtgctgggattacatggtgtgtgccaccatgcctggctggccagaatgtaaatgataactgttttgcttcctcctgtgtccagtacataatagggctccaagtcagtatttgtgaggcaggtgcatgcctcttagttgcggtcctgagggcatggccactgccacgttctggacagtcagagtcgctgctgcccctggaagatgaccgcgatcatgaagcccaggagagctcgatgctttttgcctttccctcctcccacagagggctggcagctctggttcctcccaaatgaaatagaaaccttgagtttgcatttcttctttggcgtgccggcagggcacctctgccttcctcttcctgccagggggaggaagtttctctcaggggctcttcaccctgctttattcctggccatcacacattgacccttgtccccttcggctctttccctgcatggcagggacagcatgaccgtttaatggctttgtgaggccagcatgccagcctcacttctttactcccttccttctcggagtgggctctgtcccttctgcaggagggctttggcacatgctcttcccagtatctggaaggtctccctcatttttatcttattaactcctcatccttcagctcagagtttgagaatgacttcttcaaggacacctttctgtgtctgcctcaccagtcgcttggtgcccccccaccccgccaccatgctgaccgcactcttcagctcccatcccaggggaggtgacacaaactcggccccaggagcccagcacctggctttaaacccagctctgtaactttctaggtgtgtgactgatgggagcaagccacttcacctctcaggccctccgtttcctcatctgcaaaatggaggcagtactagcacctccctccagagatgattacgagggtgacagaattagtaagtgaccaagtgcctcgagcagtgcccgcccctagtagactctatggaagtgtctgctgcagttattgctgttattattaccacttttcctaagggcgttatttctggagtggactgatcgcttgattaatgagatcagacctggagcctcatgagagtgtctgcttttgctcactgttatggattcagcacagggcctggccctctgctgacccccagcatatgcttgtccagagaatgaatatgtacggacccatggtggcctggggcatcatgaggtcggctgcccacattctgagaattttgcatggtggagggcggcgtggtgggcgcatagggcccccatctatagaaaccacctctccacaccatccaccccacgcagcgtagtctaaaccgggtagggagaggaaggatggaagcagagtgttatttttgtaaccaagtagaagaagcgatgaatttttaatgtcccattcgaactccagctcctactcaccagtctctccgcatggagaagtggccgtcatggtcgacctgttcccaagggtggccttgtgagtgcaggctctcctcaccagagctgagggctttgtgaacctctgatgtcaatagatgcccctcatcttccaggaggacaaaacagggcaaagcaagacatggggtgagaacaggagtgcatcagtggggttccccaagcctgtgtcaggtccggatctgggtgggagttcccttctgcgtcatccaggccaggcgagtgggcatcctccctgagcacctgtgcttggggctttgcctgtgtcagtcaggaagacagagtacacggaagagttaccattgctttcagagcaaaccttcctttgacatgcatttaacacagcacggagtgattgacatgtgtccttgtgtttaatccctatcttaacctctcggttactgtcctgtttatcagtgaggaaactgaggcttattgcttgcctgaggcctcagtggcagaagcaagatgtgaatccgcacctgtgtgatgcccaagccagagctcttgtttactacccagagaagatgagcacaggtgggatgtacgtatggagggcgggtagggcagcagcccctctgaggacaggtggccagaacccaagcggcgaggtttgttcacagcctccacagggtggggtggggccatccgcagagggtctcctgccatcccattttccctgcataccagtgggtggtctgagagcctttgcagagaagagactggatctcagcacgtgcttatgtgcgtgtgtacatgcacacacatgcgtgtgattcatctggctcttactttatgccaaggagcctgtcacatgctttaaatgtattttccctagtttaattcttagagcacactgcaggaggtagattctgataaatccatcttacagggaaggaaacagacttaagtaggtaaagtcacttggttgaaaacatggaatgagtaagccaaggggcaggtattcaaacccaaacccaggtctgtgcccctgcagagcctgcaggagcagcccacacaggccaaggctgtgaggggtgctgtttgcacgcgtgcgtggccctccctgcagcccaggtgcctaggtctgggcctggcaacaccagagcacggggccttgccctcggggaacagccctcttttgtcctcaggctgtgggatgtgtcttggctactttgctgcccagcagtgcctgctctcaggcacatgtgagagtagaggcctagcatccgtggccacttccttcccagcccatttgctgctgccctttgctctgcagggctgctgggctcctgggctccacgcctgcttgctgcctgccatcaaggctggcagtgctctggggctgtaaaggtgcaggcgccgtacttcccaacccctggagctcgcacatggtaggagagaaagctcatgtgcatgcaacatccaataagactaaaagtgactgggggttgctacgggagaggtgctgagggtgggccggggacagagcaggcacactgtggagggggtgggcaggactcctgagaccagggcagggagggaggagatgctgggaggcacagggccatccagagagctgccacttcctgagcattgccatgcacgctgcaggcatggccatcttgagtcctcacactgcccgtggcctaggtggggtcttcatccccacgttgcagaggaggaaatggaagttaggaaggttaggtgacgtgcccacatgagtggtgtaagcatggttcccgccctgggctctctgaattcagtattgtatgggggaggctgggaaggtgagttagtactctccgcagtgagaacctgccttggctcccctcccctcaaggagttcatagccgtgggagggagggagacaagaactgttggagacaagaactgttagagaccagagagcaagggcgtgatgtggtctgcagggaggaggctgtctgaggcagaaccgggtcagggaggccatggtgcgggtaccctccaggcacggcatttggcctgacttttgaggggtgcccagggttggctacatggcggggcggaggtatctttagtgggggaacagcgttgtgccaccaggaggggtctctgtctcccaggtagaggaattctccatggtgagaggtggtggtgggggatggtctagctgtccactcttgccccctttcggatttggaaggaagccccatgctgggtccacactggtatggcgtattaattaggcagctgctttgtctgggagggggctttgtgtcgagtctccctgaatgagcagggctggcgacagttgtcaaaacacatggtgcttggtcagagcccccgtagaagccccttgtcctccgcatggcctccgcctgcacccggggcgtggaatgtgctcttgtgtgtccctggctgtctgcttgcttctacactggcccctgcagatggagggggtggggtacaggggttcctataagaagcagacacttggggtttttcccaggtcctgttgcaggagggtgcgtgggctggtttccctgaaggcgcctgggcgtgttggtgttaactgatctgagatcttctgtggccctgatgtctatgagcatgccccagcttgcagggggctgagtagccgggcaccaccaggaggctgcgtgccctgtgcttgggtgtacccatgccctgtcagcatcgttggtctgttagggtcagggacttcggcttcttgtttagtaccctccatcccttccagttgatcatcagaaacattctccttagatgcggctgcctgaccccggtgagggggcctgcctcccacttgccttccagcctcctctaagctgcactgagtcttaaaaataggaaggatagggctgggtgtggtggctcacgcctgtaatcccagcagtttgggagaccgaggcgggtagatcacttgaggccaggagttcaagaccagcctggccaacatggtaaaaccccatctctactaaaaagacaaaaattagatgggcatgttggcatacacccgtagtcccagctactcaggaggctgaggcatgagaatcgcttgaacccaggaggtagagattgcagtgagctgagattgcgccacagcactccagcctgggtgacagagcgagactccttctcaaaaaaaaaaaaaggaaaaaaaagaataggaaggatagggcatggcatgttctccaggagacagagggacgggggcatcttgcttgcaggaagccaggcgacacaggcgtgtgtgcagggctcagagggtctgtgttcctggcctttcctgggagggcttgctcttgggctgcccaaagctcaaagagagactcgaggaaatcctgcatttatgggagcttttcttttcctgccactttcctgttctgggttgtatctgtgcacgtgattggaacgtagcagcctgagctcctgcctgaggagagcagccacgggtcacggaagccagggtccagctggggcctttgggtctagctggcagatgaagggctggccttcatcaagaaaacaagccccatgagggcaggagcccgacctgttcattccacaccaccgagcctggtgctcagtcatgtttgtgtgactgagtgagccggcggcgggctgaggcgcttttgtctggtgtgcgtactggtctcccttgaggcagcttgggggtgtggaaaaagcacatgttgccaaaattgacagacctgggttcaaatccaagctctgccacttaccgcctggatggtcttgtgatgggtcattaaccaccccgagcctcagtttcctcacatctgcctcccggggtcactgtaaggatcagaaacaatgtgtgtatcggccatgtacggtgtgtgtcggcgagtgctccgtggcagctgcggttctcctgaggtcagagctgcggccctgcaggtgtgtggagagagccccgacagccaggctgactctgcgcactgtcctttgttctgcttccccagaccttcacggcatggtgcaactcccacctgcggaaggcaggcacacagatcgagaacattgatgaggacttccgagacgggctcaagctcatgctgctcctggaggtcatatcaggtgagactcccagccacgcagtgcggccgagccctggcacaggtgctctgccacagcggtccccagagaccctgcccacccagctgtcccattgctcctggggaggagagggcaccccttaatagctgcacggtggtctgatgggtggggccagagtggcctggtgggccagcagaggaacctgcttttggagaacagaggagactctaaagcctctctccctctcgccctctctccctttctctctctctgtctcgccccctcttttctctttgtgcacttctcaggggagcggttacctaagccggagcgggggaagatgagagtgcacaaaatcaacaatgtgaacaaagcgctggactttattgccagcaaaggcgtcaagctggtctccatcggggcagaaggtgagctggaggtggggcagcgagggtcctgctcggtttctgacctttaggctctgaagcacaacatctgcatcctgaagagaagttttgttggtggcagggcgcttggggcactcagagccccagtacatactcagcagtgatcacaacaactgctcttgatatgatgctgggcccacaagctcccccaaacccttggaaaaatccggtgggcgcagtccaaatctaggaagtgcaacccacccaaccacgggggcgacggcttctgcagggggaggaatggttttgactcggactcaggtcgccctcactggttctccttgtgccaggctcagcagacagtgacaaacatgtgccatggcctctctctgtaccaggaacacctttctcattatgccctgcccggtatcagagaaggactggaggccccatgtcaggcattgggacagggagtgcacggccaaaggtcagtgcctagactttgccctgtgtgcatgggcttggagaattttgcctctgaccaccccaggatcctcctgggccccacgtagataaccaggaccacagtccactacctgcaggccctcactagagcagcaggctctcagcaggggcccctgggttgagctcccaggcgcttttagagacaggcgaggcctgatggagccccagcagcatgagctcgcagtccactcattagtcagagtaagatttcttcaccctgacatccatgttgtcccagcttctagaaaaacaaagtaaactaattgccgttaatgacagggctctgagagtttggccaagactccgggccagaatgtgtgtgctgagttccaaggctctgccccggcccaggacctctgcgatgaggggtgccaagccttgcatgccacagtcgaggtggttggtgtttgtttaaaaaaatcacaacccaaaaattcagtcaggccctgagattttctgtccttgcatgggtctttcctccaggctctgttccagccttctgcttctcacagctgcatttattttgctcaaatgctagtctgtaaatacagaaggggttagaggagagacccatgtcagtcatcagttttcatttggagaaaaacttggtctaaaaatgttctctgttcatgcccaaattggttcactcccaatccctgtgactgtggggccttggaacaaagcctaatggaggcgttcctggggctcaaggcacctgagaaccccgccccaccctgtccccctgtccttccacatgattgggcattcgcgggagcattggcttcccgtgggggtgatgagaggggccggaggcacagctgcaggtcagagaagcagctggtggatgtgtcatgagaaacgccatcctcctctcctcaccggaactccataagccctccgttaccagctgcacctgtacttgctgagccggggagctgcggccttgcccagctctgcaggcccggccctcaggaggtgcacagaatagatttcctgaggctcgagctgcctcgctgcactaaggggcaggtggtgctgctcagtttctgggtctggggctctgaaccctaggacagggtggacactgggtccctcccctgtctctgggcagcagaatgagcatatttcctcctctcaaaacccgaaagctgtggctcatggacacccccttcctctgggtgtgtccccgggggaaggtgagccccatcttctctgtgacctctccacctgcttccaagcaagcctgccctggagtattctgctcagaggtcagtgagcagggtctcctgtggtgtcctgggcctccagctctgcagttagctttggaactcacccctgtgcccagcccttccccgagagtgcttgcagcagtggcgcccctctgtcttctttggaagccactccatcatgccccttgcatatggcgtgttgacaagttgggaggactgccctaggcacggctggctgatggactctgggatgaggcactgccttctctcacccagccgcagacacacagctgtcctgggccttgcagagatgatttttctcttaagttactgaggctgaagaaggtgtggtccaagcccttcttttgagaagtttcagcaatttttttttttttttttttgagatggaatctcactcttgtcacctaggctggagtgcaatggtgcaatctcagctcactgcaacctctgcctcccgggctcaagcaattctcctgcctcagcctccagagtagctgggattacaagcacccgccaccacgccaggctaattttgtgtttttagtagagacggggcttcaccatcttggccgggctggtctcgaactcctgacctcaggcgatccacacctgcctcagcctcccaaattgctgggactaaacaggcgtgagccaccacagccggccgcaaatgtttgtttttaggttagttcagaaagcgtgcagtctggcctcaggcccgtgctctccccttcctgacaacacagcagccatgcttgttcctcactggccttccaggcactggatccagtggtggtcagagcagccccgccctcacgagggcaggcagacagtgaacaagtaaacagcccgaccaacatgtgatttcactagtgatgccttggggcagcacaggggccagggagaggaactgggtggcgggttggggagctccttgggacgggcagtcagggaagccaccacgagaggtgacacaagcagaagcttacacgatgagaaggaccagccagttgagggtcgcaggctaggggcgtgctttgtgagtggacagagcgtatcaaagcaagaaagagcctggcttgcccagaggatgcagctagagaattccagcaggatggcagggcctgggccttcagggcaagccctttccctgtgggccaggcatggtggctcacacctgcaatcccagcactttgggaggccaaggcaggaagatcacttgagcaggagtttgagaccagcttgggtaacataataagacccagcctctacaaaaagtttaaaaactagcaagatgttgtggcatgcgtctgtggtcccagctactcgggagactgaggcagaaggattgcttgagcccaggcagtcaaggctgcagtgagctatgactacaccattgcactccagccagccagaccctgtctcaaaagaaggaaaccaaccatgctcgctgctgtgtcgatgtggattatgggcgggaagggtacataggaggcagccgcattgagctctggagatgacagtggcttggtggagagtgtcggcagtaggattggaaggaagtggacagattcacaataaacaataatgtagtgcacatttgctgactgcgagatgaaaaagaccacctttgccctgagagtgggggcccggggtgcccccctgtagtcaggaggtacgcagattacggcagaaatgtacagagcactgagagttgagagaggtgtgaacagaggccacacgcctgggaccagcctcttggaggagcggttttttgagttgggtcaggagaaggagctggctgcggggccagggacccttgtggccagaagcctgcaggcgctcagcagcaggaggctctgggacagtgctgcctagagactgttccctgcattttctcctgagggaggtggaggaggacaggcctgggagatgcaaccagggggtggtttggagcctttctctagatggggctggaaggccaccttcaggttgggcggaggagcctcactctggttttaacgaccttctgccctctgcccccttccctgtgtgcagagattgtggacggcaacgcaaagatgaccctgggaatgatctggaccatcatccttaggttcgccatccaggacatctccgtggaaggtgacagccacctgtactgcccccgcttcccacctgagtcagggcgggttagaggagagctgaagtgtgatcttcatgcttcaagcctcttcctgtttccttggggtcactcacagggcctggcccttgcaggggtagtcagtgggtggcaggtgaagggaggctcctcccagctgcctgcctcttggctccagtgccttccgagtgcctttgctctcacagcctcatctcagtggaccctcacgccaccctcatgagatgggctaggatggctgggcccgttttacagtccaggaacccaagtcccagaacagactagtgagagagttgggcctgggcctggttctctgtctgcttgacatccccatccttgaaacttggcccccatggacccgttatgagctcaggccgtccaggaatggacaatttcgcttccctgcaagcacctgtgtgcacacaggatgggcagagccacctgggctagcgtgcaggggctcccaggtgccaggtcgcagtgatgactgggagagatgtgcttcctgccctcgaagggctcccggtctgtgaggacagccgagctatccacggggaacagaagggccccctaggcctctctacagctggtatttcaccttgttcaaaagaggccaaggccggtatcaagggcctgtctgcagtgtgttctggtggtgaaaggcacaggcttggtggccaggcacatggcacagattcaggccctgacaccaccacctcctggggcagccctggtcaagcgactctcctcggggccgtgaggattaagcagggccgtgtgtcctggcagttgggcctggcagcatccgtctgcatccggaatgggagtggctgtcccgctgctatcactgctgctgttgttaggacagatatcctctccccttgggtttcgtttgaccccaggcctgagccgaaagtcccatccaacttgggctgagttctgagggtttatttttgagccagtgctcactgtctttgtgtgttttgcagagacctcggccaaggaagggctccttctctggtgccagagaaagacagccccgtataagaacgtcaatgtgcagaacttccacatcaggtaagcgccagtcctggtcatcctctcctttcctctaggaacctgagatccttcctcccacctgccctgtttgctgtgtttttgtcgtggtctgtgagatgccagccctcagtcagcccctccctggccacgggccctacaagcccatgggaaggtcacctggtcctctctgaggaagaggaggcagtttcccagccatcctggctgaaggcagtaaggtcagccctctcgccggcctaatagaacgttcttcgtccccaggcaaggtgactctcagaagcaacaataaagcttttcatttttgagacagggtcttgtgctgtcacccagactggagggcagtggtgtgatcactcatccctgctgccttggcctaggctcaagtgatcctcctgtctcagcctcccaagtagctgggactgcaggtgcatgcagccacacctggctaatttttaatttttatttttagtaggaacagggtctccctatgttgcccaggctggacttgaactcctgagctcaagcagtcctcctaccccggcctcccaaagtgctgggactacagatgtgagccactgcctgcctctggcctcttcctttattttgacagctcaggagtgaattgtttttagaattgctagtaaatttagtgttggggaaaaatgtactctgtggctgctaagatgaacaagcctcagctccaccatgaacctgcttccctcagggtgagcgggagatgagacatgtccaccatccccgtagctgaggcgagcatgggcactgccgcatgaggtccagggggcggcaagaggcaggcctgcctggtggttgggagcactggctctgggggcggtcctgaggtcagatccggtttgccttgtggctccaccctctgagtctcctggatggcccgcacaggaatgaagagcagggcctcatggggtttgcagcggcctcaggctctctgggacccttgctgggtacagagggcttttcccatcgtgctcaccctgatagcatgtggtccctcccttggtcactcttctctgtgtgtcttcttttttttcctgccactaactgactgaatctttctatagtttccattcattttcttcaactagtaagtatctagcatgcccgctgcatgccgttagtggagatacagtggcacccaaacaaagttcccatttgtgggaagtttacaccacagcgcggggaccagctgttagcacagcggccagtaatcctgcagcataacttcagtgagaagtgctgcacaaagacagggaagtcagatgaagaaagttccctgggtggcctttctgaggaggtgacatcgagcttgacctcagagggaaccaacccttagagggtctcagggaggagaatgtgacccatatagcttgtaactgaccaacttgtggccttggggaaggtctctttcctccagagaccagcatgccaagtgaaatcctggcatttagccagcccacggactggccttcctgtaagtcaggtccgccagggtgtggaggccacacagcacaaacaccagcatcctgcagtggccacctcccccgaagcggcctgtctggttcagggcggcctcccatggaaggtgctagcagttataaagcagttgtcaggagtcaggcactgatccaagcatttactcatttaatccgcacaacagccctatgtagcaggtatgtcactatccccatcatacagatgtggaaaccgagatagcctggcttacccgaggtcacactgtcagtaggcagaagagtcaggatttgatcacagactgcctggccccagaggtcatgcttgcagcctctctgccacactgtctccatgcagtgcctggcacaggccagactgcagtgaatgggaattagtcactgctgtgggtgcacagggccatacggcactctcatgacagtgagcgggccctcctataacctttgcctttccttccccagctggaaggatggtcttgccttcaatgccctgatccaccggcacagaccagagctgattgagtatgacaagctgaggaaggtgagtgtctccagctccccttgatggcccacagacgtgccctgtctgaccccctaactccgggtcaccatccccatgcccttccatcgccagcctccagatctgggttctgcacgcagatgggcagcctgggagagccttgtgcaggctctccgcaacccctggctcggtggctgactctcacctcccttattcccctcgtggactgtccagtctccctccatggcactgcaaccaacccggggttatttaagggcctggccagccatgctttataactccccttcctcaatcttctggattctagaacctcctctgcccaaaggggcagagggcaaggaattccaaaccatcaccacaagcccatgttgcccatgcagggtcctgctgtcatttgcctgtacaaagcctgtatggatccaggccctggccaccagaagctgccagcctcgtgggggaaggcaggacaaaaattgtgtccaaagcaaagcaccacaccaggccgtgtacatgtgctcaggctgaatggggtggcagggcatggggtcagatcagtgctgcggaggaggctagtgtaccccgagcgagcaggagccaggaaaggtcccggaagaagaggcagcttagagccagaggagggcttcctgggggaggcaccagatggcacccagcccgttccagccacagtgagcaagagagctgggccccggccagggagagttggagtgcagtgggctttagtcctgtaagcagtggggagcctgtgagggggctgggggacactttagggtggttgggacctgggacctctcggtttgctccccttacccagtccccagtgctctctcaggcctggcccacatcttccagtcaatgtgaaaaccaggttttagggcaaggggcttaagctagggtctgtgggtggctggaaattgtatgaaaagagtacacctgcatttttctggagaaaaagccctggtttgccccacaaagatttcacgaggcactcctgtgagtgggaattgaatttatccaggcggtgccctcccgctcacacatcacacgtggctgagaactgcctgaagaaacccccaaccctcgccctcccgggtctctccctctgggccagccctgcctccctcctgctcctgcaccctgccctgacggagttcttgttgtccccacttgcctccttctaggacgaccctgtcaccaacctgaacaatgccttcgaagtggctgagaaatacctcgacatccccaagatgctggatgcagagggtaagtcatctcttctgttcagccaccactgtgcttcctgatggccttttctgtccagggctggcctcgggcaaggggctgtgggcacatcagagctttgggtcaccttggggagctggcagagccagcaagaagggctgaatgattctgggtgaactggggacagccatgtcgccctgggagacagagcaagggtagcctgggctggccagatgccttcagggatgaagaagcgtatggggagggggagctgaaggatcaactctcctgagggtgcatctcctcagggcccaggaagggcaaggtggctgaggaggggtgcttcaggcttcctgcgagcaaccctggcctctccctccctacctgcagcaggcatggagtatggagcccgacaaagtggagtgttttgttttttccttttccggctttgctccatttcccagccatgcactgccccatttcctagccatgcactgccccagctgggacctgtgtctctggcctctggtggcccttggagttgactgtcctgctgctccttgaggccattctcagagagaggaagtggcctcattttaatccgcttcccacagccttgtcctttccagacccatgggagagggaggggctgagggtgtggctgagcccacccaagtcacgcgtcactctgcaggtccctctcccccaaggccgtggccttgggagcccgtggatcccagtgagtgacgcctccaccccccgccctactcgggcagtttaacccttgttgttcacttgcagacatcgtgaacacggcccggcccgacgagaaggccataatgacctatgtgtccagcttctaccatgccttttcaggagcgcagaaggtaccgagcagggccaggcaggccctcctcgccgccaccgcgcaatgccgccgctgcctctcgcctcccgtgctcacctcatttctcttgcagacggcagtggcctctctccaactggaagccacccccagctccctggcgttgctgccccctcagccttagctcacacacctattgggtacctcatctgtgccaggcttttccaggcattgaggatgccctggtgactgagtcagacaaggtccctgttctcagggcacttccatgctagtgggagaaacatacagcaggcctgtcacaggagtggaatagagaaaatggggccagatgggggacagagatggctggggtgaccttcagctggtgctgtcaatgtggaggggtgaagtgagcaggtacttgcagcaggagctgctagatgcaggctggggcacaggtgttccaggcagagggtgaagcactacgaaggccctgagacaggaagaagcttggcgtattcagggaccagctagagaggagtgagtgacacgcagtgatgggtcaggcccaacaagacccttgtggtgtgggataagaaattcatgttccactctgagggccatgggagccccttagggtcttactccgtggtgggagctgctcactcacattttcagacagatcatttagcaactgactcctccaacccaaaacaaagctgcctttatagggcccacagctagtctgtctccagcccaggccggttagaaaaggaatgcaccctattcggactccacaaaaccccgcaaggcatgtccacgcaggcctggggctggcttccagtccagagcaagtgctcttcctcctgcatgagcctcaggccggcccggccgccctccctgcgtctttcactctctcctgcctctctctctctttctctctctctctgtgcagatattgtgggcactctgaggccagatgagaaggccatcatgacttacgtgtcctgcttctaccacgctttctcgggggctcagaaggtgagctgggccaggcacacctcgctgctggggctgcagacctgccttcaccaccgcccttgcatcaccgctggccatctgtggttggagccctggccaggccgtgggccgccacaccacacagactgaccctgccggcctctgactcggaaggtcccctggggcaggtttcccgcctggccggtgctgggcctgtgctgaggagtcacagacctctgtttgaacacagcccaccctgggaggtgggtggtggcatcctaggctctcaggcggggaaactgaagccctgcattacagtcaatggcagagctgggatttgactgcccggcgttcccactcgccctgtccatcatctgcaccagggctgcctgcctgcccctgccaagcccttcgtggggagcactgggctttacccgttttgcagctccttcctgccaggaaaggctcagcatgtgcagcccaacctgcactcacggtcccagccctccagaggccaggcagagcccacagagcttgcgtggcagtggccgccctcctgggcccagctgacctcatgctgcctcacagctcctgccgggccctcagcgttcacgcagaggcccaagcactgctccccccgcttgccttgtggtctctgaagtatctcaggcagcattcccgatgcctgctttgaagtgtcagcagttggcacaggttcagaggaggaggcagaatcgattcttgtttactgaacatgtactacacgctaggcaccctccaaggccttcacatgcacaggcttccagagggtccctgtgcacacccccaggagggctaggcgcagttagccccatttgagagaggaggaattgaagtttagggaaacagctattcctaaaactagaaggggggggccgtaccttctgtggacccctgctttgagcctcccaactagcaggtgcattacctaccgtcagtctggcctggccccactctgccacctcttggtactgtgaccttgggtgggtcacttgacctcagcttccccacctgtgaaatgggcatcgctgtagttcggtctcacaggattgttctgggcgtgaaacgagctcctgcaggcaaagggcttagcacagtgcctggcacggcagctgccatttaggcagctgccagggagccacagtggtggggagtgtggttcttcccagcctcgggccagaaaggcctcttcacctcctcagcatgcgattggagcttgtgtttggagtgttctgctagagggcacgggccaggagggtggagggaggacccctgacccacactcccgcgggagggtgggcagggaccagcagcaatggacgattcgtcaccacagaccccaactaacagcatgtttgccattggactcacccctacgggccccgaaccagccccctgcccaccacatggcctcaccagattgcttttctttctacccacactgctcccctgtgcttagggctgaactccagtctggaggctctgagggattttgggggagcagggactggcaggcaagcccaggacagtatgggtgggtgctgaggcactgggcctggaggcttgtcactggcccctctctgagggggtagtggaggcccggctgcagggcgctggctggtcagaaaggaaagtgctgggtccctgtgtgctcctcaggacagccccgtggtgctgctcctgctgcctcgtttccccagagacccagtccaagctcttgcaagagtgctctctggggttcatgttttataaacgcagagtgaaccccaggtctagcgccagtgtgcccattctgtcctgagatcatttatttctagtcaccgaagcgttcccgcctcgttcctttattcactcactcattcagcaaccctgaacaccgccagtgcactgagccccaagctggatgcgggaactcagcggtgaaacatgattcccttgccttgcggcagccccgtgctcacagagaggacttgagtttcgggtgccagttgtctctgccaagttaggagtcagggactgacctctgtgacccccacaagctgcagccctggctgtgttttccacactggcctggggcccatgttcattggctgaggaacctcttggacctcatctctgaggagcaccgcctggggccctgggtgtgtgtcccgcagcatggcgcggggtgtgcacgtgcgtgtgtgcgctcacacgagcaccggctgccgcctccccgcctgtctccaggtgccatgtgtggaggggagaggctgggcgtcgctgcctgcagcactggctctgagccgttggccaagcctctccattttccttccccatcactctgtagaccctcctcactctttctgttcctgttctgttgccgtttcaactcctcctcttggaccctttctgtgcttcctgaaaggtacctggtctctctctccccgtgtgcaccccctgcctcctctacactgttcactgccccctagcaggacagggcaggacgctctcctgtagttcaggcccagggactatgtccaccactctcaccctccaaagccccagcacttttctgccccacggatggtgacttctgtcctctggagctcctattaacattgcctccaaggcaggagagtggacaggcctgagtgtgctcctgtgcacggaccactaggctcctccgggacccgggcgcccctgctctgttgcccccagctctccagctctcggcttcccatcctttcaccttcccaccgggagagactcctccgcagtcttaggtccaacgcagccgacccgtccagcctcaccctcctctgtgtggggcactagagggtttgcgagcagcagtgggagggctccccaaccctcctcggtgcctccagggtctgggctttctggacccaggggcattttgcagtcagcagtgaggatgccaacaaggcctattgggacagggcaccatctcactggagctgtgcttcctctccttcccctctgtgaggagttccgtgggccatggaccagctgctttcaagggacgtgcccgtcaggagggagggtggccagcccccaggcagccctgactgtgtgctcccctccaggctgaaactgccgccaaccggatctgtaaggtgctggctgtcaaccaagagaacgagcacctgatggaggactacgagaagctggccagcgacgtgagtgttcccccagtgaaagtcagggccacctcattatcctcagccagaggtcactgtgactcttgcagggggaaagcaggtgtggcagcgagatgacctagaaaaggctgcgtggtcacagaccatggcatttagccagctggtgtgtacacgacctctccgtttgcttccacaaggctaagggtcagaccggcagccaccttgccagccagcccctgggctcccgagcttgggttcctacagagatgctcagggacagtgtttcctgggcacctcagtgctttagaatcacctggggagctttgtgaaagcccctcttcccgtgccctggccctggagagagtgattcagaaggatggagaggggcctgggaaccaataggatagcaggccctgtgcaggtgcttaacgagcagcccagcaagacgggaactcggattatcctcctttccaagtgaggaaactgaggcccagggagggtcaggcacgtgcctgctgttacatgactagtgggacagagagctgggcttcacccaggcagccctgctctagagtccaaacccaatgcttcagttggaaataagggtggttagtacaactcttctggaggctcttcatttttgaaatctccatatttaaaaaataaacgtaggctgggcgcagtggctcacacctgtaatcgcagcattttgggaggccaaggcaggtggatcacttgaggtctggagttcaaaaccagcctggccaacatggtgaaaccttgtctctactgaaaatacaaaaattagccgggtgttgtggcacacacctgtagtcccagctacttgggaggctgaggcaggaggatcgcttgagcctgggaggcagaggttgcagtgagccaagattgcgccactgtactctagcctagcgacagagcaagactccattaaaataaaaataaaataaaataaaatttcccaaagagcagtggtttgactgctcatctagaaccagtggttcccagattttgcaatctcatagaccaggaaaatttgaaaaactattggatgtccaacctaagagggccagctttttattttgccaagttacggatgttttaaaaagaaacactaccatctgttaccaccagcacttctaacaccaagataaggtaaaaaggttattcttagaaccccagccattgccaagaaagggcagctggcagcacgcctcacaatgtatccacacagaggtatttctgtctttgaatttctcactttgccagaagttggcatttgggaaccacttctccagcttgtccgtgctggcagataactgattttgtacttctagaattgttttattatttttttgagatggagtttcactcttgtcacccaggctggagtgcaatggcacgaccttggctcactgcaacctctgcctcccaggttcaagcagttctcctgcctcagcctcccaagtagctgggattacaggcgcgcaccaccacgcccagctaatttttgtattttttttagtagagatggggtttcaccatgttggtcaggctgatcttgaactcctgacctcaggtgatccactcacctcagcctcccaaagtgctgggattacaggtgtgaaccagcgtgcctggcctagaattgttttagaatgtccaactgtttgttaccctttctcactccattaaagatctgagtagttcctaaaagaatatgtttgtttctttttcaattttattttctaatttatgtcccaggcccagtgcacatactggcctagccagactgagccaggtgggcttgtcggccttgcccttgaggcacttagtgagcccagaagcagtcaggctctcagcatggagctcagtgaagacagcggcagtggggcatgtgacagcatggaaagggacctttttggcgggggcatgggagtggaggtttcccctcttagacctgagggaaaagactaagagcaaaggcatgggccaggcatggtggctcacccctgtcatcccaccactttgggaggctaaagtgggattgcttgaagttcaggagctcaagaccagcctgggcagtatactgagacccccttctctataaaaacttaaaataaaaatcagccaggctcggaggtaggcacctgtagtcccaactacttgggagactgaggtggaaggatggcttcagcccgggaggttgctatgatcatgccacttcactccagcctgggtgacaaagcgtgaacctgtctttaaaaagaaaagcacaggcaggaacaggaagtaacaagagaacagtacagtgatgcagggacagggagggagcccacgctcccagagttccaggttgggggttctagcaggaatcgtggagaagttgggctggggagcaggggtaaccccctaaggtggggccctcaaagatccagatcccatgtgcccataagctggggggcagcccgtcagcactctgagggtcccccacaaaggccacgctggcttctgtggcccacagctcctggagtggatccggcgcaccatcccctggctggaggaccgtgtgccccaaaagactatccaggagatgcagcagaagctggaggacttccgcgactaccggcgtgtgcacaagccgcccaaggtgcaggagaagtgccagctggagatcaacttcaacacgctgcagaccaagctgcgcctcagcaaccggcccgccttcatgccctccgagggcaagatggtctcggtgagcaccaggattcacatgggagcagctgtgaggggcagaggcagccctagaactgcctgtgggcagtttggccagcgtaatctttcctaagttgttgatgtcctgtgggacatggcatggcctttcggatgcagtggtcggggaggggtgcacttcactcggcattgtgctcccctttggccctcactcactgtattttacacccagggttttatacgcatcccaaatccttgccacgggttgtgtgggtgtggagtggtgtgaatttggagccgtggtctgccatgatggcatgaccgccatgtgcttgaggcccttcatcagcggaggggcagtgcgccctggacggtaccacctccccatctatggtattcatccattcattcatgcactcacccgttcacgcattcattttgttaatccagaattgattgtacctgctgagtgctggggggccctgtgtaggcatccaggtataatagcaaagcatgacacagacatgaccccagccaagttctgccaccttcccatcagcatcccttggagacatccccctgggtgcctccacttccttgtgatagccctgcctgctcctgccctgccccaggacatcaacaatggctggcagcacttggagcaggctgagaagggctacgaggagtggctgctgaatgagatccgcaggctggagcggctcgaccacctggcagagaagttccggcagaaggcctccatccacgaggcctggactgacggtacggcccagctctgccccactctgcccagccccgctcccgtgctcccctcctgtctctcaggcatgcatgggtgtgcacacacagccccctgccacgttgggtctgtttctcaggtgccctttcttgctgcttgggagcatgtgtgtgtgtcagaaatgctgctttagagccaggttcagtggctcacacctgtaatcccagcactttggcaggccaaggcaggaggatcacttgagcccaagagtttgagaccagcctgggcaacatagcgagaccctgcctatacaaaaaaattttagaataataaaattagccaggcatagtggtgcacacctgtggtcccagctactttggaggctgaggtgggaggattgattgagccagggaggtcaaggctgcagtgagccgtgattgtaccactgcactccagcctgggtgacagagcaagaccctgtctcaaaaaaaaaggaaagaaatgctgctttggattccttcagccccagaaagcagggaccattcaggggccaggtcctctttgttgcccagtctgccctcgcctcagaggtgggaccctgtcagtcatccaggaacacagccaagccccctccagcacttcagggaagtgaccttacacccatctgtttgtcccctctgcgtgtcttccccatccagggcgagtgtgtggggcaggcctcttccatcccccgcaccctgtgttcagagtcggcttccctctcccacacctctgtgagcgtggacggaaggctggggagcccatgttcactggcacgtccctcaggctagaggagggcctgcctcctgggcctgctgccggaccacagccagtgctcaccctcagacagtgctcacccactgccttcggcccacccttcagcatggcccacctgtgagctcctcccacctcccatcccttcccagagcctccttcccgggcctggctccccctgcaggagcgccactgtgctttctgttctcggcagccctgcagctgcctggccgttggctccagatgtgggatttcatcacgtccctggccctcttttgggtcatgccaaggttgagatttcagatcccaggggtctggaagccttcagaaagctgccagtgcctgggagagccacaagagccactcacaggactcctctcccactctggccaccaccttcccaacacagtctccctggccctccggccgccactccgcccagctgagcccttccttgcattcctgagtgcattttctcacccctccccaccctggcccgcatgcgagtgtgcagctccacacggcctgcagccctggccacggcccagcttgtgccctcctcacatgagctcagctcgccattcccgcggcagctgccagcctcagagcagcccagcccctttgctaccaggaaagagtgcgagtgagagagtggatagtgagggaggaagggcctggccaggccgggtgccgcacttccctcttgcctggcagaaaggcacccatgtgaggagagcgtgttagcaccgatgccatcttgtgtggttggtggcctccatccattcccggattcactcattcgttcaacagacagctcaggtggctccagccgtccttatccatggaggcctgggcgtcgccctgtggctgaaccttctgggggtctttctgcccacccatcagctcttcagtccctctacagggctccatgaggccctgcagatggtttcctgaggccaaggggctgggtgtggtggccccactggcattcctcccctgggaagggctctggggcagccttcacctgaggtgtttagaagccagctcagtctccggccagggcccagctggttcagcggcctccacacgtccctgccccacccctacctgactgggcatccacgcgggtctgcccatggcgtctgccagagcccccaggcaggctggcctactaattcccaagactcagagcctctgtcctctcaagtagcagttacgtgaaacaggacaggcaggccctccacaccccagggtctggtcgtagcggcctcctccgccctggggtgggtgggccaccttcactccacacccctcaccatcccccacagcccgcagcgggagggtcgtcgtggatgcttctctgagggacttgatttcctgggaatacgaccaaccccgaacgaccccttgtccccactccagttgtcccttggcctggatcccagatagctgtggcaatggtccgctgcccacatcctctcggtgcacccttgccaggactctgcggaggcagagggagatgtcacctgctgtttctggttcctgcccctgggagaaagcagttggagaagggaattgcaaggccgccttgtggctgagcctcctgccccagggctgcgcagcagggccggtggagccagagtctcccaggcctcccacttcttggccatcagtgccagagccgatcctgtggggagtctggtaggtgcctgacagttgagactgggagaggctgaggtgaggctggtactggctccatgcctgctgtgctcgaacaccacctcactgaaacttgagaatagttccatgccacacaggtactggggctggccccattttacagatgaaggcacaggcccagagaggcctcggtggctgcactgggcgggcagctgtcaggtgctgggacagagctgaggggatctccgctaccacttgggggaagcccaaggtggtgtgcctgaggcagggcccctgtaggagctggggtgcagccaccttcccaggctggcattttccctgcggttccctaaagaccttcacttgcttgcagggcttccttgagctttggttctgggatgtgtaattagccaggatcagggactaataacagcgttcctcctttcctttaaagggcctgatggtgggcccgccccaatgcacacaggacaccttaggacagcgtggggcacttagacgtggagaggaccaccacctgtgcgggtgcagggtcagggtcctagaagaagctggctctgatgcttccccttccccaagcctgctgggacatgggctttgaccccgggtgcttctccggatcaaagccctccagaaacaggtgctacctttctaagccgtgctaccacggcccgatttgtatggtttcctactaacaaaagttgctaagtttaggacacacaggttgagatggaatctctctctcaggctgagcaaccctgaagtgtccatccaggtccatccaggttacagttgggcttagagatccctggagggtacggaagaagattctggaagtttccatgccactgtcattggcatggaaggatgtggggtccacagtctctctttccctccctctgcttggacagcccctccagactcctgccccacagctgccgtgctgtggtctaagcgtctctctgctcctaccagggaaggaagccatgctgaagcaccgggactacgagacggccacactatcggacatcaaagccctcattcgcaagcacgaggccttcgagagcgacctggctgcgcaccaggaccgcgtggagcagatcgccgccattgcccaggagctcaagtacgtgcgggctcaggacactatcatcacctggctctcaccacagcctgcccagactggtggcggcagcacgccgaggcccagcctgcctcaaggcctggaatagggtccccagtgccccaactgcacctccttccagaagccagggaagggccttatgggatgaggccttttgcccatcctgtctcagccccaggtgggacacctgaaggatttggattctctagcaggagggaggtgtctggccccttgtcttgattcttcaggctttaggggtccctgggggtgtcacctctcctggccaccccaagtaggccctggtcccctgatgggatgggccccagcctccgttgctcccagccataggtccctgagggaaccaggctgcacagtgagcctattgttctgctcggccccttccctttcttgctcagaatacacttattgtaagagcttccaggcagccgggctccttcccctccccacccagtcagataaacttgtgtacacaattagtacgctgagggtcgcgctggtgaatggggccttattccaccagtgcagcggccagcagcagggcgggcccaggcagcaggaggcccaggccattacttcatggaaaatccacaggccctcgaggggcagcagggctcccaaaatagccatctgctcaaaaataggatccttggctataactgctctttccaccgacacccccaccccaccacagtcacccccaaaggtctgcttattcctatgagtccaaggcccgtttattcctgagtccaaggcccagccctgatgccccagtggagccccatgctgggcagagctggtttcctccccgactcactacccactactgtccgggtgctttgagggttccccattggctcagccagaggcaagagtcccgtggggccatcacagcatttggcacagttggggcactccaggggtcctgccaccaccacgtccaggccaaggagagcaaggtcacagatgcagcaccctcgggggtgtgggggtgggacacaggcagcttccccagtgacggaagagcccctggaagctggtaggaaacagacttgaaataaaccctaggcttgcccccttctcaggccctgggcaaagctatgtgaaacccattactctgctcaggaacaggcggtccccgaagcagctctctggacggtagccctgaaggaacggaagggagggctgtccgggtcctgtcttttctgctgagggggaattacagaggcctgtggaccgtccaggatgagccggatgggcagccctgctgagcactgattaatggcgatagcaaaaactcactgagctctcagggctttatgtgtaccagctcatttaatccccacagcaactgtgtaactgagggaaccgaggcacagagaggccaagaggtttgcccagggtcacacagcaagggagtggttgagatgggaatggagcccaggcccccagccctactgtggagcacagcctcagcccctgtccgctgtctgtggctggctcgcctgctccccatgtcctgttcctccccagagtcgttccctgccccctacccctcctcaggccccaaggcctggttgaagggccacactcttagctgatagtggcagaatgagtcagggatgggtgagcaggaggaagccgcttcccttctcacccctggttatcacctgttaaccagctctgttatcaccccttcccttctaccctgggggtcccatgggccagaaccaagctgtgatttgattgaccaattagtgattggttgctgatatcctggaatgttgactgccccaacaccctggcctgggaaccttgggggtagatgggtccaatccatctagccacttgcccttgccgagtctcattgctctctgcccggcccgcagcgagctggattactacgactcccacaatgtcaacacccggtgccagaagatctgtgaccagtgggacgccctcggctctctgacacatagtcgcagggaagccctggaggtgaggagggggtgacatcacccacggagctctgtgcccctgctgccccggggctggtggtgtggatagtgtccagacctgtgagctccccccacctcccacggagaggatgttctctgactcctcagggccctctggacccctccccacccctcctgctcacatactgacctgccttccctctgtccctgcccccttccctcccacacactagaaaacagagaagcagctggaggccatcgaccagctgcacctggaatacgccaagcgcgcggcccccttcaacaactggatggagagcgccatggaggacctccaggacatgttcatcgtccataccatcgaggagattgaggttcgcaccccccggccccccatcttcccaagagcctctgtggggctgggccgccccctcactccagctcctcccctagggcctgatctcagcccatgaccagttcaagtccaccctgccggacgccgatagggagcgcgaggccatcctggccatccacaaggaggcccagaggatcgctgagagcaaccacatcaagctgtcgggcagcaacccctacaccaccgtcaccccgcaaatcatcaactccaagtgggagaaggtgggccggggccatccgtaggggctggggcaggacggcggggctgggggccacctccctgaccgctcccacaccgcgtctcctctgccaggtgcagcagctggtgccaaaacgggaccatgccctcctggaggagcagagcaagcagcagtccaacgagcacctgcgccgccagttcgccagccaggccaatgttgtggggccctggatccagaccaagatggaggtgaggcacggctgagccccacagagctgagaaggttccaagagagctcccgtagtgagggggtccccggccagcccagggcctgcagactgaggcgcctggcagagcaggtcccaattctcaccacccaggggccgtgatcaccctgcggggttaggagagtccacagagcttgcgcctggaatcccggcacctggggaggctgaggcgggcggatcgcttgagcccaggagttcgagaccagcctgggcaacatagtgagaccccaactctacaaaaaatacaaaaattagctgggcatgatggtgcgcagcccaaggaggtcgaggctgccgtgagctacgatcatgccactgcacttcagcctgacagcgagaccctgtggtctctagtgggctacctatgggaggtgggtttgatccctgaatgccctggtctgatgattgtgagactcaggcactattgaacctctgatcctgtcctcccagctctaaaatggggatgaaaacagttaccttattacttcaacaaatgctttttgcaccaactaaccagccacatgagtgctgtcattcttacagcagttctgaccaccactcactgagcactcactacataccaggcaaccaggctggcagcaggcaacctcgtttaaacccagcaagcctgagagggggtccgggtgccaggcaggtcagccctgaggttcatgccagccacgcagcatgtggacttgtgggtgccgagacatggagtgcccgaggtcaggagctgcagccaggccagggttcagatcccaactctgcctctaacagcactgagctgtcctccgtgagcctcggtttctacctctgcagtcagggcctgccacagccctggcctcacagagaggtcaagggtaaaatgaagttgggcacagggagcgcttggcagagaaaacctccctgtcattgtcatagctgctttaacatgagagggcaggaccggaggggacagttgtgagcagtgggccttccctcccagggacccatgggccaaggccccaggccaaaggggccccggggaagatgcaggccagcagcgcgagtgggctcctccaggtggtcagtgggggcaggcccaccagcctcaccccaccgcctgcacccacccccgtaggagatcgggcgcatctccattgagatgaacgggaccctggaggaccagctgagccacctgaagcagtatgaacgcagcatcgtggactacaagcccaacctggacctgctggagcagcagcaccagctcatccaggaggccctcatcttcgacaacaagcacaccaactataccatggaggtgcgcggctgccccgcccgctggcctttccaccagcatggccggcttcctcactggaaatggttcgggccagtgagaagatagctgtctgctgtctgttgtttttcactctgtttaaaaattattgaagagaccagcactttgggaggccaagtgggaggatggcttgagcccaggagttcaagaccagcctgggcaacatagcaagaccctgtctctacaaaaaatgaaaatattagccaggcatggtggtgcatgcctatagtcccagctccccaggaggttgaggtgggcagattgcttgagccagggaggcagaggttgaggtgagccgaggtcatgccaccacacttcggtctgggtgacagagccagactctgtctcaaaaaaaaaaaaaaaaaagattgaaaagactagatcaaaatgtttagacatttttaaaaattacactttccctagcactgctctcatcaccatgacaatgcccctcacaggacaagctgttctaggggcccacagagggcaccgtttgccctgtggccttagcagtatcagccttgctcagggccagagccagccagcgggtgccgggtcagggcagcagctcccactggctaacactccggggacattacaagctggtcgccgtcatattggtagcttgagaaaccaaaagactggacactcttgatccaacccatacaggtccacagatgcttcaaaccagagttggcttttttgtttttttcccctgagagccagtggtgagacactgaccagagtttgtccaaacagtctccacagggatcccggcacaagattcatgggtccttgcccttctgctgcccctgtagctgggaaacacacttactgtggagacagacattggcagaggcagcagggaggcaccatggcccgtgtcccctgtgaggtgtacaggagagcaggggctttccccagggcgggaggacagttcacagtcctccacgtgtgaaccacggtgaggacagttcacagcacccggcccacgatcacgcccccgtctttccgcagcacatccgcgtgggctgggagcagctgctcaccaccattgcccgcaccatcaacgaggtggagaaccagatcctcacccgcgacgccaagggcatcagccaggagcagatgcaggagttccgggcgtccttcaaccacttcgacaaggtgagcagcctgccacctcctcggcctctcccctcccgccgttgccgtaccagcccacaccttcgtctctgcatctgttcgtccattcccatcacagttgctgagcgtcggccgccactcccagggccagcagggccctgccactgtcagggtgtaggtgtgcggcaccaagaccccagcctgggccacttcacacgcacaggcagggggccggaggtcccaagtcctgccttctggggtggcatcctcaccacccccagggcagatgaagtctcagcacacccaggctttgcgacccggtctgtgaacctggacacagacaccccgcacagtgcttttagaattcagatttggtccggcagcctcatcagaggggccctgagcgccagagtttgctgccatccccagcccacccctgccgggctgacggactgagaagtgtgcagcctcagctctgcacctggcgcccccaggacaggatacagtcccctctgtcccactccaaatcccaaaggcaaggagaaccccccccccgaccctccaccagtcctgggacttgtcctcagttctgtagcatccagctgccacccctgctgtgggcagagaggtcggggaggcctctgccttcctttgagcttccgaggttggggaaaggatgaaaggggcccgtgccgcccccgaccccacgtgtccctggccatctccttgtccatgttgcctctaactctgtgtttccctcccctacgtgtcccttccccctgccctctgcatgtgaccccgatccctcatcctggtctccacgccgcccctcccgcacacctgccttcggatggccccggcaggatcatggcggggcgctggggcccgaggagttcaaggcctgcctcatcagcctgggctacgacgtggagaacgaccggcaggtactgcaccctgggccccagcggaccatggcattaactgctctctctctctctctccttctctctttctcccctcgccatcccacccctgccatcctgtgtgccatctcatggctctcttgcctccctgcccacatctccctggaccccttcccttttacctggtctcttggggccgctgtctccctgctccccgccactgtcctgtctgcctgctgtgcacatggggcggcccctcttgcctactctgggcccggcctcctctgctatgcctgcgtcctcggagcagaagcagacaggcagcatggactccgatgacttcagggctctgcttatctccacaggatacagcctggtatgcagctctgtctccccagccacccgctcctcctcctcctcctcctcctcctcctcctcctcctcccccccacctctccccctcaccgcctccagagcttcctcgtcctcggggacactcctccgcccgagcagcgcagccgtgcctgcctcttcctctgctgcatctgccggggtggggtccctccgatgacttcccgagccccccttcttccctagaagtctccagaaagagggggcagctctcccactctctcccctttttctttctctttctctctttcttccccatcctccagagcttactcgtgagcctgggctgagggcagtagaccccagttccctgctgtgggagaccacgagaggggagggtgcagagaggccctgcttcccggcctggggcactgggggcttggaggcctgggtcagctggagcagtggcaggctctgcccggggccaaggctgctggagcaggcggggaacagggcgcacgcacacgtgggttgggccctactctctcggctgtttccctggagaccccaccagtgtgggcctggctgcccctgccccactaaatgtcgggtgtcccccaccccaccctctccttgcagggtgaggccgagttcaaccgcatcatgagcctggtcgaccccaaccatagcggccttgtgaccttccaagccttcatcgacttcatgtcgcgggagaccaccgacacggacacggctgaccaggtcatcgcttccttcaaggtcttagcaggggacaaggtgagcgagacccctacgaggtgcatgggggctggcgagaggggtccctgcagtgggaggggctgagggggccagtgtgtgggtggggatggctcagagtcccatcctgcctgccccagaacttcatcacagctgaggagctgcggagagagctgccccccgaccaggccgagtactgcatcgcccgcatggcgccataccagggccctgacgccgtgcccggtgccctcgactacaagtccttctccacggccttgtatggcgagagcgacctgtgaggccccagagacctg

SEQ ID NO: 15368 - DNA, 81687 bp, Homo sapiens
atggtggactaccacgcggcgaaccagtcgtaccagtacggccccagcagcgcgggcaatggcgctggcggcgggggcagcatgggcgactacatggcccaggaggacgactgggaccgggacctgctgctggacccggcctgggagaagcagcagcgcaaggtgcgcggcccgcgggccggacgggctggaggggcttttctgagggggcccggggaggggtgggaggtcctgaaaggtaactggagcgtctgtgatgggaacgggggggtcccgagaaggaattggcgggtccgggaagggaattggagtcctgaggaggaatcgccgagctagaggaaggaattgggaatctgaaaagagaattggcggctgggtggggaatatgggagtcaaataaaaggaatcgggaaggctgatgaaggatttggagggtctgggcgtgccattaggggaaaccgaggagatgactgggcaggctgaaatggaactgggatccgaggcgggcttgaagggtcggagcatgggttgggggtgctgggaggagaatcaggggaggctgagaagggaatttctgggtctgggaagtgtgaggaggagcttgagtgtggaggggttggttatttggagagcagaaagatctgaaggagattggaattgggggagcctcaggttgggggagttataaaggggatgaagaatcaagtgtgaggatggagtggagattgtggggtctgaagacgggtgggaagactagggaggctgggaagatgaaaacaggggctaagggtagaattgagcatgaaaagacatgggcttagggtgtgaggagggtagaggtgccaggactgggggtctgaggagggtggggtgcggaaggaagaagttaaggggcccgtgaatcagacgtttttgaagggggtgagatttatttgtggtgccctgttccaaaggggagaagattaagagataggaggaataataagaggaattgatgagggatggagaagccgaagtagaggggatacggagagtggggataatttggggagggatttctaaagaattgatgggaagctgaaaagctaaagcgttggagagaatgaggaagtgtagagggagaaggtgagatcggtgggagggagggtgagctggaatggtggataatgggagagaggttcgtttaggaaaatgaaagtctcattagaaagggaatgcgtaatggatagactgagaaaggaatttgaggagggggtgctggctcctggaggtgcagtcccgggactggagagcgtgtgtgtgtcgtgcaggcagaatgagtttggggaggaagcgttgagagtgtccaggaagaattgtgtcttttttggagagaccggaggtaggtgaagggatcctgaagcagagactgtgttcaggtggcactgtttttttggggggcggggggggcaacttggtagggccccacagcagtgaaaaggtgatcagaagtggagtgggatccccgagcgaggtgtcagtgtctgtgggggggggataaatccagtgtggttgaggggggagctctgagtgtgtgcaggaagagctaaagaaaggagcgtggtgagtgggtgtgtgtggggggaaggggttgttcagaagttttgtgcgtgaaatgggtgggaggtacttgaagttggaagcatttcgtgggatctggagatctggattttctttccagatttgttactgattcgctctgtggccttggacaagacccttgaactctccgggcagttttgttatctgcaaaatgcaaagggatccgagggttccctgcggtgattctgttaataaagagggatgtgtgtagagttgggactttggacagggctctgaaggtttgggagagtgagtttggtggagatttttcaggaacaggctacagggctttgagtggtgacctggcagagtggggagtgactggaagcctctcgagggcgcgagttggtggccaggagcttggcacaggcagcctagcccaggctggaggggaaagggtgggaagggtggaaggagcagctgttccaaggcagcctgaggtggggccgggcataaccttgggtccattaccagcgttgcttgaatttcctcatccgtagtaactgaggggcatggcagtggcttggtgggaggggtgtccttatccgtggccccacctactgcaggatggacaggttgcgatagttggcataaattcactttttgaggggaaggtgagatctgttctggagtctcaacaataatttattgcctgaggcagtgccaggttggaaaaggttgccaagagacctggaaagttgggagggagcaggggccacagtggtggttttgagaatgtctaggctttgtcttctgcagctgaaggtgctggagaaaataaacccctcccccttttttctcaggtgataagggtggggggaccttccttttctctcccttcctgtcttctgccactcctcaagtgactccttttgcgagccgggtttcactccctcccgagagttagggtgtgggctttgttcgtggttatagtgtcccttgcctacagggtgaggctggggcaccattcaggccctgggtggaaaccaggactccccagaacctccaggccttgctgccatgtgtcattctcttacctcccagctcccttcctctggggccgggcaggtttgagggaaaagggtggctcacagagtccgctaataccatctgctttcgtgtctcagccagagccagattctagtacctcctgctttacacctcctccagcaaatatttacccttagctgctctgtgggggaaactactgcttcacctctgtgccctttcctgttatggggtagggattctttttgaaatgggggaaggagtaatggaaaggaatacaccaatctgtgtggctctctaccttcctactaagaaacatccctgcactcccaggctggctgggttgtttgtttgtttgtttgtttgtttttggagacggagttttgctcttgttgcccgggcgtgatcttggctcaccgcaacctccgtctcccgggttcaagcgattctcctgcctcagcctcccgagtagctgggaatacgggcatgcgccaccacgcctggctttttgtatttttagtagagacggggtttctccatgttggtcgggctggtctcaaactcccgaccccaggagatccgcccgcctcggtctcccaaagtgctgggattacaggagtgagccactgcacccagactggctgggttttttctacattgcagtgttgctttagtgaatgacagattgcccttcttgcctctccaaggctgagccactgggcacgggaagaatgacagtcctgggggttctgtacatgcatactccaaaaaaatatgcatccagaacagctgtaggccctcaaagtgggtagaattgaattcttctaggaattaagcaagagttggcccaaatcagaggggacgtgtgtctcacttctgcttggaagccctttgctctgacttctagggacccctgtaacccgtaagtaggttatgcaacggtttttacatgagagggccatgagtgttctcctggcgggatggagaagcattgttctggtctttgagcaaattcttgagcaattacagttctgggccacagttccctctcccaatttctaaaagtggcctgggtaacctcatcaccctctgttgtcctggaagggtgagatctcttgaaggttatgccaaatctcattacagcaagaagaaatgactcacttgctaagttttcgtgttcattgaaacatcactatttcaggggcctcaatgtttcaaccctgaccgttggctttttttttggagacggagttttgctcttgttgcccatgtggctgtattaggtatgagttaactatttgaaagtttttgtttgttttttgtatttgttttttttgttttgttttgttttgttttttttgagacagagcctcactctgtcaccaggctggagtgcagtggtgtgatcttggctcaccacaacctcttccaggttcaaggaattctcctgcctcagcctcctgagtagctgggactacaggcgtgtgctaccgtgcctggctaatttttgtgtttttagtagagacagagagtttcaccatgttggccaggctggtctgaaactcctgaccccaagtgatccgcctgcctcggcctcccaaagtgctgggattacaggcgtgagccactgtgccctgccttgtttttcttgaagtagatctttttttctttttaaaggctgataatggaggccccaaagtagccatctgttactttgttccattactctaattgcttgcctcttaggatctggctaggactaacagttttcaaaattgagtaacacacttgacaaaaaaaaaggaaccaaactcaaactcaactgttatctagaaaaaagactgtgtaaatatgtgtgagaggcaagtatactctgtttgccctcttgtaagagggataggggaggccactcagctgctagcactctgttctctcccctcatcctctccagaatgtattttagaacttgactcttctaatgactgaagaaaaggtggggtatgggaagatggcctgggactgcagggtcacttacactcacctggctaagagttgagatctggctggtgccctggagtggcacctgccactcacctaatcctaaacaatccagggtgtgggcccaggattgccctctgccttttgaaacaccctccctggttccggcttctaagaccaacagggaggctactttggtggcagggagctgactcaccctccagttggaactggtgctaaaagcctccatttaacggcagccgactgcttggccccaagtgggctgccttgtgggggggaaagttcagtggaaagtgttggaggaagcagggtggtgtgtgaatatccaagtagtgctggtgctattaagctctgacacagtcagggaggtcagttaaaatgtggtcttatggccgggcgcagtggctcgcgcctgtaatcccagcactttgggaggctgaggtgggcagatcacctgaggtcaggagttcgagaccagcctggccaacatggtgaaaccccgtctctaccaataatacaaaaattaactgggcatggtggcaggtgcctgtaatcccagctacttgggaggctgaggcaggagaatcgcttgaacctgagaggtggaggttgcagtgagccaagatcgcgctactgcactccagcctgagtgacagaacaagactccatctcaaaaaaaaaaaaaaaaatcagatgacagaggggagcggggacaagttttaagtctaagcctcctgggtggggagttctgctgtttcaacatatgctccagtcatggcagactttggccagacagcgccctttttcagagtgaactgagtgtagcacaagttatctgccagtgctagttagcaaacagaatggagccaaaaaagaattgatttgggaaggcccaaggaatttgaaaccgttgagatgaacactttccgtttttgctacactgatttatgttgtgctgggaattgtacaagcctttgaccagaccttagggttgttctttaaaaaaaaaaaaaaaagattcccttgctgctgcttttacttttttgaagggcagaagggaagggcaaatataattagtgaacagctgtttgctctagtatcacttgctcgttcaggttttctgaatagctgaaatatcaacatgtttatctcttcccttgccttagtatatcctagagcagtgttttccccggctttatctttattccttcatttaatgaactccgtgttttcatcactcacattttgttcccttccctcagtttccttcctttgccttcatttatgtatttagtttacagaataacaaaagcactcgtgttacttttaaacaaggtaaaacttaaacagttttttcctccgtttctttttttatggaaataagaggcaagtgatagcaagtgggtaattcaatggcagtggtaactgaagcactgacctgttacaagagagacggaagcttctacttgagcagatacaaatactgtcatccgtggagatttgaaagaagtctttctatcactgggtagtttgagagctcattagtcttctttagaatgggtttaaacttggaaacatcaaagcaagttacaaggaaacttagttttacagtgttggcagcctaggcgccagaatttgttataaagtgtctgaaagtggcccaggtatcacttaacttttcttcaagaaggtctatgagttacattttactcggtatcccaggcatcaaggagtgtaactttcaatgaatcaaagagaaacagaatcattttaaattccagcctctgtttaaagaaggatcttatgaaggggagaaattaaccacctgacccagggaaggatcccgcctcctccagaaagtgaaatcgccgggtgtggtggctcacgcctgtaatcccagcactttgggaggtcgaggtaggtggatcacgtgaggtcaggacttcaagaccagcctggcgaacatggtgaaaccccatctctactaaaatgcaaaaaattagccgggcacggtggtgcacccctgtaatcccagctactggggaggctgaggcaggataatcactcaaacctggaaggtggaggttgcagtcagctgagatcacgccactgcactccagcctggacgacagagtaaggctccgtctcaaaaaaaaaaaaaaaagaaaaagaaaaggagttaaatctttgcatatatttaactggcaagagcatccttacatcagtgcatgggaagttttatccaagtagcagtttccctgggattataaaaatccccgaggcatttgtcttggtgttgtgcctttttttggttgtgttttttcacgtccctcccctcccctttctccataaacaagagaggcattaacttggaatgtccgtggaaagtcttagaagctgattggtgtaatttgcctgccttccctttagtttgaacagcgtttactctggaagaggtcagtggcctttttcttggttgtgatttatgcaagtgttatctgaaggcgagtggagtgagtttacgtgggatttgctgtttgccacctgttgttgtgctggctccttccttcctgggatgagttccattctctccccctcccccaggagtgaggctccccagccagagcagtccccctgtgcttatccccttccttcgtaaactgcagccatttgtgattttccataaccacttttatagacacataataatttcctttgaatcagtttgcattttaaattaagttttgaaaggaaaactgacaagagtatggcaactggaaaacccagctcccctggccataaatataatagaaggaaactgcaaaaataaacacattgaaaacaaaacagtgttgtttccaggtggttaccactcgggctgaaggccccccaggcttgaggcctgctccctttgttagaaagggattggcaagtgttggtgaggtgttaaagacccaccagcaccaagcagagactttctctttgaagtcatcaggtttacaagagaatcaaaggaaataactttctcaatgtgattcagggtgtaatgtaaggtgtagataacccttaaaattttccatgtgtgtatgtcacacttgggaaaaaaacttgatctcatctggtcgaggtgggcagggcagcaccttgtccaggagcacacagcccctcttggctctgtgtgtcatccggccatactagactcgaacatatggctcatgactggatgatgcttgattcatcttcagtttcaagtgttagtgcttttgaggttttgtaagaaaccaggacacattgaaaatacagtcatttctcagtatctgtgggggattggttccaggaacccccttatataccaaaatccacagatgctcaagttccttatgtaagataaaacgatgtgtaatttgcattttaactatgcacatcctcctgaatactttaaatcatctctagattacttataacctaatgctaaatgctacgtaaatggttgttacactgtgctgtttaggaaataatgacaaaaatatgtacatgttcagtgcagatgcaaccattcattttttttcttccagtattttcgatccattgttggttgaattcacagatagagaacccatggatacagagggctagctgtaagaaatgtgggtttatcatttgttcctcacacaacttttttctttcttcgtttttcttgcctttgttccttttttttgagacagggtgtcactctttttaccaaggctggagtgcagtggaacaatcttggctcactgaagctttgacctcgggctcaagccatccccccacctcagcttcccaagtagctgggactagaggtgcacaccaccacgcctgactgatttttgtgtttttgtagagatggggttttgctgtgttgcccagtctggtctcagcctcccaaagtcttgggattacaggtgtgagtcaccacgcccagccaactttttctcttaaggctccagttttcttcttagagttgggcccctcccacgaagaaagcacactgccaccccttcatcggatttgaaccctacattttgaaaggaaagcagtgccctcctgctgagttaacaaggcttatttaaatgtttttcttccaaatatcagagcagaacagattctttgtcttccagtggaactatccacatggggcagaagtagttggaagcggcagttactaccctgcagaacacaatgaagtcatcttgggaaatatcgtggatggtgttgcaatgattgaatgggatgctagaacaccagcaatacaatagcatttgtgtcttcagcttcaggcaggaataaagaagactttgtggtttgttttatgttttttaaagtttcccccccaaaggtgtggggctgagtgatgtctgtcactagctttctagtgggtttttcttttcatcttttcccctccctgatgtcttttgagagtgggtggaagccacagtctaggtggatcagaggaagcacagaaggcaggcagtataccccactttgtgttttccatgtctgaagggaacacatttggtttttgttctgttttgattttttagagacagggtttcactgtcacccaggctggagtgcagtggcctaatcataactcactgcagccttgaactcttgggctcaagggatctttcagcctcagcctccctagtagctgggattatgtgtgcaccaccatggccagctaattttaattttttttttttttgagatggagtctcactctgtcacccaggctggagtgcagtagcacgatctcagctcactgcaacctctgcctccccggttcaagtgattctcctgcctcagcttcccaagtagctgggattacaggcgcgcgccacgacgcccagctaatttttgtatttttagtagagacagggtttcaccatgttggccaggctggtcttgagctcctgaccttaagcgatccacccaccttggcccaacaaagtgctggggttacaggcatgagccactgtgcccgaactaatttttaaattttttgtaaagactgggtctcactatgttgcccaggcttttaatctgcaaaaagcccaagataaagagttttaatatcttacctcctgagtagtaatgactgattccagttctaataatgtcttaattacagctatacagattgaggggactgcaggaagtgaaatagatgcatttcttttttctttctttcttttccttttttaaatacacacttcgtttcggtggtgaaggccagtttgaggttaggagaggcatcttggaaggaagctcgcaggtggttcggcatctggacatgctgggaagttgcctgagggggacgtcacaataagaggactgtgggtctacagcctgccttagcaaaatgacaggccttcttttaccaaggccaagggcagtggtggaagctgacttcagttggtgtcatcaaggcctcagtatgtgtaacggttaacaaattactattctatgatcaatctccatctgggtgtgagtaaaaggtatttagttgctatcaccatggaaaccaagttgcttacttactgttttggggagtgccctcataccagaggcagtgctaatggtggagtgttaggccccgggcagaaaaaaagatcctgccacttggtatcacaggaaaatacctacaggcacagcagccttgccaggtaggggatgaaggccctctgtcctcggggcaggagttgggccagttgattgtgttgatgaggagtgtgcatttgtgcatgagagagggagaagaaaaaggagagcactccatgaaatccgctgctggctttgtagcctagaagagtgctttttttctctaggagtttggaactggaatctcagctatgtgacttcttaataataggacaaaatatgcctgtatcttttgcctacttccacaaacactgataaattaaaaagaactctaaatttcccacaaatcccaagcacaagtaactttttttttaaatccacatcctccctaatccaaatctaacagcaaatccttttctctctgtcactccctgcttttctttaagaaaatgagtaccttgccttaaactatatattggatgaaaatattaaacactttcacaaagtgcttctttggctgttactggtatgccttgcatttggaagggtcagagatttgaagacttctgtgatcttccagttctggcctatgaaatacagtcagtttcaaaattcaaaatgtctggaagagccaacttgccaggccggttcaagggcagtcagatgaatcgacccttcttacaggctgtctacgaaccagtcatgattcagatattcaagtcctggaaggtatccagacggtaaacatcaccaggattgtgaggcagttacttttttttttggatcgtttgagctacactgccaagactgtggtaggacttgtctgtgtaaaacagaaagggctgtctctaaatgtctttttcaagaatgtcggctataatcacccgacactgtgtctcatggtggggtgagatgaaatacctagaccggttaggggagggccttcttggccattttttgaactaattttccctttccctttgtaacttttttttcttcttttcttttctttttttttttttgagacggagtcttactctgtcacccaggctggagtgtagtggtgcaatctcggctcattgcaacctccgcatcctgggttcaagtgattctcctgccttaggctcccgagtagctgggactacaggcatgcattccacgcccagctagttttggtattttttaggagagacggagtttcaccatgttggccaggctggtcttgaacccttgacctcgtaatgcccacctaggcctcccaaagtgctgggattacaggtatgagccaccgcgcccagcccctttgtaactttcattaacactgatgaggcacaagccataggatagaattgaatccattgagagctgtgagccaattgagggatgattggttaatagattgtggcttgaagctgtggaaggtaaggggtgacacttgactcctattagccttgtagaaacacctcagagattcacaggaagcaaactttgaccataaaaatataagactcacagcgcaccgagttctcttagcagctaccttagagttgagaaagttttgggcctctttaataaacaagcacaaagcagttcttgccaaatacggcctgctctggggccacagggttagcttaggagacaactttcttgcctaaaaataaatgcatgttcctatcagacattccaagcatagtttaaacatgagacttctgagcagcagctcaagctctgtgggttcaattatgtcagagtatgggcagtgagggtctttggggagtgtgcccccttatttgggattggttgtggctaccaaggaaatcagatgatcaaatgcaaaacttcctccatcttatttctatatgatcttttttttttttttttgagttggagtcttgctctgttgcccaggctggagtgcagtggcaggatctcagctcactgcagcctctgtctcccagattcaagctattattctcctgcctcagccttccaaatagctgggactacaggcgtggccatcatgtccggctaatttttgtatttttagtagagacagggttttgccatgttggccaggctggtctccaactcctgacctcaggtcatccacccgctttggcctcccagagtgctgggattacaggcatgggccaccgcccccagccttatttctacacgttcttgatctatcacaggctggtgggggagacagcatgcatatagataatgaacaaggtaacttcagataggattatgtgcaataaattaaataacagctagcattttaccttgtgctagacactattctaagtgcttcccatggactgactggtttttgtttttttttctttcctttgagactgagtttcgctcttgttgcccaggctggagtgcaatggcgtgttcttggctcactgcaacctccgtctcctgggttcaagcaattctcctgcctcagcctcccgagtagctgggattacaggcacgtgccaccatgcctggctaatttttgtatttttagtagagacggggtttctccttgttggtcaggctggccttgaactcccaacctcaggtgacccacccgcctcagccaccccaagtgctgggattacaggcgcgagccaccatgcccgacccatggactcacttgtataatcttgtgaagcaggtgttgttacccttacatgcagaaatggatccatgggcctttaagccacttgcccctgtgacagtgccaggatttgaatgtagaagttgaggctttcaagtttatgctgttatttctacactacactgaagtctagtgattgggaatggctttgcgagcgggtggtgaggggaggagtgtgcagtgcaggtacttcagatggagaggaaggtctcaaagaggtggcatttcagctgttccttaacggatgagaaagagagaaccaagagagcaccagaggaacgcgcttccaacagagaaaaccaagcaagggggcccccgaggagcagaaaggcccgagtggtcagagcggagcccgtggaagagatgggcacagccagattgcttagagctgtgttgttagaagtgctgatgagtctacattcaacttgcgcctgcaaactcagtccctcttagatgccagtaggtcaggaacctcatgcttccaggactctggcgctcctaccctttcctcccaggcctcctggacaggccaaaccagaactgacttctaaagtgggaaccccaagacggcagaacatgaatcagccaaacaaaagctgcagttatctctgtgatgatttcggcagtcggcacgtgtatttgattaaagcgttggtaactttgaatctggagttttatggcactgtgtactactcataatggctttgtagtgtggctctcttagggagcttaacttttacaacatgaacaagttccagcctcctttggtcccatcaagaggccatttctacctggtgggatgccacttgctttacaaagcatcttttgtaaaatgttgagtctccttctttgaagttggaagccaggaagcctgattttttttccaataagtattgtagaagatggcagcctgatttatttttatttatttatttattttgagacggagtctcactctgttgcccaggctggagtgcagtggcacaatctcggctcactgcaagctccacctcccaggttcacgccattctcctgcctcagcctcccgagtagctgggactacaggcgcccgccaccatgcccggctaattttttgtattttttgtagagacggggtttcaccgtgttaaccaggatggtcttgatctcctgacctcgttatccgcccgcctcggcttcccaaagtgctgggattacaggcgtgagccaccgcgcccggcctggcagcctgatttttaaactggcttttctcctaggtcctttccttctctataaatccctctttcacttagtatttcctccttgtttcctttggtcagttggagtgagggtggttctagttcagagaaagagacaggcatacaggctgattcagtctgaggtgcttagctttctgtacctcactggaaaccagtccaggaatatgacaggtttcagtaggtttcattggacccacaactccccatttgaaggcagagcttgtcaaacgagttatgtggcttttactcaaggagggaggaacagcaacagggagctctgggctattgatagacactcctgcctctgaacacacagcacccagcaagaagttaccttcatgggttgtctagagtgaacatgggctgggattctctcagccttagcactgatgatttgacaacaaaaatcgccccgtgggtagagtataacggagcaaatgattatggtggcctgtgatggtgcagccagcccagctgcttcagctggaaagaagatggcgaggtttccattctcctggcagcatagccatgtgaacttgttaaatcttttaagtagctgtataggaggggagataagtgtgtgtgtgtttattcttatccccttaaatacaaaaacaaaacttccactttataaaatcaattcagagtgggaagaggtgcatggcacatggaaaatgtgtcggattaggttgagtcctaccccacgtttgggacacagctgtaagtttccatggtgggtggcttattatgcatttatgctgagctgaacctgctccaagctgctgcagataggaaagtctgtcttggagggggagctgcctctttctatcacactataaagacataaaaggtcctttgaaagactccagcagtcaccacttgggtaacagaattaggggctgctgagcaaagtgggtctgtttttttttttttttaaagacagagtttccctcttgttgttcaggagtggagtgcaatgtcacaatcttggctcactgcaacttccgcctcctgggttcaagtgattcttctgcttcagcctcccaagtagctgggattacaggtgccggccaccacgcctagctagttttttgtatttttagtagagacggggtttcatcatgttggccgggctggttgtgaactgctgacctcaggtgatccacccgcctcagcctcccaaagtgctgggattacgggtgtgagccactgcgcccggccacattttatagccaaccggcttcttgtgtaacatgagttggggcttcttgggccccagagtccagcactcaggtagaaatatgaccgccatggccagacagcagccctcgctgggcccctcttcagagcagagctctgtgccgagcctttaggggtatgagagaaaccggagacctggtccgtgctctcaaagagctcgcggtgtagctggggagagagcaaggccacatgagacctcagaaggacactaaacggcacaccgacaagctcacagcactctagctgtgtcccgggagaggaaaggggtgaatcagggcaggtggggtcagtcatggaaactttcataaaggaggtgagtgtgcaggaggggcgggcctttgcccccgctgcgggcaggttgccgagggcaagtattagggggtccggcgtgcaatcgaacatttcttagctgcctctttggagtagcgctaccagttcctgtccccatgagcatcgtcttcggggagctgctggtttgaaggatgaggtaccatgctcatcttggccatgtcttagaacctgtgatagccagacctgtcgttctgggtccgtatccattcatgcgtcctgtcactgtcacagatatcgtgagtgggccagactcttctccccaggtgggagggggtgccttctgaggcatatgttttcagcctgctgatggcctcttcagaattagcacaggtttcgacaaaaagaatggagagactcccttctcatgtccaagggtctccccaagccctgtgtctcagcccctcagggcgtgtggtgctgcacactgccgcccagatgaccacgcgcagccggaacggccgccctgtattgagaagtgggatcggctcccagtctgctggcgaggctgggttgccacagctcctctgttgccctgcaacgcgggtggcctaggagtgtgctgccttcagtttattcctgcctgccaagctacgcttccaggtgctattcttttctttaaataactgccttagtgctgcttgtggaacttagcgttcccatcccaggaaatactccagtgttgtgtttttttttttaaactcattcagatgctcatggccaaatgtgtgacttaaataccgcagtgtccttgatattgccttccccacaccgacaaaccgagttgcattctggtcccactgtgggataaggttagggtagcggcgcttgcctctttgtgtggtttcagatgtgtttctccccacttcagataacacatgacagctgtaatatagctcagttcgtgcaagtaaggtaggggcagaaatcatccaggagaactccagcctccatcctaaaggattagactgcctagcatcagtaggtttaccatagaaggattcagtggagatagcgagggtggtgagtgttgctggattgagcccgtccctgcagcctgggcacgggagcactgcagtgccatgaaggagagggctgggggatattagcacagccggttcctatttccttttccacctggttaagacttccggggaggccctgcccagcagtccttatgagatgctgccttcctcttttttgaaaggcatagatgataaggaggtggacatgttttgagaagagaacctagagctcattacttgtatttgaggcatgtattgcttcactcccactttgggagagttttttctggggaagttaaaggctattcaggatcagagagtttcctgcatggtcccaggggctgggaggagccacctgctcagctggtggttagctgatagcacccagcctacccaccaagataggaggcagctcagatgtcactgggattcgcagtaccacaggctgtccctgggcccaagcagttagctagctgcaccccgggagggggtgttgagagcactgaagctcctgtgggagagtgcctttgacatcccccactccccactgcccagaactaggaggtagtgaaaggtgtcagtggcaagaaggctgggccagagcatggagggaggccgacctgggctccacacccacctcctccaccaccggctggctgtgcgaccctgggcaggtggcgggggttaagcctcagtgtccttctttgaaaaggggcatcatcctatcctcagtttgaggattagacgtgatagtgcgcaggaagcactctggtgcctggtacattgtaagtgctcaataaatgcagcttcccaaaatgatttcaatggcacatggtcctgcatccaggtgggatctgctacttgagtctccccctcaaaggggcctgctgaaatacgcagctcagtgggaaaccaaaacatacacccctttcctccagtgctccccaggaagcgccaagtcctgagcccagccagcaacttcgaagaagtgccctccaacaagtggcagtgggcacttgagcaagtgacttaacgcagccctctccccagcccctgcatccatctgggcctcattatctgggaggtggcttcttgtttcagagttacaggccctgaacaattttgtgttgggatgtgccataggcagtgccaggaaggttctttcatgagtaatttaacttgttactaagtttgctatcagccggggggctctttccccgggttcccttctttccctgggtccccttccccgcaaagcaaagtccaactcaagttagaaacatcccacagcctggagtcaggctgccctctcttcagttggtgtgtgatgtagaagcaggaagggcttcccactgataaccctaaaaataactgcccagaaatgctgtcagatggggccaagaggtgcacaggagcctgtgcccagctgccgacctggaacgtgggactttctagagggcttggaggagccctgccccttccaggcctcttcccaacagtgcttctcacgcctgctgctccattcccttttcctccttcctcccgcgcccccccctttcctggggtcacttcctgatgccattcttcaacttcgcccctgtcccccccaaaagcaatcaaatccacaacctaataaggcaaaagaatgaggagaatgtccgcctcccagcctctcccctaacagggtgcaggcctgaagcaaatttggaaaatgttacaacggagtgacaaccgatgggggctgggggtggggcggtgcagccttgttcaggagctgcccattgttggcctgaggcaggaccctaagggaaggccacccggtttgcgctttcctgatcaggctgttgacacccttctagcacaagaaaatgtatggaaagtaactgcctgagtcagctgcatctccagttgtgggatccacgtgccaggagaacacgaagtacacacaggtccgcagtgggagcccgctcggagacacctccccgccatcacggctgggactgtgcatatccaaacacttcttgcctctgagatgagcagttttcttccccttgactgtgccagggttcaattagcctgggcattaattaaaacttgtcaacacttagagtggggcccccagaaatctgtcacccctcctagatcattatcccaggctaatcaaccctctctaaggcagtttccattcttgacttagtgggagggaggaacaagcccctcggtgctggggagctctgggggaggtagggactgactgggcccaacccactttgttttggaaggtcaagcttagtaattaacctgaatgcttgggggagggggtgaaggagaaagaactgagtctagggatgtgccaggtctttcaaattgctaattatcagcgagcatgaggtcatccgtaaatatatctaattctttagcttgtaattaaggtgctcattaaaagtgcagggaagtcttgttttcctaaaaggggaaaaaaacaacaacacaaaaagtctttgttttgacctgacacgatggctcagaacagggggaggactcaaggcacaggactagtttcctgccttaaagagcctttacaggaaattgactgcaaacagtattggtgaccctgccaaggaggcaaacctagggtgatgtcattgttcgaagctgtcaccgccaagcctctggccttggggcgaggagagttggtgggattaaaaaatgagtgtgtgtatgtgtgtgtgtgtttagcagtctctaaagaggcgagtcaagggaaaatcctagcgggagaaaaatcacaaggggtggggggtgtctcagaaatattcttagctgggttcaactttcctcgtttttctaagtttaaaaaatcctctcttactatttttgctcatcaaaatgctgctgctttttcagagacagccttttttgagccattccctatttagtgttttgggtaattggctgttacagtatggaatttgtggcccaaaggcagcgtggtaagttagacactaggtgcacggtgccccattgttatgaagtgtggaaactgagacgctggactagtctgatgtatctgtttcttccaccaaaaaaaaaaaaaaaccattttggagaactacccaatgccagtgacttggcatctctgagtcgctaatcttcccatgtgcctccaggaaccgtctggagcgtccctgaaaaaaggacaaggtttgtatcttgtcatttttcctctggctggaagtctaagaggtataaacacagtcttaaaatgaaagcaacaaaaataaactcaaagcagccctgcgtgaaggcattaatgcaaaatatgcaagctggcttcctatttatacggcggaaggcagtcagaagagccaggcctggttaaggaaggagttatgtctctggaggtgcctgttccttagaattacaaataaaccctgggtgattactcagatgaggttgtaatgtggtgtctcatttcatgctttgcacagtccagtttcttgatggaaccaacggcctctgaaatgctaatgcaggatcaggatacagttagagtgccccccttcctgtgcccctcctaacatcctaacagctttagaaggaagtttgaagattaaacaggagagccatgtaagtttcctgtgatcctagatcctgtgatttgttaatattctttctcttcaatccacctgacatttacccagataccatattaggcttggagatacaacaagaaagaaaaccaacccaaccctgtccttaaagaaaagatggacgatgaagggccaggcgcagtggctcactcctgtaatcccagcactttgggaggccaaggcgcacagatcacgaggtcgggagtttgagaccatcctggccaacatggtgataccccgtctctactaaaatacaaaacattagctgggcatggtggtgcgcgcctgtagtcccagctactcaggaggctgaggcaggggaattgcttgaacctgagaggcggaggttgcagtgagccgaggtcgtgccactgcactccagcctggcaagagagtgagactccatcgcaaaaaaagaaaaaagaaaaaaagaaaagatggacaatgaattgcatgatggaagtgaacagtgttagggcgatatgcagatgtaaatgtggtcttgttttactgctcactgacttactgaagtaaacccattgacttcgccttcatgggtttgaaaagggtttttccaatgtgctctgtgtgtctcggagctcaggtgttcagagctgcctcccttataaatcgacctccaggagagttgtgtgtttggttcttggtgtatggtttcgtaggctccccagggctgaggagtcaccttgggatccagctttttttcttttttcgagacagtctctccctgtcgcccaggctgaaatgcagtggtatgcacttggctcactgcaacctctgtctcctgggttcaagcgattctcctacctcagcctcccaactagctgggattacagacgcctgccaccgtgcccagctaatttttgtatttttagtagagacggggtttcaccatgttggccagattggtctcgaattcctgacctcaggtgatccactgccttggcctcccaaagtgctgggattacaggcgtgagtcaccgcgcccagccaaaatccagctttttcttagttcctggcttggggcatgttgctggaaaggaatgacagattgaggcaagaaggaggcaagaaggatgcatctcctggccaaggaaactagagtttggaggtgtcccctgtcaatggcatctgaagaatttctacattggaaaggcataggtgacccagtctggtttggagtagatgggactgggtaggggactagtcttgaagctgcaagcatgctgtttttacttagagcacaggtagctggggaggagatcactgtggtgtgggtggcagaagccatccctagccatcacctaggaagatggtggcccttgggttgcccgagctgctgcttgttttagtagctgcatttggtgccacatttttgtggtaactgccaggaagcggagcccagcgtggcctcaggaagttggtgaggtttgcaccactttttaacaggctggtaacagtgccggagctgacaccctcatggttgcagccctgggattttgttatttggggacactttggaatatgtcactcagaatgctggctcactagctccacaagcaaaagactccttgggtagctggaagcaagcgttgggggaaggagggagaggcaattgcagtccagccaagaatctcaaggctcagtcttcaatgtatggaaacttcagtccttttctgatctttagtggaaatagctgttcactcttagcgccaattggaaagtgttggcagctgaagggggtcgttcctcaggggtccccagagccagtgtatctggtatttctaacattttcctagccacccctttctcctccatatgcccctcccagccccaccattcagatagggtggctggaaagaacatctcctaggtcctctaggaaacttggtgtttccactcaagggagttggggatcacgtaacaccctccacttccacctgggatttcaggccatctgtgggagtgcaagagcatggtggggtggaggtcacaggaaggtggaagcaaagccagggcagctccacatgcagccccctttcaggaacagcaaggataggccggcctgtatcttgttgctcagagcaggtgatcctgtcatttggacccttgtgaggagaatggatgtgagtgtgcacctggttctcttctcctggggctgagggactgtggtcttggattatcacatggtaggtgaggtgacaaaatggagggaagtagcctgggtggggactggggtggccactgcagagctctagctgatggtggccaggtgggaatggggacctgggacttcacgaagctggaaatggagagttttatggggcatttcattcaacttaaaaacctggccgggtacagtggctcacgcctgtaatcccagcactttgggaggctgaggagggtggatcacgaggtcaggagattgagaccatcctggccaacatggtgaaaccccatctctactaaaaatacaaaaattagctgagcgtggtggcttgtgcttgtaatcccagctactcgggaggctgaggcaggagaatcccttgaaccagggcgtcggaggttgcagtgagctgagatgtcgccattgcactccagcctggtgacagagcaatactccaacttaaaaaaaaaaaaaaaaacctgcaggccatacaaaatagggcctattgggtgtgaagagctacccatttgtgacccctaaccttgcatggtcttgaccctgtctctgcctctcctctagtctcccctttcctcttgtctgaattgctgctgcttaatcctctcactaggagcgagaaaattgtactttgccccttagtgacagctctgataaaaggtggttgaagtggatggtagtaaaaagggtttgctttagctgtggttttccagcctccggactcctccccctttcccatcaccatagataattaagagttgactcctcaaaattcctcccaccatattgcatatttttaggcttcaggtttttgtgaaccaaaatagtggaaagtttttttgtttgtttgttttgggtagcccaaagcaacacttttctacagaggcagccattctgcacgcacaataacctggtgaacaatgccagctttctattaataaatgaactgccagttcagaatttgtacccatgtggcagatggacagaaatagtttctttaggattgatctcttaaatttgactttgggaagatactggcagtccaggttttgtgacagagatccatcctgagatctttgtaaatggaaaagcctgaatgcagcgtttcttattgataggagagttgatggatttcaggaaaatgggatatagtagatgtgcaatgaatttgttgacttggaaacaaatttggacacttatccctgaaaacttcaggccattttttcctaaactctaattgagtccctgtgattggagtactagccccacagtccttatcaaacttcgcatttggagcaggcagtctgtctgggaaaagccaggaagctcgccatgaaggcatcgccctctgcttttaacttttttaggctctgttacctctgcactggcttgagtatttcctggctcaattgtttctcaggctggccttgagtccttagatgttatttgtgtgcctagaaatagctggaagaaaaatggttgtaatgctttgcattgctcactgctctccatggatggaaattctgtgagggaaagagggctttccacccagaaaaagagctgggcagcgtagacttcattgtcctgctggcctgtcatgttattctgctatactacagcgattaggatgagagagtttctcgctctccctgggtgtgccacctaaggtacattagggtagggacgaacatggcgggagttctcatagtgggctttcctgccagacgtatggcccacacagcagtatttcttacatgtggttcttttttttttttttttttttgagacggagtctttctctgtcgcctaggctggagtacagtggcgtgatatcggcttactgcaacctccacctcccaggttcaagcaattctcctgcctcagcctcctgagtagctgggaccacagatgcatgccaccacacctggctaatttttgtatttttagtagagacgtggtttctccatgttggccaggctggtcttgaactcctgacctcaagtgacccactcgccttggcttcccaaagtgttgggattacaggtgtgagctaccacaccctgccaaggttctattatttgatctatgttctttgtttgtttgtttgtttgttttgagatggagtttcgctcttgttgcccaggctggagtgtaatggcacgatctcggctcaccgcaacctctgtctcccgggttcaagcaattctcctgcctcagcctcctgagtagctgggataacaggcatgtgccaccacacccggctaattttgtatttttagtagagacggggtttctccatgttggtcaggctggtctcaaactcctgaactcaagtgatccacctgccttggcctcccaaagtgttgggattacaggcgtgagccaccatgcccggcccctgtaaccatttttaagtgattgatcatctcagcatgattgatggagatgatggggttggccatccattcttttttttttttttttttggagacagtctcactctgtctccaaggctggagtgcagtggcacaatcttggctcactacaacctctgcctcctgggttcaagcgattcttctgcctcagcttcccaattagctgagattacatgcatgcaccaccatgcctggccagtttttgtgtttttaatagagacagggttttatcatgttggccaggctggtctcaagcccctgacctcaggtgatccccccacctcagcctcccaaagtgctaggattacaggcatgagccaccacacccggcctattcatcatttattgagcatttatttatacccactatgtgccgtaaacaaggtgctgagtaatgagatgtgaacagaatagtccttcttcttgtcctcatggagcacacagcctagtcggggacaataggcattaaaaaataccaacaatgaaaacccaagacatacatagagtgttccaaattgtggttttattttttatatatatatattcatatatatttatatatatttatatatatattcatatatatttatatatatgaatatatatttatatatattcatatatacttatatatatttatatatacttatatatatttatatatattcatatatatttatatatattcatatatattcatttatatttatatatattcatatatatttatatatatttatatatttatatatattatatatatttatatatttatatatattatatatatttatatatttatatatttatatatacttatatatatttatatatttatatatatttttatatatatatatttatatatgtataattttttttttttttttttttgtgatggagtctctatcacccaggctggagtgcagtagcgtgatctcagctcactgcaacctctgcctcccaggttcaagcaattctctgcctcagcctcctgagtagctgggattacaggtgcctgccaccacgtccggctaatttttgtatttttagtagagatgggatttcaccatcttggccaggctggtcttgaactcctgaccttgtgatctacccgcctcggcctcccaaagtgctgggattacaggcgtgagccactgcgcccggtgtgattatttttatgaaggaaaagaccagagtcctttaagaggggacagtgggggacttgcaatagattgtgtgggagctgtcaggggagactttccaagatgatgacagtgaagtgaggcctggagggagagttagagccaacctcagagaagggaacactgttctaggcaggaggacccagggttgtgggaagagagaaataaaatgagaccaagacagtggggagagcagtgtgagttgaagtcagaggggtgacagcagccagaatgtgccggtagcgaggatcttggattttattctagctgcaatgagagctttgattctacaaatatttattgcgtgctagtcactgttttaggtactgggtgtacaacagtgaaaaaagaacttcccagccgagtggaatgccgtggagcatatctgtttcgatgctgggacagatccctaacacagctcattaaagcagatagcaccattccgtctctttcttcagcttcactttacgtcagtcccagcatttttatccctacccttacagatgagagaactaaagttcagagaggtgacgtgacttgccccaggcccctcagtcagtaaaagacagaactgagaatccaaccagactcttccctttttaggttatttctctaacattagggccgagtatcgattctctttacctctgacttcgtgtccctggtattaagactcagggcccacagtgcctcttggaattcaggcatatggtgacatcagtgtgcctaccattcaggtcttggagaatagggtatggcgaaaggagagaactcgtgatatcgctgattcagtagcccagagttgtacgagtccttgggtgtttcaccttcatccaggcatctgagattggagacaagcatgtggctgaatgacgtatctgggggaagctgtctaaacagccgtgtggagttggagagttgaattagctctgtggccaaacctctgggctcagtctgcctatatatggcttgatctcaaagaacaggtgatagcagtaggagttgttttctgtgttgctggtgggagatgcccaggcacattcctttgtagacaagcacaaactagatatttttgaaatcggaggtctgaaaccagccgaagaattaatcctggcctggaaagcatatgggagagtacagccaacctggcttgggtgttgctttcttggttttgttgcatttttgaggcagggtcttgctctgtcacccaagtgggatcacagtggtacaatcatggctcattgcagccttaacctcctgggctcaagtgattctcctgccttattttttgattttttttgtagaggtgaggtctcaccatgttgcccaggctggtcttgagctcctgggctcaagtgatcctccaccttggtctcccaaagtgttaggattacaggcgtgagccgctgcccctggtgactttgttgctttttaataagcccagaaatttctttcaagagggaggatctttgtgaacatcttgagccgcgttcttgatcgctggctgtggaagcctccacctatcaggctcaagtccatgttgctatcatgtgcactttggctggtgaggtgctgagcagaggtttcagcctctaccacaaggtttcctgatgaaaggtcagctgggtgggcccagcttctccttacccaactgagaggcctcatagagcacaaggcctgggtacggaggttcctggggctcctgccatacccagccaggccaagcagagggccccagtgtgttgttgggtgctgagaggctgcccgcagctctcgcctgtgttggaaggctgtagacttggcttctcccaaacgtaagctgtgaagccatggactcagattctcagcctggccctgctacttactgtgggaccttgggcaaggaagtctccattttctcttttacaaaatggggccaataatctgactaccacagggctgtcaggatgcagcgggatggagcctttatagggtcttgttctgtgggatctggagtcccatatgggagttattagttgagggacgaggcatctgggaatctttattcaactaggaaacttcagccaaagaactaatgccatagagatgtcttatggtgtctgcatttgaagccagcggttctttgaaaatttatcctgagttccagaaagccaactgctagataagtaagcattgagcatttaaggggtcctggaagtaagattcctggaaagaagcagcaatctcttactcatccccgattatctcagacacagagtggtggatggaacctttgtggtttaggggctgactcttggtattgctggataaggaatatgagccagtagagacgagtgtgttgtatagcagtgtcctgcgactgggctggagacgtggctgagggaggccagggggcctcagagtgcacgggaggaggcttacagaggtcttttgcatcctgcagaacaccacatgtgtccttccctctgggaaacctcccacccgggcagggcctctggggccggatgtggaaggtaaacaggctgcctttctgctctctaccacagacaggcccggaaaggcctgagtaggagcttttcatctcaggaagccctgaggtcccacagcttctcctgaagcagcctcattgtccctttgtaagagcatgaccaggtgctctagctcctggagcaccagtggagaactagagtggcccaggtgctgatgccaagttcgagcaacagctcctggcgggtttccctgcatccccccactcactcccatctattcttcacataggggccaaagaacatcctgcttgacatcttgatcagtgtcccttgccctcaggatcaaacctgcaagtccccaaggccctgcaggatctgttttctcctctctgtgctccgggcgcatgccagctgcctctctgctccatgctcattcctgcctcctgagggacttcacacggggcccttgcctctgcccctttcgcctcagctcgccacctacctcctcctcattcttcagatggcagtttatgcttcactatttgtagggccgtcgcacctgacacctccagcctaggttaggagcatgtccatcacctctacttctccttttaactccaaccatccttggctctccctctcgagggtcacgagagcagagagagaatctattttgttcaccactgtgtccctaccatgtgggacattgtcaaggcaaatgtaagtgtgcactaaataaatatgtattgaatgaatagatagccaaacagacagaatggatctgccacaacacaaacaggatgcttttcaagtgggcagaagatggagacatcacttgtcgagacactcaaacaagtggctggatggatgagtggcagatccattctgtctttctgcttggctttaggagtagagggatcacccatggtccatcctctgaggacaagggtatcatgaccgcccaggccccactcacccctgccaggctcattgcatcccatctaaaagtgtgctctggaaggtcataagaagtcctcacctgggacacttctaggcccagtgttcagccagctgtcctgagttctgcatcagtccctgctagatatgaaacacaaacaggatgcgatgcttttcttttttttctttttcttttttgagacggagtctcgctgtgttgcccaggctggagtgcagtgggtgcaacccctacctcccgggttgaagtgattctcctgcctcagcctcccaagtagctgggattacaggtgcacaccaccatacccggctaatttttgtatttttggtagagacaatgtttcaccatgttggccaggctggtctcaaactcctggcctcaagtcatctgcctgtctcagcctcccaaagtgctgggattacaggtgtgagccaccgcgcctggccaaacaggatgctttgcaagtaggcagaagagggagacatcactgtcccatggagaggtgggaaaatcatcgttagcacaggataattcatcctattttgtgctcatgtttactgagctaggattgacctgtgtccgggcagcagggacacagaggtgagtaagacaaagagaaggcccttgcccttaaaaatgatacgtgtggctaaaacgctgtagacctttttgttttttcctttttgagacttcctttttatacagaaattgctacctgcaggtaaaattaacttacatcgtgaaagcgacagtaaagtgtttctagggatagctaaagacctaagaacacagccctgtggtttgactggctggccaccttcctgcagctgggtttactatggtgctgtgttctgggacagcccactcgtctccatttattgggctgagcctcgagacctgcaataccagggaaggaagggaagtctaggctgtctttggtggccattgttatttatggggcatcggcagagaagtcagtaccatggaaaatctagagaaagatagaggatacgcagtgtggttgagcagaatctgatagctccctggctctctccgggccatgggacccagggcgacacagccaccctttttctctctgctgtctggcttgggcttgggctttgtctcctgtgtccctccacaccttcttcgctgtcagtggtgaccaatcccgtggaatcagccactgtgtgttaccccaagtccttgcccctgggacctcgctctgttcggagacaaaacccgggactgtttctccttttaaatgcaaccttgttccacaggagaggagaaaagcaagaaagaggtggcttgtttatctgatggtagtggggtgtgctctgatatgcctttgaaaggggcccagctttgctttgcccagcggcctttgcaggataatgagagaaggaaaacacagggaacttagtgggaatttgaaactggagtgtgggagtgggaaagttcagcttttaccttggagcaatccagtctttctcctgtaggaaaacagaatggtgctgtatggcctccaagctgggttacatcctgggaaaaagacacgtgcttggctattggcctgggcgcagtttatgtgtaagcctttccttgtggattccattttcttatttcccgaatacttctcagccccacaagtccactgagtcttctgtctccagagactgcctggtttccatccccgagggcatctgcgcatcacttaccatggtgtaccatgcacctccagtgtgcccggcactgtgtcaggagctggggatacaggtgctggtccccacctcactcccctcaacctctgcaatatatgatacataacccacacacacagaccatatgcaaaagtggtgggactcctttgtacctgtcacctgcatcagtgattatcagcattttgccagacttgtttcatcagtgtctcccaacacactccccccagacattacccatacgtgctcaaatagatttgggtgtgcgtgtgtgtgtgtgtgtgtgtgtgtgtgtgtgtatttttttagagacagggtctcgccctgtcacccaggctggagtacagtggtgagatcatagctcactgcggcctctgaactcctgggcttgctttgttgcccaggctggtctcagaactcctggcctcaagcgattctgccaccttagcctcccaaaatgctgggattacaagtgtgagccaccgcacccggccaatgtatgtatttttaaacataaccacatactgttatatttaatgcttctgaccatgtcttaagaaaaaaacaaaaactccctttggcttccttgacatcacagtctctctgtttctctgactcttcttcctcatctcctatggctaaattctctccctctgtccactgcttacacatgggcatttcacaatgtcctttttccctgaaggaacttaccccctcccctcagccttaagtaccccatctgtggggatgatgcccatgcctgtagtcctgactcactcaccacgctctatcgcagttatttactgatgcatctctctcccctatcagacgctgaggtctttgatggagcaaccttgtatttgtccgtgtatccccagcaccacacctgtccatagctggagctcaggaagtttttttttttttttttttttttttttttttttaaagtcagagtctcactcagtcgcccaggctagagtgcagtggcacaatcttggctcactgcaacctccacctcctgggttcaagcaagcacgtctgggtaatttttgtatttttagtagagatggggtttcaccatttggccaggctggtctcgaagtcctgactgcaagtgatctggccgcctttggctcccagattgctgggattacagacaggcatgagccactgcgcccggcctcaggaagtagttgaatgagtgactgaatgaatgcccacgtgagcaaatgacctgtttgctgaactttagactgacgttgcctgatgcccactgcttgtgcagtacgtacttcagtctcagcgtgtctgagaccaaactcattttcaagtcccacttcttgggcttggcattgcccatttgtcagccatccgagtcagaaaccttggagtcagcttttgacttctcatcctgtaacaggcaccaagtttgatttctttcccttgaatatctcttagaaccctcaccttcctccttctctttattcctaccattgtccttactcaggaccatatagtgagggtttaaaagtgcagagtcttggccgggtgcggtggctcacacctgtaatcccagcactttgggaggccaaggcgggtagatcacctgaggtcaggagttcgagaccagcctggccaacatggtgaaaccccgtctctactaaaaatacaaaacttagctggatgtggtggtatgtgcctgtaatcccagctactcaggaggctgaggcaggagaattacttgaacccgggaggtggaggttgcagtgagctgagattgcgccactgtactctagcctgggtgacagagtgagactccaatctctagaaaaaaaaaaaaaaaaaaaaaaaagcagattctaaactcacagtgctgctgctggctgcctgagcttgtgtggctttggacagatgacttaaccactctgtgaagatggtatctgatgcacaggaaatgctccaacgttggctcttgtcgtcatctgtgcccatgtctccctcagcagcctcctgactggccttctccagtctcctggtttggattgaggctccctagaccctacctttctgagactggtatctagtcaggttactctgggagatctccaccccccactgcccagagagcaggttctgagctcttcagtctctccaccttctggccccggctgacaccatccctgccacttctcctggggtccccaaacatctgtggtacttttgtctttcttgcccttggtgttcccactctgcagaacaaccttctctccaggtcaccactgatcgcaatcgcgctctcctttcaaggcccagatcaggtgtcacctgacctttgctgtcctcagatcacacctccctgtagcgactggctcgccagtgtccctctctgaccgagctgtgcactcctccagggcagcactgtcagggtctcccccagacccttggttgtgattctctctccttgtcctgaatctcagttttcctgatacatgggatgctacctgaaggcaggtttcaactttcaatctttttttttgttttttgggtgagatggagtcttgctctgttggtcaggctggagtgcagtagcgccatctcggcttactgcagcctccgcctcctgggttcaagggattctcgtgcttcagcctcctgagtagctgggaccacaggggcctaccaccacacctggctaatttttgtatttttagtagagacggggttttgccatgttgaccaggctggtatcaagctcctggcctcaagtgatccacccacctcagcctcccaaagtgttgggattacaggcgtgagccaccgctcctggcctggaggatttcagatttaaagcaaagaggatattttccaacaaagcaactgcttttcttttttctttttaaattttgtttatttatttttaataaagatgggatcttgcatcttgcccaggctggtctcaaacttctggcctcaagtgatctgcctgcctcagcctcccgaagtgctgggattacgggtgtgagctaccatgccctgtctctttttttgtttgttttttttccaaattgaaacagggtctcactatgttgcccaggctggattgaactcctggcctcaagcagtcctctcgccttggcctcccaaagtgttgagattagaggtgtgagccaccatacctggccctgtagaggggaggcattgatgaaggtcaagaagtcctgttagctctgccttcagaatctaccccaggtccttttagttctctccagcctcactgctggaaccctcacccaagccaccaccttgcagtccacacacggccactgggattggggcggcgttctccgcgcgaaatctggctgtgctcctcccccatgaggccctccaaaggcttcctcttcttaggatgaaacccacactgccagccgaagctcctcaggctcccaccctctacaagctccttctgctccagccacactcaccaggcccgagttcccacctagcaccttccctgggaatgatctccccctggttggctctttctacttattcagcctcaaatgtcatctccactgagaggcctttcctgacctgctgagcttgattccctcccctccccagtcacattactccgtgttatggtacccatccctgtctccttagcttgtttttgtctgtattggctcttccactagactgtaagttgcatgagggcagggatgtctgtttaatcccagtgctcaggatagtgtatggctcgtgatagatgcctagtacattttaaaatgagaacgaatgaagtttgggagaggctcagagcagtgagtctcccccttgttgggggactggggagtgcctgggaggggctatctggtgccagcggtttggagtggctgggatgactctggaatcctgtgaggcccagtcagtttctttggttctcatgcagtgcagtgccctcagacctaaccattttgttccgtgctggcttgaaagggtctgcctccctcccagtgcagcccctgcctctcctctttctcgccccccgccctcctccagagaaagcaggtggtgagggctctctaacccagacaggacttgctgttcagccccagcttgaaattgatttcctccagccctccttgagccaggccccgtgaacagaggaggggtctgagccaggcctcctaggccattggtgggagggagaatgagacagccatttggcccacaggccaccaacttttcccccccttctctaaaagacacacaatggcagttgggctgcacctttgtgagtcaccggtgatagcccatcataaattgttatttcctatatttccagagcagctttatcgggcgttgcctgtgcagtccgggaaccgatttggtatggggtcagttaacatgctgtcttgttgaaatctgtcatcatgcccatataaggcaaactccttggattactttttaccttggcagaatcacaggaatgtcaaggtaaccaggccacctcagcatagctctgattctcacccggtcacctgacttgcccgccctcccccatgactcacccagtggctcagcatggggcctgctgcactgtggctgctggaatctgccaaggacctcctgggactgcccttggttttgtgtcttccttagagtagatcaaatgagaggaaccatgtgaagtagctcacacagggcctaacagagcaaacacaagacgtggaaagcagacttggtgaggcttgagtttagtttgggggttgcgggggtcccagctctgctgcttaacagccctgtggccatgggtatatcccccagcattcagagccttatctgtaaaattagagcacgcagaacaaaccctggtacacactaagtgctcaataaatgtgagtcatttgtgtaattatagtagggtaggccttatgccccacccagtcataaaaatgcctcttgctgttgttggttcaggctcagccccttagtggctttcatggggcaggttgacatggtacccagagtcctcctcggtcctcttcccatggtgtagtgagagcactcaggaccacctaggcctttcctagaaaactgaacccacaccttcccagtgctgccccaccctggtcccccaccccctgcaggacaaaccactcctcccttgttttggggccaggagtcagatctgcccctgagagcagcaggggcccctttgtcctttgacgtcatacccacaccgctcctggagacagccaccccttcatgccagccccaggaaggcttgtaggtggggcgagccagggtgagagtgtagccctgttcctcggccagggcagatgtttcaccatttttaatggagcaattatgagtcagaggtttcagtctctactggttcctcccgatcctataattactctttggctatagaatcctattttgatctcttcttttcttttctcttctttctctctctgtggtcatggtcaggtttttctttttttaaatcctcccaagacactgctaatgttgtctgtctcatgcatccaaggaatctgagatggactgaatattgtcaagggaaaaaaaaagagacccccaaatccagagtgatttcttaacccacccaaatggctttttgtttgtttgtttgtttgtttgagacggaatctcgctctttagccagggtggaaggcagtggcgtgatctcagctcactgcaacctctgcctcctgggttcaagcgattctcctgcctcagactcccaagtagctgtgattacaggcacatgccaccaagcccagctaatttttgtatttttagtagagatagggtttcaccatgttgaccgggatggtctcgaactcctgacctcgtgatccacccaccttggcctcccaaagtgctaggattacaggtgtgagccaccgtgcttggccaacccacccaaattgtgtaccctacaccatcctagtgcttgggagccaacacccactcacaggaggctaagggcaagtttaggtaactcttaacaccacgaattagttgcctgctggcaaacttcaaactccaagcctgaaatttctggttggagtcacctcccagatggactcagggattcattcaccccctcatccagtgctcacggagcctctgtgaggtgcaggcctggagaggagccctgtggcctcagcaaagggcaggcaggctggtgagcacccaacctctggatcgaggggactcaattatgcggataaaggcccctaatcctctcagtgctccaaactcactctgcttctgaaagggatcttcgtaccctgggttcagagagtaggaagcccgcagggaccgagtatgcatgaaacaagcccaagtctgtgggggctgtacatggtcaagatcacagatttccagaccaagccagctccaccctagctgggatgcccaccctgagacacccctctctgctttcactggaataggatggccctgacttggccgggtggactgttgaatcagagcctctcaaaacaggaaaaaggaaaaggatcaccaagcaggagtttcagttgtcaaagacaaaacccttaccacgattaaagattactccagggcctcgcatattcacccttccaccagcagggcccagtttacggatcatttgaatactagcaaaaaaacaagccatctgctggagagattgaacagagggagaaacaggagtgtttgccctgcttccagacacccctttcctgtggcagttcctgcacctggcaagatctactggggaattcccggggtcccactagctcaggacgggtgtgtagcacttgcctaaataacaatcccatcagtgccctgtctgaccttttctccccaaatgccaaaggcctcttgtctggatgaacaaatccctgggcggatttgtccagactaaaacgttaattctaaagactgggccccttaggcactcgctaagattccaggccacactgtctcaaggccagaattggcttacttggctatctttttgaaagatcaaagtttaaaccagatgatctgtagtcccccacccccaccctgaaacctgagcttagctgtaagcattgaaagtaaatggggtgtttgtagctcaccctccctgttctccaggtgaagggccccgtgtgcctgatcatttcatagcaaaatgctagatggggccagaggaggccccagcctctgctgctgccctaattttaaaactgccttttgggagtgtaagtttcctctgttaaaggtagttatttcaaggtaggcctcaccatctcctcctcctggtgagaagctctgcctggagggctgagcactgcctcccgctctgtgggccccacctgccttgggttgagacctatctcttcctggactctgtgtggggagtgcaggctcttccccttggggagaacccagttctttgacgtataatctgagtggtttgggttggttggttggttggttggttggtttcccatgtgtgggatggctccggaagtctgtttgagaacagaggcaggctcagatgggagcagctcctaccccgggccgcctatccccctttaccctggggtttcttttagctccaagcatccattccagtctaacaaatctggtggcagagtctcttttttttttttttttgagacagagtctcactctgttgcccaggctggagtacagtggcacaatctcggctcactgcagcctccgcctcctgggctcaagcgattctcttgcctcagcctcctgagtatctgggattacaggcgtgtgccaccacgtctggctaatttttctgtattattagtagagacggctggtctctactaatagttcaagacggctggtcttgaactcctgacctcaaatgatccacctgcctcagcccccccaaagtgctgggattacaggcgtgagcccctgcacccagcccctctggttctactgagacctcagatctttcatttatggaacaagggggttggattagattgttcgctctcagccctcacttcatgttagactcactaggtggactttgtcaaatgtcattgcccagggcccaccttgagggaatctgtctcattttgcctgtggtgaaattcaggtatttttaaaaagctcccaggtcccatacatctattgtcaattgattttcaacaagggtgcaggaccattcaatgggggaaagaatagtgttttcaacaaatagtgcaggaacaactattaatagatacccatctgcaaagaatgaagttgaacctttacctcacaccatatacaaaaattaactccaaacggatcagatacctaaatgtaagagctaaaactgtaaaactcttagaagaaaacacaagtgtaaatctcatgaccttgggttaggcaatggttattagatatgacagcagaaacacaaccgaagaaaaatagataaatcagactgtttcaaaactggaaactttttgcttcaaaggacactattaaagtaaaaggacaacccgcagaatatttacaaattgtatatctgataagggtctactgtccaaaatgtataaaggactcttaaattcaacagtaaaaagacacaccagttaaaaatgggcaaaggattcaaatagacacttctccaaagaagatctacaaatggtcaataagcacatgaaaaggtgttcgatgtcattactaattagggcaaatcaaaaccataaccactacaaatggtcaataagcacatgaaaaggtgttcaatgtcattactaattagggcaaatcaaaaccataacgtggttgggcctggtggctcatgtccataattccaacatttttggaggtagaagtgggaggatggcttggggccacgaattggagaccagcctgggcatcatagtgagaccctgcctctacagagaattaaaataaaaaattaggccgggtatggtggctcatgcctgtaatcctagcactttgggaggccgaggcgagtggatcacctgaggtcaggagtttgagaccagcctggcaaacatggtgaatgaaaccttgtctctaccaaaaaaaaaaaaaaaaaaaaacccacaaaaattagctggacatggtggtgggcgcctgttgtcccagctagtggggaggctgaggtgggagaatcgcttgaacctgggtgggagaggttgcattgagccgagatcacgccattgcactccagcctgggcaacagggtgagaccctgtctctaaataataataaaaatgagaaattggccaggtgtagtagcatattcctgggaggctgaggtgggcagattgcttgagcccaggagttcaaggctgcagtgagctatgatgacaccactgtactccagcctgggcaacagagtaagaccccaaccctaaaacaaaaaaaaacagaaaaccacaatgagataccactgcacacccaccatgatggctataatcagaaagtcagataataagtattgactaggatgggagaaatcagaaccctcacattgctggtcaaagtgtaatgtggtgcagcttcttgggaaaacagtctggcagttcctcaaaatttaaacatgttttgtatttttagtagagacggggtttcaccatgtcacccaggctggtcttgtctcagcctcccaaagtgttggaattacaggcatgagccaccacgcccagccaagttcctcaaatttttaaatataagaggtatcatatgactcagcaattttactcctaggtatatgcccaaggcagttgaaaacatgtccacataaaacttgtacatgaatattcacggtggtgctaatatccaaaagatagaagcaacacaaataatgcccatcagccaatgaattgataaataaaatgtggtatatccatacaatggaatgttattcagacaggaacgaagtactggtacatgctacaacatggctgaaccttgaaaacatgctaaggagaagccaaactcaaagatcatataccatatggttccacttatatgaaatgcccagaataggtaaattgcaagagacgaaagaaaggtaggttagtggttgccaggggctgggggctgggtaggagggaagtggggttggagagtaactgtaccagttttgcggtggtagacatgttccttgtatttttggttttttgttttgttttgttgttttgagataaggtctcactgtcgcccaggctagagtgcagtggcgctgtcatagctcactgtagcctcgaattcccaggcttaagtgttcctcccacctcagccttctgagtagctgggactacaggcaagagtcaccatacccagttaatttttaattttttttttctttttctttgagatggagtctcgctctgttgcccaggctggagtgcagtggcgcgatcttggctcattgcaacctttgcctcccgggttcaagcgattctcctgcctcagtctcctgagtagctggaactacaggcgtgcgccaccatgcccggctactttttgtattattagttagagacgaggtttcaccatgttggccatgagagacaggactagctggatttcctaggccgactaagaattgctaagcctagctggggaaggtgatcgcacccacctttaaacaccgggcttgtaactcagctcacacctgaccaatcaggcagtaaagagggctcattaaaataccaattaggttaaaagcaggaggtaaagaaatagtcaaatcatctatcatctgagagcacaggaggagggacaatgattgggatataaaccccaggcatttgaggcgggagtgggccaccccctttggttcccctcccactgtatggaagctctgttttcactctattaaatcttgcaactgcacactcttctggtccacgtttgttttggcttgagctgagctttcgctcaccatccttcactgctgttcaccgccatcacagacccactgttgacttccacccctccggatccagcagggtgtctgctgcatttctgatccagcgaggcgcccattgctgctcattcgggctagaggctcgccattgttcctgtgcggctcagtgctcgagtttgtcctaatcgagctaaacactagtcgctgggttccatggttctcttccatgacccacggcttctaatagagctataacactcactgcatggcccaaggttcaattccttggaatccgtgaggccaagaatgttaggtcagagaacaaaaggcttgctgccatcttgggagcagccactaccaacttgggagctctaagaacaaagacccaccggtaacagccaggctggtcttgaactcctgacctcgtgatctgcccgccttggcctcccaaagtgctgggattacaggcgtgagccaccttgcctagccttgttctggaattagtggtgattgttgcacgatcttgtgaatatactaaaactccctgaattttatgtaaaagggtgaattttttggtatgttatgtgaattacatttcaatttttaaaaattgattctccaaattatgtacatatttaaagagtacatgaaagagagggagagaaagaaaagctggatgcgagatgccgcaacctgattccactcactcctagatttgttgagtacctgctatgtgaaaggtaccagtccaggcagtgggttcccacagcaaacagaaccctcctctggggagcttatgctgcacttgggagggagactggttatgaacaaagaacatagtttttgatgatgaaaagtgcagtgagtaaaacaatgcagtgtgaggccgggtgtgttggctcacgcctgtaattccagcactttgggaggccgaggtgggcggatcacctgaggttgggagttcgagactagcctgaccaacatggagaaactccgtctctactaaaaataaaaaattagccaggcctgtaatcccagctactcgggaggctgaggccagagaatagcttgaactcaggaggcagaagttgcgttgagctgagatcatgccattgcactccagcctgggcaacaaaagtgaaactccgtctcaaaaaaaaaaaaacaaaaaaaacaaaaaaaaaaacccaacaacgcagagtggagtgatagcctaggggagatgacagagtccaggaaggcctcctgggttgctgacatttgaggcaagtcctgagtgatgagacaaaaccagctctataaagagctagacgaaagtcttagaccagtatttctcatgaggaggagacagcactccaaaatccatcctttggcctggcgcggtggctcacgcctgtaatcccagcactttgggaggctgaggcgggtggattacctgagatcaggagttcgagaccagcctggccaacatggcagaaacccgtctctactgaaaatataaaaattagccgggtgtgatggtgggtgcctgtaatgccagctactcgggaggctgaggcaggagaatcacttgaacccgggaggtggaggctgcagtgagccgagatcatgccaccgcactccaacctggcgacacagcgagactctgtctcaaaacaaacaaacaaacaaaatccgtcctttgcagcagcaacacgcacgctttctggcacctcaaaggggattgtccaagactggaacactggctgcagggagggggccgggtgcaaagagctggtttctgggtggacacgcaggacctttggaatgctcgctaccccactcagcagtatttatacctcttctccaactgcgaagtcagagctttttcatgcaggctgagaaaactccgaataaggcaacttcaggccaggacataagacgcattccatatttcactgtaattgctttcaaattaggttatgtcgtcatgtaacaggcacacacagtgcacttgctttgcccctggctggggttgggtcctggacaggctgccccgtgtgtcgctgaactgccgcagtgctagccctgattgcctgggcagtagggctgtctgcgtcccacgttgctgcacccatctaatttgtggctgtgttattgtgacctgctcgttttctgttctttcaacctgcttcctggcttttatctccttcagaatctggtggcagtggatcttcaaaaagtgctcaggtgtgcagtctcacaggccagaggctccacgggcccccttgccagggcgagcatctctgcctgtgccgctggtaacccagattccagaaggcttagccgtctggccctgaaagcgcctttatagttggtgatgaagcccatgggctggggagccgtttctgctttcaggaactgaaaagatgccccagtggggctaggccttgcctgaggtctggcaatagcctgccagatgggtgataagaaggcctacccaggtgataagcctacccaggaataaatagctgtacctcccctgtgtccaagccctggacacccttccctaggacccatggaagcaggaaccatgggcagcgtcagaggccacagcaggcaaggtggaagttcaggaggtgggacggcgccctccccctcaaagcaactgatgccccagcggagcgacaaaccctacacggtatttcagagccaaggtttgaaaactcccagggtgctagggagctccgtctggcctccgggtacctggggttggggctggctgtggccagttgcagtcaaccctgagcctgggcaaaatgcatgcaggctggtcctcctgggtgatatcctgctaggcgggtgggcagtgtacacggcagaagagggttgcggcatgaggcagcaaacgtttttttctaaaatcttgtcaagcgtggggtccgtggaatccacatgtgagcatcagcctggtgggtggggagagtgaagcctgcgatccagtctggatcatgtgctacacagtgcagagccggcatgctcacccctcctgagggatcgctcgagcctatttctaggcccaaagcgactttgcaagagactccctttattctgggcttagtggaattccagcttccaacagccatttccctccacccccttcagttctgagaacatgttttgtaacaggaaggcaggaagaaaagagaaggcgagtttgttcagctgggtcagccgcatcccaccaaggccctttcttccctccagctcaccatcgctctgcccactggaaccactcggttgccctgtgtctgccgaatgtttgtttcttaatcagcgccccagagtagagagggctttgcctcttcgggttgagggagggaatcattgatgaatggctcattaaagcccactgctgccacattcctgggtgcttaggtcacctcctgaacaatatccatcattcattcacctaccgccccacatcctggcggctgggaggggtccctgtgacgcaggaaggactttatgaccagagatgctaggtctccgtctccctcctgcagcccacagtgacaaagcagaaactgctcttggggccccctgaagcccgccttagctgggtcaccatgggccttggcacacggaggggtgacagtggatcccaactcaactgacaagcttgcctttctctgttcttccaccccccttccccgcactcacaccctgtgctattttagcaaccagagaagcctctttaataggctgcccgtgtgcaggggcaagctctgaagcctcctctctgtggtttggttcacatgtgttctcaaagacagatgagtccacatccttccttcctccctagataggtcaagggctgggtgcaggctgccttcacaggagggccagggacaggctgggaggagcggggccaccttttgcgaagcgggtgatctgctggggcgttgctctgcctgcctgccttgttctctgagtttacctctagcttggggaccaagggtgggctggggccttctttttttttttttgaaaccgagtcttactctgtctcccaggctggagtgcagtggcgcgatcttggctcactgcaacctctacctcccaggttcaagcgattctcctgtctcagcttcccgagtagctgggtttataggagcccgccaccacgcccaggtaatttttgtatttttagtagagacgaggtttcaccatgttggccaggctggtcttgaactcctgacctcaagtgatccgcccgcctcggcctcccaaagtgctgggattacaggtgcgagccactgcgcccggccctggctgggggcttcttgacctgactctgctgtctctccctcactggccagcacctcccattctactcagacatcgtggaatgaatgcccaccccgtgtttgtatgtatcatctgtgtctgtgtgacattaagcaagtcactgaacctctccctgcctcagtttcctcatcaaatggagatatatcgcatgtgatcatggggttggaggttttaaagagttgctaatgtgtaaatagtaagaactagcaattagccgttatagcataattacctttaatatgtcatgccccccgcacccccgtgctgaatgtaattttgcgggggggcgggttgagacagggtctggctctgtcaccgaggctggagtgcactaacacaatctcagcttactgcaacctctgcctctcaggcacaagctgtcttcccacctcagcctctcgagtagctgggactacaggcgctcagtaccacgcctggctaatttttgtagtttttgtagagatggggttttgccatgttgcctaggctgatctcaaactcctgtgctaaagcaatcctcccgcctcggcctcctaaagtgctgggattacatggtgtgtgccaccatgcctggctggccagaatgtaaatgataactgttttgcttcctcctgtgtccagtacataatagggctccaagtcagtatttgtgaggcaggtgcatgcctcttagttgcggtcctgagggcatggccactgccacgttctggacagtcagagtcgctgctgcccctggaagatgaccgcgatcatgaagcccaggagagctcgatgctttttgcctttccctcctcccacagagggctggcagctctggttcctcccaaatgaaatagaaaccttgagtttgcatttcttctttggcgtgccggcagggcacctctgccttcctcttcctgccagggggaggaagtttctctcaggggctcttcaccctgctttattcctggccatcacacattgacccttgtccccttcggctctttccctgcatggcagggacagcatgaccgtttaatggctttgtgaggccagcatgccagcctcacttctttactcccttccttctcggagtgggctctgtcccttctgcaggagggctttggcacatgctcttcccagtatctggaaggtctccctcatttttatcttattaactcctcatccttcagctcagagtttgagaatgacttcttcaaggacacctttctgtgtctgcctcaccagtcgcttggtgcccccccaccccgccaccatgctgaccgcactcttcagctcccatcccaggggaggtgacacaaactcggccccaggagcccagcacctggctttaaacccagctctgtaactttctaggtgtgtgactgatgggagcaagccacttcacctctcaggccctccgtttcctcatctgcaaaatggaggcagtactagcacctccctccagagatgattacgagggtgacagaattagtaagtgaccaagtgcctcgagcagtgcccgcccctagtagactctatggaagtgtctgctgcagttattgctgttattattaccacttttcctaagggcgttatttctggagtggactgatcgcttgattaatgagatcagacctggagcctcatgagagtgtctgcttttgctcactgttatggattcagcacagggcctggccctctgctgacccccagcatatgcttgtccagagaatgaatatgtacggacccatggtggcctggggcatcatgaggtcggctgcccacattctgagaattttgcatggtggagggcggcgtggtgggcgcatagggcccccatctatagaaaccacctctccacaccatccaccccacgcagcgtagtctaaaccgggtagggagaggaaggatggaagcagagtgttatttttgtaaccaagtagaagaagcgatgaatttttaatgtcccattcgaactccagctcctactcaccagtctctccgcatggagaagtggccgtcatggtcgacctgttcccaagggtggccttgtgagtgcaggctctcctcaccagagctgagggctttgtgaacctctgatgtcaatagatgcccctcatcttccaggaggacaaaacagggcaaagcaagacatggggtgagaacaggagtgcatcagtggggttccccaagcctgtgtcaggtccggatctgggtgggagttcccttctgcgtcatccaggccaggcgagtgggcatcctccctgagcacctgtgcttggggctttgcctgtgtcagtcaggaagacagagtacacggaagagttaccattgctttcagagcaaaccttcctttgacatgcatttaacacagcacggagtgattgacatgtgtccttgtgtttaatccctatcttaacctctcggttactgtcctgtttatcagtgaggaaactgaggcttattgcttgcctgaggcctcagtggcagaagcaagatgtgaatccgcacctgtgtgatgcccaagccagagctcttgtttactacccagagaagatgagcacaggtgggatgtacgtatggagggcgggtagggcagcagcccctctgaggacaggtggccagaacccaagcggcgaggtttgttcacagcctccacagggtggggtggggccatccgcagagggtctcctgccatcccattttccctgcataccagtgggtggtctgagagcctttgcagagaagagactggatctcagcacgtgcttatgtgcgtgtgtacatgcacacacatgcgtgtgattcatctggctcttactttatgccaaggagcctgtcacatgctttaaatgtattttccctagtttaattcttagagcacactgcaggaggtagattctgataaatccatcttacagggaaggaaacagacttaagtaggtaaagtcacttggttgaaaacatggaatgagtaagccaaggggcaggtattcaaacccaaacccaggtctgtgcccctgcagagcctgcaggagcagcccacacaggccaaggctgtgaggggtgctgtttgcacgcgtgcgtggccctccctgcagcccaggtgcctaggtctgggcctggcaacaccagagcacggggccttgccctcggggaacagccctcttttgtcctcaggctgtgggatgtgtcttggctactttgctgcccagcagtgcctgctctcaggcacatgtgagagtagaggcctagcatccgtggccacttccttcccagcccatttgctgctgccctttgctctgcagggctgctgggctcctgggctccacgcctgcttgctgcctgccatcaaggctggcagtgctctggggctgtaaaggtgcaggcgccgtacttcccaacccctggagctcgcacatggtaggagagaaagctcatgtgcatgcaacatccaataagactaaaagtgactgggggttgctacgggagaggtgctgagggtgggccggggacagagcaggcacactgtggagggggtgggcaggactcctgagaccagggcagggagggaggagatgctgggaggcacagggccatccagagagctgccacttcctgagcattgccatgcacgctgcaggcatggccatcttgagtcctcacactgcccgtggcctaggtggggtcttcatccccacgttgcagaggaggaaatggaagttaggaaggttaggtgacgtgcccacatgagtggtgtaagcatggttcccgccctgggctctctgaattcagtattgtatgggggaggctgggaaggtgagttagtactctccgcagtgagaacctgccttggctcccctcccctcaaggagttcatagccgtgggagggagggagacaagaactgttggagacaagaactgttagagaccagagagcaagggcgtgatgtggtctgcagggaggaggctgtctgaggcagaaccgggtcagggaggccatggtgcgggtaccctccaggcacggcatttggcctgacttttgaggggtgcccagggttggctacatggcggggcggaggtatctttagtgggggaacagcgttgtgccaccaggaggggtctctgtctcccaggtagaggaattctccatggtgagaggtggtggtgggggatggtctagctgtccactcttgccccctttcggatttggaaggaagccccatgctgggtccacactggtatggcgtattaattaggcagctgctttgtctgggagggggctttgtgtcgagtctccctgaatgagcagggctggcgacagttgtcaaaacacatggtgcttggtcagagcccccgtagaagccccttgtcctccgcatggcctccgcctgcacccggggcgtggaatgtgctcttgtgtgtccctggctgtctgcttgcttctacactggcccctgcagatggagggggtggggtacaggggttcctataagaagcagacacttggggtttttcccaggtcctgttgcaggagggtgcgtgggctggtttccctgaaggcgcctgggcgtgttggtgttaactgatctgagatcttctgtggccctgatgtctatgagcatgccccagcttgcagggggctgagtagccgggcaccaccaggaggctgcgtgccctgtgcttgggtgtacccatgccctgtcagcatcgttggtctgttagggtcagggacttcggcttcttgtttagtaccctccatcccttccagttgatcatcagaaacattctccttagatgcggctgcctgaccccggtgagggggcctgcctcccacttgccttccagcctcctctaagctgcactgagtcttaaaaataggaaggatagggctgggtgtggtggctcacgcctgtaatcccagcagtttgggagaccgaggcgggtagatcacttgaggccaggagttcaagaccagcctggccaacatggtaaaaccccatctctactaaaaagacaaaaattagatgggcatgttggcatacacccgtagtcccagctactcaggaggctgaggcatgagaatcgcttgaacccaggaggtagagattgcagtgagctgagattgcgccacagcactccagcctgggtgacagagcgagactccttctcaaaaaaaaaaaaaggaaaaaaaagaataggaaggatagggcatggcatgttctccaggagacagagggacgggggcatcttgcttgcaggaagccaggcgacacaggcgtgtgtgcagggctcagagggtctgtgttcctggcctttcctgggagggcttgctcttgggctgcccaaagctcaaagagagactcgaggaaatcctgcatttatgggagcttttcttttcctgccactttcctgttctgggttgtatctgtgcacgtgattggaacgtagcagcctgagctcctgcctgaggagagcagccacgggtcacggaagccagggtccagctggggcctttgggtctagctggcagatgaagggctggccttcatcaagaaaacaagccccatgagggcaggagcccgacctgttcattccacaccaccgagcctggtgctcagtcatgtttgtgtgactgagtgagccggcggcgggctgaggcgcttttgtctggtgtgcgtactggtctcccttgaggcagcttgggggtgtggaaaaagcacatgttgccaaaattgacagacctgggttcaaatccaagctctgccacttaccgcctggatggtcttgtgatgggtcattaaccaccccgagcctcagtttcctcacatctgcctcccggggtcactgtaaggatcagaaacaatgtgtgtatcggccatgtacggtgtgtgtcggcgagtgctccgtggcagctgcggttctcctgaggtcagagctgcggccctgcaggtgtgtggagagagccccgacagccaggctgactctgcgcactgtcctttgttctgcttccccagaccttcacggcatggtgcaactcccacctgcggaaggcaggcacacagatcgagaacattgatgaggacttccgagacgggctcaagctcatgctgctcctggaggtcatatcaggtgagactcccagccacgcagtgcggccgagccctggcacaggtgctctgccacagcggtccccagagaccctgcccacccagctgtcccattgctcctggggaggagagggcaccccttaatagctgcacggtggtctgatgggtggggccagagtggcctggtgggccagcagaggaacctgcttttggagaacagaggagactctaaagcctctctccctctcgccctctctccctttctctctctctgtctcgccccctcttttctctttgtgcacttctcaggggagcggttacctaagccggagcgggggaagatgagagtgcacaaaatcaacaatgtgaacaaagcgctggactttattgccagcaaaggcgtcaagctggtctccatcggggcagaaggtgagctggaggtggggcagcgagggtcctgctcggtttctgacctttaggctctgaagcacaacatctgcatcctgaagagaagttttgttggtggcagggcgcttggggcactcagagccccagtacatactcagcagtgatcacaacaactgctcttgatatgatgctgggcccacaagctcccccaaacccttggaaaaatccggtgggcgcagtccaaatctaggaagtgcaacccacccaaccacgggggcgacggcttctgcagggggaggaatggttttgactcggactcaggtcgccctcactggttctccttgtgccaggctcagcagacagtgacaaacatgtgccatggcctctctctgtaccaggaacacctttctcattatgccctgcccggtatcagagaaggactggaggccccatgtcaggcattgggacagggagtgcacggccaaaggtcagtgcctagactttgccctgtgtgcatgggcttggagaattttgcctctgaccaccccaggatcctcctgggccccacgtagataaccaggaccacagtccactacctgcaggccctcactagagcagcaggctctcagcaggggcccctgggttgagctcccaggcgcttttagagacaggcgaggcctgatggagccccagcagcatgagctcgcagtccactcattagtcagagtaagatttcttcaccctgacatccatgttgtcccagcttctagaaaaacaaagtaaactaattgccgttaatgacagggctctgagagtttggccaagactccgggccagaatgtgtgtgctgagttccaaggctctgccccggcccaggacctctgcgatgaggggtgccaagccttgcatgccacagtcgaggtggttggtgtttgtttaaaaaaatcacaacccaaaaattcagtcaggccctgagattttctgtccttgcatgggtctttcctccaggctctgttccagccttctgcttctcacagctgcatttattttgctcaaatgctagtctgtaaatacagaaggggttagaggagagacccatgtcagtcatcagttttcatttggagaaaaacttggtctaaaaatgttctctgttcatgcccaaattggttcactcccaatccctgtgactgtggggccttggaacaaagcctaatggaggcgttcctggggctcaaggcacctgagaaccccgccccaccctgtccccctgtccttccacatgattgggcattcgcgggagcattggcttcccgtgggggtgatgagaggggccggaggcacagctgcaggtcagagaagcagctggtggatgtgtcatgagaaacgccatcctcctctcctcaccggaactccataagccctccgttaccagctgcacctgtacttgctgagccggggagctgcggccttgcccagctctgcaggcccggccctcaggaggtgcacagaatagatttcctgaggctcgagctgcctcgctgcactaaggggcaggtggtgctgctcagtttctgggtctggggctctgaaccctaggacagggtggacactgggtccctcccctgtctctgggcagcagaatgagcatatttcctcctctcaaaacccgaaagctgtggctcatggacacccccttcctctgggtgtgtccccgggggaaggtgagccccatcttctctgtgacctctccacctgcttccaagcaagcctgccctggagtattctgctcagaggtcagtgagcagggtctcctgtggtgtcctgggcctccagctctgcagttagctttggaactcacccctgtgcccagcccttccccgagagtgcttgcagcagtggcgcccctctgtcttctttggaagccactccatcatgccccttgcatatggcgtgttgacaagttgggaggactgccctaggcacggctggctgatggactctgggatgaggcactgccttctctcacccagccgcagacacacagctgtcctgggccttgcagagatgatttttctcttaagttactgaggctgaagaaggtgtggtccaagcccttcttttgagaagtttcagcaatttttttttttttttttttgagatggaatctcactcttgtcacctaggctggagtgcaatggtgcaatctcagctcactgcaacctctgcctcccgggctcaagcaattctcctgcctcagcctccagagtagctgggattacaagcacccgccaccacgccaggctaattttgtgtttttagtagagacggggcttcaccatcttggccgggctggtctcgaactcctgacctcaggcgatccacacctgcctcagcctcccaaattgctgggactaaacaggcgtgagccaccacagccggccgcaaatgtttgtttttaggttagttcagaaagcgtgcagtctggcctcaggcccgtgctctccccttcctgacaacacagcagccatgcttgttcctcactggccttccaggcactggatccagtggtggtcagagcagccccgccctcacgagggcaggcagacagtgaacaagtaaacagcccgaccaacatgtgatttcactagtgatgccttggggcagcacaggggccagggagaggaactgggtggcgggttggggagctccttgggacgggcagtcagggaagccaccacgagaggtgacacaagcagaagcttacacgatgagaaggaccagccagttgagggtcgcaggctaggggcgtgctttgtgagtggacagagcgtatcaaagcaagaaagagcctggcttgcccagaggatgcagctagagaattccagcaggatggcagggcctgggccttcagggcaagccctttccctgtgggccaggcatggtggctcacacctgcaatcccagcactttgggaggccaaggcaggaagatcacttgagcaggagtttgagaccagcttgggtaacataataagacccagcctctacaaaaagtttaaaaactagcaagatgttgtggcatgcgtctgtggtcccagctactcgggagactgaggcagaaggattgcttgagcccaggcagtcaaggctgcagtgagctatgactacaccattgcactccagccagccagaccctgtctcaaaagaaggaaaccaaccatgctcgctgctgtgtcgatgtggattatgggcgggaagggtacataggaggcagccgcattgagctctggagatgacagtggcttggtggagagtgtcggcagtaggattggaaggaagtggacagattcacaataaacaataatgtagtgcacatttgctgactgcgagatgaaaaagaccacctttgccctgagagtgggggcccggggtgcccccctgtagtcaggaggtacgcagattacggcagaaatgtacagagcactgagagttgagagaggtgtgaacagaggccacacgcctgggaccagcctcttggaggagcggttttttgagttgggtcaggagaaggagctggctgcggggccagggacccttgtggccagaagcctgcaggcgctcagcagcaggaggctctgggacagtgctgcctagagactgttccctgcattttctcctgagggaggtggaggaggacaggcctgggagatgcaaccagggggtggtttggagcctttctctagatggggctggaaggccaccttcaggttgggcggaggagcctcactctggttttaacgaccttctgccctctgcccccttccctgtgtgcagagattgtggacggcaacgcaaagatgaccctgggaatgatctggaccatcatccttaggttcgccatccaggacatctccgtggaaggtgacagccacctgtactgcccccgcttcccacctgagtcagggcgggttagaggagagctgaagtgtgatcttcatgcttcaagcctcttcctgtttccttggggtcactcacagggcctggcccttgcaggggtagtcagtgggtggcaggtgaagggaggctcctcccagctgcctgcctcttggctccagtgccttccgagtgcctttgctctcacagcctcatctcagtggaccctcacgccaccctcatgagatgggctaggatggctgggcccgttttacagtccaggaacccaagtcccagaacagactagtgagagagttgggcctgggcctggttctctgtctgcttgacatccccatccttgaaacttggcccccatggacccgttatgagctcaggccgtccaggaatggacaatttcgcttccctgcaagcacctgtgtgcacacaggatgggcagagccacctgggctagcgtgcaggggctcccaggtgccaggtcgcagtgatgactgggagagatgtgcttcctgccctcgaagggctcccggtctgtgaggacagccgagctatccacggggaacagaagggccccctaggcctctctacagctggtatttcaccttgttcaaaagaggccaaggccggtatcaagggcctgtctgcagtgtgttctggtggtgaaaggcacaggcttggtggccaggcacatggcacagattcaggccctgacaccaccacctcctggggcagccctggtcaagcgactctcctcggggccgtgaggattaagcagggccgtgtgtcctggcagttgggcctggcagcatccgtctgcatccggaatgggagtggctgtcccgctgctatcactgctgctgttgttaggacagatatcctctccccttgggtttcgtttgaccccaggcctgagccgaaagtcccatccaacttgggctgagttctgagggtttatttttgagccagtgctcactgtctttgtgtgttttgcagagacctcggccaaggaagggctccttctctggtgccagagaaagacagccccgtataagaacgtcaatgtgcagaacttccacatcaggtaagcgccagtcctggtcatcctctcctttcctctaggaacctgagatccttcctcccacctgccctgtttgctgtgtttttgtcgtggtctgtgagatgccagccctcagtcagcccctccctggccacgggccctacaagcccatgggaaggtcacctggtcctctctgaggaagaggaggcagtttcccagccatcctggctgaaggcagtaaggtcagccctctcgccggcctaatagaacgttcttcgtccccaggcaaggtgactctcagaagcaacaataaagcttttcatttttgagacagggtcttgtgctgtcacccagactggagggcagtggtgtgatcactcatccctgctgccttggcctaggctcaagtgatcctcctgtctcagcctcccaagtagctgggactgcaggtgcatgcagccacacctggctaatttttaatttttatttttagtaggaacagggtctccctatgttgcccaggctggacttgaactcctgagctcaagcagtcctcctaccccggcctcccaaagtgctgggactacagatgtgagccactgcctgcctctggcctcttcctttattttgacagctcaggagtgaattgtttttagaattgctagtaaatttagtgttggggaaaaatgtactctgtggctgctaagatgaacaagcctcagctccaccatgaacctgcttccctcagggtgagcgggagatgagacatgtccaccatccccgtagctgaggcgagcatgggcactgccgcatgaggtccagggggcggcaagaggcaggcctgcctggtggttgggagcactggctctgggggcggtcctgaggtcagatccggtttgccttgtggctccaccctctgagtctcctggatggcccgcacaggaatgaagagcagggcctcatggggtttgcagcggcctcaggctctctgggacccttgctgggtacagagggcttttcccatcgtgctcaccctgatagcatgtggtccctcccttggtcactcttctctgtgtgtcttcttttttttcctgccactaactgactgaatctttctatagtttccattcattttcttcaactagtaagtatctagcatgcccgctgcatgccgttagtggagatacagtggcacccaaacaaagttcccatttgtgggaagtttacaccacagcgcggggaccagctgttagcacagcggccagtaatcctgcagcataacttcagtgagaagtgctgcacaaagacagggaagtcagatgaagaaagttccctgggtggcctttctgaggaggtgacatcgagcttgacctcagagggaaccaacccttagagggtctcagggaggagaatgtgacccatatagcttgtaactgaccaacttgtggccttggggaaggtctctttcctccagagaccagcatgccaagtgaaatcctggcatttagccagcccacggactggccttcctgtaagtcaggtccgccagggtgtggaggccacacagcacaaacaccagcatcctgcagtggccacctcccccgaagcggcctgtctggttcagggcggcctcccatggaaggtgctagcagttataaagcagttgtcaggagtcaggcactgatccaagcatttactcatttaatccgcacaacagccctatgtagcaggtatgtcactatccccatcatacagatgtggaaaccgagatagcctggcttacccgaggtcacactgtcagtaggcagaagagtcaggatttgatcacagactgcctggccccagaggtcatgcttgcagcctctctgccacactgtctccatgcagtgcctggcacaggccagactgcagtgaatgggaattagtcactgctgtgggtgcacagggccatacggcactctcatgacagtgagcgggccctcctataacctttgcctttccttccccagctggaaggatggtcttgccttcaatgccctgatccaccggcacagaccagagctgattgagtatgacaagctgaggaaggtgagtgtctccagctccccttgatggcccacagacgtgccctgtctgaccccctaactccgggtcaccatccccatgcccttccatcgccagcctccagatctgggttctgcacgcagatgggcagcctgggagagccttgtgcaggctctccgcaacccctggctcggtggctgactctcacctcccttattcccctcgtggactgtccagtctccctccatggcactgcaaccaacccggggttatttaagggcctggccagccatgctttataactccccttcctcaatcttctggattctagaacctcctctgcccaaaggggcagagggcaaggaattccaaaccatcaccacaagcccatgttgcccatgcagggtcctgctgtcatttgcctgtacaaagcctgtatggatccaggccctggccaccagaagctgccagcctcgtgggggaaggcaggacaaaaattgtgtccaaagcaaagcaccacaccaggccgtgtacatgtgctcaggctgaatggggtggcagggcatggggtcagatcagtgctgcggaggaggctagtgtaccccgagcgagcaggagccaggaaaggtcccggaagaagaggcagcttagagccagaggagggcttcctgggggaggcaccagatggcacccagcccgttccagccacagtgagcaagagagctgggccccggccagggagagttggagtgcagtgggctttagtcctgtaagcagtggggagcctgtgagggggctgggggacactttagggtggttgggacctgggacctctcggtttgctccccttacccagtccccagtgctctctcaggcctggcccacatcttccagtcaatgtgaaaaccaggttttagggcaaggggcttaagctagggtctgtgggtggctggaaattgtatgaaaagagtacacctgcatttttctggagaaaaagccctggtttgccccacaaagatttcacgaggcactcctgtgagtgggaattgaatttatccaggcggtgccctcccgctcacacatcacacgtggctgagaactgcctgaagaaacccccaaccctcgccctcccgggtctctccctctgggccagccctgcctccctcctgctcctgcaccctgccctgacggagttcttgttgtccccacttgcctccttctaggacgaccctgtcaccaacctgaacaatgccttcgaagtggctgagaaatacctcgacatccccaagatgctggatgcagagggtaagtcatctcttctgttcagccaccactgtgcttcctgatggccttttctgtccagggctggcctcgggcaaggggctgtgggcacatcagagctttgggtcaccttggggagctggcagagccagcaagaagggctgaatgattctgggtgaactggggacagccatgtcgccctgggagacagagcaagggtagcctgggctggccagatgccttcagggatgaagaagcgtatggggagggggagctgaaggatcaactctcctgagggtgcatctcctcagggcccaggaagggcaaggtggctgaggaggggtgcttcaggcttcctgcgagcaaccctggcctctccctccctacctgcagcaggcatggagtatggagcccgacaaagtggagtgttttgttttttccttttccggctttgctccatttcccagccatgcactgccccatttcctagccatgcactgccccagctgggacctgtgtctctggcctctggtggcccttggagttgactgtcctgctgctccttgaggccattctcagagagaggaagtggcctcattttaatccgcttcccacagccttgtcctttccagacccatgggagagggaggggctgagggtgtggctgagcccacccaagtcacgcgtcactctgcaggtccctctcccccaaggccgtggccttgggagcccgtggatcccagtgagtgacgcctccaccccccgccctactcgggcagtttaacccttgttgttcacttgcagacatcgtgaacacggcccggcccgacgagaaggccataatgacctatgtgtccagcttctaccatgccttttcaggagcgcagaaggtaccgagcagggccaggcaggccctcctcgccgccaccgcgcaatgccgccgctgcctctcgcctcccgtgctcacctcatttctcttgcagacggcagtggcctctctccaactggaagccacccccagctccctggcgttgctgccccctcagccttagctcacacacctattgggtacctcatctgtgccaggcttttccaggcattgaggatgccctggtgactgagtcagacaaggtccctgttctcagggcacttccatgctagtgggagaaacatacagcaggcctgtcacaggagtggaatagagaaaatggggccagatgggggacagagatggctggggtgaccttcagctggtgctgtcaatgtggaggggtgaagtgagcaggtacttgcagcaggagctgctagatgcaggctggggcacaggtgttccaggcagagggtgaagcactacgaaggccctgagacaggaagaagcttggcgtattcagggaccagctagagaggagtgagtgacacgcagtgatgggtcaggcccaacaagacccttgtggtgtgggataagaaattcatgttccactctgagggccatgggagccccttagggtcttactccgtggtgggagctgctcactcacattttcagacagatcatttagcaactgactcctccaacccaaaacaaagctgcctttatagggcccacagctagtctgtctccagcccaggccggttagaaaaggaatgcaccctattcggactccacaaaaccccgcaaggcatgtccacgcaggcctggggctggcttccagtccagagcaagtgctcttcctcctgcatgagcctcaggccggcccggccgccctccctgcgtctttcactctctcctgcctctctctctctttctctctctctctgtgcagatattgtgggcactctgaggccagatgagaaggccatcatgacttacgtgtcctgcttctaccacgctttctcgggggctcagaaggtgagctgggccaggcacacctcgctgctggggctgcagacctgccttcaccaccgcccttgcatcaccgctggccatctgtggttggagccctggccaggccgtgggccgccacaccacacagactgaccctgccggcctctgactcggaaggtcccctggggcaggtttcccgcctggccggtgctgggcctgtgctgaggagtcacagacctctgtttgaacacagcccaccctgggaggtgggtggtggcatcctaggctctcaggcggggaaactgaagccctgcattacagtcaatggcagagctgggatttgactgcccggcgttcccactcgccctgtccatcatctgcaccagggctgcctgcctgcccctgccaagcccttcgtggggagcactgggctttacccgttttgcagctccttcctgccaggaaaggctcagcatgtgcagcccaacctgcactcacggtcccagccctccagaggccaggcagagcccacagagcttgcgtggcagtggccgccctcctgggcccagctgacctcatgctgcctcacagctcctgccgggccctcagcgttcacgcagaggcccaagcactgctccccccgcttgccttgtggtctctgaagtatctcaggcagcattcccgatgcctgctttgaagtgtcagcagttggcacaggttcagaggaggaggcagaatcgattcttgtttactgaacatgtactacacgctaggcaccctccaaggccttcacatgcacaggcttccagagggtccctgtgcacacccccaggagggctaggcgcagttagccccatttgagagaggaggaattgaagtttagggaaacagctattcctaaaactagaaggggggggccgtaccttctgtggacccctgctttgagcctcccaactagcaggtgcattacctaccgtcagtctggcctggccccactctgccacctcttggtactgtgaccttgggtgggtcacttgacctcagcttccccacctgtgaaatgggcatcgctgtagttcggtctcacaggattgttctgggcgtgaaacgagctcctgcaggcaaagggcttagcacagtgcctggcacggcagctgccatttaggcagctgccagggagccacagtggtggggagtgtggttcttcccagcctcgggccagaaaggcctcttcacctcctcagcatgcgattggagcttgtgtttggagtgttctgctagagggcacgggccaggagggtggagggaggacccctgacccacactcccgcgggagggtgggcagggaccagcagcaatggacgattcgtcaccacagaccccaactaacagcatgtttgccattggactcacccctacgggccccgaaccagccccctgcccaccacatggcctcaccagattgcttttctttctacccacactgctcccctgtgcttagggctgaactccagtctggaggctctgagggattttgggggagcagggactggcaggcaagcccaggacagtatgggtgggtgctgaggcactgggcctggaggcttgtcactggcccctctctgagggggtagtggaggcccggctgcagggcgctggctggtcagaaaggaaagtgctgggtccctgtgtgctcctcaggacagccccgtggtgctgctcctgctgcctcgtttccccagagacccagtccaagctcttgcaagagtgctctctggggttcatgttttataaacgcagagtgaaccccaggtctagcgccagtgtgcccattctgtcctgagatcatttatttctagtcaccgaagcgttcccgcctcgttcctttattcactcactcattcagcaaccctgaacaccgccagtgcactgagccccaagctggatgcgggaactcagcggtgaaacatgattcccttgccttgcggcagccccgtgctcacagagaggacttgagtttcgggtgccagttgtctctgccaagttaggagtcagggactgacctctgtgacccccacaagctgcagccctggctgtgttttccacactggcctggggcccatgttcattggctgaggaacctcttggacctcatctctgaggagcaccgcctggggccctgggtgtgtgtcccgcagcatggcgcggggtgtgcacgtgcgtgtgtgcgctcacacgagcaccggctgccgcctccccgcctgtctccaggtgccatgtgtggaggggagaggctgggcgtcgctgcctgcagcactggctctgagccgttggccaagcctctccattttccttccccatcactctgtagaccctcctcactctttctgttcctgttctgttgccgtttcaactcctcctcttggaccctttctgtgcttcctgaaaggtacctggtctctctctccccgtgtgcaccccctgcctcctctacactgttcactgccccctagcaggacagggcaggacgctctcctgtagttcaggcccagggactatgtccaccactctcaccctccaaagccccagcacttttctgccccacggatggtgacttctgtcctctggagctcctattaacattgcctccaaggcaggagagtggacaggcctgagtgtgctcctgtgcacggaccactaggctcctccgggacccgggcgcccctgctctgttgcccccagctctccagctctcggcttcccatcctttcaccttcccaccgggagagactcctccgcagtcttaggtccaacgcagccgacccgtccagcctcaccctcctctgtgtggggcactagagggtttgcgagcagcagtgggagggctccccaaccctcctcggtgcctccagggtctgggctttctggacccaggggcattttgcagtcagcagtgaggatgccaacaaggcctattgggacagggcaccatctcactggagctgtgcttcctctccttcccctctgtgaggagttccgtgggccatggaccagctgctttcaagggacgtgcccgtcaggagggagggtggccagcccccaggcagccctgactgtgtgctcccctccaggctgaaactgccgccaaccggatctgtaaggtgctggctgtcaaccaagagaacgagcacctgatggaggactacgagaagctggccagcgacgtgagtgttcccccagtgaaagtcagggccacctcattatcctcagccagaggtcactgtgactcttgcagggggaaagcaggtgtggcagcgagatgacctagaaaaggctgcgtggtcacagaccatggcatttagccagctggtgtgtacacgacctctccgtttgcttccacaaggctaagggtcagaccggcagccaccttgccagccagcccctgggctcccgagcttgggttcctacagagatgctcagggacagtgtttcctgggcacctcagtgctttagaatcacctggggagctttgtgaaagcccctcttcccgtgccctggccctggagagagtgattcagaaggatggagaggggcctgggaaccaataggatagcaggccctgtgcaggtgcttaacgagcagcccagcaagacgggaactcggattatcctcctttccaagtgaggaaactgaggcccagggagggtcaggcacgtgcctgctgttacatgactagtgggacagagagctgggcttcacccaggcagccctgctctagagtccaaacccaatgcttcagttggaaataagggtggttagtacaactcttctggaggctcttcatttttgaaatctccatatttaaaaaataaacgtaggctgggcgcagtggctcacacctgtaatcgcagcattttgggaggccaaggcaggtggatcacttgaggtctggagttcaaaaccagcctggccaacatggtgaaaccttgtctctactgaaaatacaaaaattagccgggtgttgtggcacacacctgtagtcccagctacttgggaggctgaggcaggaggatcgcttgagcctgggaggcagaggttgcagtgagccaagattgcgccactgtactctagcctagcgacagagcaagactccattaaaataaaaataaaataaaataaaatttcccaaagagcagtggtttgactgctcatctagaaccagtggttcccagattttgcaatctcatagaccaggaaaatttgaaaaactattggatgtccaacctaagagggccagctttttattttgccaagttacggatgttttaaaaagaaacactaccatctgttaccaccagcacttctaacaccaagataaggtaaaaaggttattcttagaaccccagccattgccaagaaagggcagctggcagcacgcctcacaatgtatccacacagaggtatttctgtctttgaatttctcactttgccagaagttggcatttgggaaccacttctccagcttgtccgtgctggcagataactgattttgtacttctagaattgttttattatttttttgagatggagtttcactcttgtcacccaggctggagtgcaatggcacgaccttggctcactgcaacctctgcctcccaggttcaagcagttctcctgcctcagcctcccaagtagctgggattacaggcgcgcaccaccacgcccagctaatttttgtattttttttagtagagatggggtttcaccatgttggtcaggctgatcttgaactcctgacctcaggtgatccactcacctcagcctcccaaagtgctgggattacaggtgtgaaccagcgtgcctggcctagaattgttttagaatgtccaactgtttgttaccctttctcactccattaaagatctgagtagttcctaaaagaatatgtttgtttctttttcaattttattttctaatttatgtcccaggcccagtgcacatactggcctagccagactgagccaggtgggcttgtcggccttgcccttgaggcacttagtgagcccagaagcagtcaggctctcagcatggagctcagtgaagacagcggcagtggggcatgtgacagcatggaaagggacctttttggcgggggcatgggagtggaggtttcccctcttagacctgagggaaaagactaagagcaaaggcatgggccaggcatggtggctcacccctgtcatcccaccactttgggaggctaaagtgggattgcttgaagttcaggagctcaagaccagcctgggcagtatactgagacccccttctctataaaaacttaaaataaaaatcagccaggctcggaggtaggcacctgtagtcccaactacttgggagactgaggtggaaggatggcttcagcccgggaggttgctatgatcatgccacttcactccagcctgggtgacaaagcgtgaacctgtctttaaaaagaaaagcacaggcaggaacaggaagtaacaagagaacagtacagtgatgcagggacagggagggagcccacgctcccagagttccaggttgggggttctagcaggaatcgtggagaagttgggctggggagcaggggtaaccccctaaggtggggccctcaaagatccagatcccatgtgcccataagctggggggcagcccgtcagcactctgagggtcccccacaaaggccacgctggcttctgtggcccacagctcctggagtggatccggcgcaccatcccctggctggaggaccgtgtgccccaaaagactatccaggagatgcagcagaagctggaggacttccgcgactaccggcgtgtgcacaagccgcccaaggtgcaggagaagtgccagctggagatcaacttcaacacgctgcagaccaagctgcgcctcagcaaccggcccgccttcatgccctccgagggcaagatggtctcggtgagcaccaggattcacatgggagcagctgtgaggggcagaggcagccctagaactgcctgtgggcagtttggccagcgtaatctttcctaagttgttgatgtcctgtgggacatggcatggcctttcggatgcagtggtcggggaggggtgcacttcactcggcattgtgctcccctttggccctcactcactgtattttacacccagggttttatacgcatcccaaatccttgccacgggttgtgtgggtgtggagtggtgtgaatttggagccgtggtctgccatgatggcatgaccgccatgtgcttgaggcccttcatcagcggaggggcagtgcgccctggacggtaccacctccccatctatggtattcatccattcattcatgcactcacccgttcacgcattcattttgttaatccagaattgattgtacctgctgagtgctggggggccctgtgtaggcatccaggtataatagcaaagcatgacacagacatgaccccagccaagttctgccaccttcccatcagcatcccttggagacatccccctgggtgcctccacttccttgtgatagccctgcctgctcctgccctgccccaggacatcaacaatggctggcagcacttggagcaggctgagaagggctacgaggagtggctgctgaatgagatccgcaggctggagcggctcgaccacctggcagagaagttccggcagaaggcctccatccacgaggcctggactgacggtacggcccagctctgccccactctgcccagccccgctcccgtgctcccctcctgtctctcaggcatgcatgggtgtgcacacacagccccctgccacgttgggtctgtttctcaggtgccctttcttgctgcttgggagcatgtgtgtgtgtcagaaatgctgctttagagccaggttcagtggctcacacctgtaatcccagcactttggcaggccaaggcaggaggatcacttgagcccaagagtttgagaccagcctgggcaacatagcgagaccctgcctatacaaaaaaattttagaataataaaattagccaggcatagtggtgcacacctgtggtcccagctactttggaggctgaggtgggaggattgattgagccagggaggtcaaggctgcagtgagccgtgattgtaccactgcactccagcctgggtgacagagcaagaccctgtctcaaaaaaaaaggaaagaaatgctgctttggattccttcagccccagaaagcagggaccattcaggggccaggtcctctttgttgcccagtctgccctcgcctcagaggtgggaccctgtcagtcatccaggaacacagccaagccccctccagcacttcagggaagtgaccttacacccatctgtttgtcccctctgcgtgtcttccccatccagggcgagtgtgtggggcaggcctcttccatcccccgcaccctgtgttcagagtcggcttccctctcccacacctctgtgagcgtggacggaaggctggggagcccatgttcactggcacgtccctcaggctagaggagggcctgcctcctgggcctgctgccggaccacagccagtgctcaccctcagacagtgctcacccactgccttcggcccacccttcagcatggcccacctgtgagctcctcccacctcccatcccttcccagagcctccttcccgggcctggctccccctgcaggagcgccactgtgctttctgttctcggcagccctgcagctgcctggccgttggctccagatgtgggatttcatcacgtccctggccctcttttgggtcatgccaaggttgagatttcagatcccaggggtctggaagccttcagaaagctgccagtgcctgggagagccacaagagccactcacaggactcctctcccactctggccaccaccttcccaacacagtctccctggccctccggccgccactccgcccagctgagcccttccttgcattcctgagtgcattttctcacccctccccaccctggcccgcatgcgagtgtgcagctccacacggcctgcagccctggccacggcccagcttgtgccctcctcacatgagctcagctcgccattcccgcggcagctgccagcctcagagcagcccagcccctttgctaccaggaaagagtgcgagtgagagagtggatagtgagggaggaagggcctggccaggccgggtgccgcacttccctcttgcctggcagaaaggcacccatgtgaggagagcgtgttagcaccgatgccatcttgtgtggttggtggcctccatccattcccggattcactcattcgttcaacagacagctcaggtggctccagccgtccttatccatggaggcctgggcgtcgccctgtggctgaaccttctgggggtctttctgcccacccatcagctcttcagtccctctacagggctccatgaggccctgcagatggtttcctgaggccaaggggctgggtgtggtggccccactggcattcctcccctgggaagggctctggggcagccttcacctgaggtgtttagaagccagctcagtctccggccagggcccagctggttcagcggcctccacacgtccctgccccacccctacctgactgggcatccacgcgggtctgcccatggcgtctgccagagcccccaggcaggctggcctactaattcccaagactcagagcctctgtcctctcaagtagcagttacgtgaaacaggacaggcaggccctccacaccccagggtctggtcgtagcggcctcctccgccctggggtgggtgggccaccttcactccacacccctcaccatcccccacagcccgcagcgggagggtcgtcgtggatgcttctctgagggacttgatttcctgggaatacgaccaaccccgaacgaccccttgtccccactccagttgtcccttggcctggatcccagatagctgtggcaatggtccgctgcccacatcctctcggtgcacccttgccaggactctgcggaggcagagggagatgtcacctgctgtttctggttcctgcccctgggagaaagcagttggagaagggaattgcaaggccgccttgtggctgagcctcctgccccagggctgcgcagcagggccggtggagccagagtctcccaggcctcccacttcttggccatcagtgccagagccgatcctgtggggagtctggtaggtgcctgacagttgagactgggagaggctgaggtgaggctggtactggctccatgcctgctgtgctcgaacaccacctcactgaaacttgagaatagttccatgccacacaggtactggggctggccccattttacagatgaaggcacaggcccagagaggcctcggtggctgcactgggcgggcagctgtcaggtgctgggacagagctgaggggatctccgctaccacttgggggaagcccaaggtggtgtgcctgaggcagggcccctgtaggagctggggtgcagccaccttcccaggctggcattttccctgcggttccctaaagaccttcacttgcttgcagggcttccttgagctttggttctgggatgtgtaattagccaggatcagggactaataacagcgttcctcctttcctttaaagggcctgatggtgggcccgccccaatgcacacaggacaccttaggacagcgtggggcacttagacgtggagaggaccaccacctgtgcgggtgcagggtcagggtcctagaagaagctggctctgatgcttccccttccccaagcctgctgggacatgggctttgaccccgggtgcttctccggatcaaagccctccagaaacaggtgctacctttctaagccgtgctaccacggcccgatttgtatggtttcctactaacaaaagttgctaagtttaggacacacaggttgagatggaatctctctctcaggctgagcaaccctgaagtgtccatccaggtccatccaggttacagttgggcttagagatccctggagggtacggaagaagattctggaagtttccatgccactgtcattggcatggaaggatgtggggtccacagtctctctttccctccctctgcttggacagcccctccagactcctgccccacagctgccgtgctgtggtctaagcgtctctctgctcctaccagggaaggaagccatgctgaagcaccgggactacgagacggccacactatcggacatcaaagccctcattcgcaagcacgaggccttcgagagcgacctggctgcgcaccaggaccgcgtggagcagatcgccgccattgcccaggagctcaagtacgtgcgggctcaggacactatcatcacctggctctcaccacagcctgcccagactggtggcggcagcacgccgaggcccagcctgcctcaaggcctggaatagggtccccagtgccccaactgcacctccttccagaagccagggaagggccttatgggatgaggccttttgcccatcctgtctcagccccaggtgggacacctgaaggatttggattctctagcaggagggaggtgtctggccccttgtcttgattcttcaggctttaggggtccctgggggtgtcacctctcctggccaccccaagtaggccctggtcccctgatgggatgggccccagcctccgttgctcccagccataggtccctgagggaaccaggctgcacagtgagcctattgttctgctcggccccttccctttcttgctcagaatacacttattgtaagagcttccaggcagccgggctccttcccctccccacccagtcagataaacttgtgtacacaattagtacgctgagggtcgcgctggtgaatggggccttattccaccagtgcagcggccagcagcagggcgggcccaggcagcaggaggcccaggccattacttcatggaaaatccacaggccctcgaggggcagcagggctcccaaaatagccatctgctcaaaaataggatccttggctataactgctctttccaccgacacccccaccccaccacagtcacccccaaaggtctgcttattcctatgagtccaaggcccgtttattcctgagtccaaggcccagccctgatgccccagtggagccccatgctgggcagagctggtttcctccccgactcactacccactactgtccgggtgctttgagggttccccattggctcagccagaggcaagagtcccgtggggccatcacagcatttggcacagttggggcactccaggggtcctgccaccaccacgtccaggccaaggagagcaaggtcacagatgcagcaccctcgggggtgtgggggtgggacacaggcagcttccccagtgacggaagagcccctggaagctggtaggaaacagacttgaaataaaccctaggcttgcccccttctcaggccctgggcaaagctatgtgaaacccattactctgctcaggaacaggcggtccccgaagcagctctctggacggtagccctgaaggaacggaagggagggctgtccgggtcctgtcttttctgctgagggggaattacagaggcctgtggaccgtccaggatgagccggatgggcagccctgctgagcactgattaatggcgatagcaaaaactcactgagctctcagggctttatgtgtaccagctcatttaatccccacagcaactgtgtaactgagggaaccgaggcacagagaggccaagaggtttgcccagggtcacacagcaagggagtggttgagatgggaatggagcccaggcccccagccctactgtggagcacagcctcagcccctgtccgctgtctgtggctggctcgcctgctccccatgtcctgttcctccccagagtcgttccctgccccctacccctcctcaggccccaaggcctggttgaagggccacactcttagctgatagtggcagaatgagtcagggatgggtgagcaggaggaagccgcttcccttctcacccctggttatcacctgttaaccagctctgttatcaccccttcccttctaccctgggggtcccatgggccagaaccaagctgtgatttgattgaccaattagtgattggttgctgatatcctggaatgttgactgccccaacaccctggcctgggaaccttgggggtagatgggtccaatccatctagccacttgcccttgccgagtctcattgctctctgcccggcccgcagcgagctggattactacgactcccacaatgtcaacacccggtgccagaagatctgtgaccagtgggacgccctcggctctctgacacatagtcgcagggaagccctggaggtgaggagggggtgacatcacccacggagctctgtgcccctgctgccccggggctggtggtgtggatagtgtccagacctgtgagctccccccacctcccacggagaggatgttctctgactcctcagggccctctggacccctccccacccctcctgctcacatactgacctgccttccctctgtccctgcccccttccctcccacacactagaaaacagagaagcagctggaggccatcgaccagctgcacctggaatacgccaagcgcgcggcccccttcaacaactggatggagagcgccatggaggacctccaggacatgttcatcgtccataccatcgaggagattgaggttcgcaccccccggccccccatcttcccaagagcctctgtggggctgggccgccccctcactccagctcctcccctagggcctgatctcagcccatgaccagttcaagtccaccctgccggacgccgatagggagcgcgaggccatcctggccatccacaaggaggcccagaggatcgctgagagcaaccacatcaagctgtcgggcagcaacccctacaccaccgtcaccccgcaaatcatcaactccaagtgggagaaggtgggccggggccatccgtaggggctggggcaggacggcggggctgggggccacctccctgaccgctcccacaccgcgtctcctctgccaggtgcagcagctggtgccaaaacgggaccatgccctcctggaggagcagagcaagcagcagtccaacgagcacctgcgccgccagttcgccagccaggccaatgttgtggggccctggatccagaccaagatggaggtgaggcacggctgagccccacagagctgagaaggttccaagagagctcccgtagtgagggggtccccggccagcccagggcctgcagactgaggcgcctggcagagcaggtcccaattctcaccacccaggggccgtgatcaccctgcggggttaggagagtccacagagcttgcgcctggaatcccggcacctggggaggctgaggcgggcggatcgcttgagcccaggagttcgagaccagcctgggcaacatagtgagaccccaactctacaaaaaatacaaaaattagctgggcatgatggtgcgcagcccaaggaggtcgaggctgccgtgagctacgatcatgccactgcacttcagcctgacagcgagaccctgtggtctctagtgggctacctatgggaggtgggtttgatccctgaatgccctggtctgatgattgtgagactcaggcactattgaacctctgatcctgtcctcccagctctaaaatggggatgaaaacagttaccttattacttcaacaaatgctttttgcaccaactaaccagccacatgagtgctgtcattcttacagcagttctgaccaccactcactgagcactcactacataccaggcaaccaggctggcagcaggcaacctcgtttaaacccagcaagcctgagagggggtccgggtgccaggcaggtcagccctgaggttcatgccagccacgcagcatgtggacttgtgggtgccgagacatggagtgcccgaggtcaggagctgcagccaggccagggttcagatcccaactctgcctctaacagcactgagctgtcctccgtgagcctcggtttctacctctgcagtcagggcctgccacagccctggcctcacagagaggtcaagggtaaaatgaagttgggcacagggagcgcttggcagagaaaacctccctgtcattgtcatagctgctttaacatgagagggcaggaccggaggggacagttgtgagcagtgggccttccctcccagggacccatgggccaaggccccaggccaaaggggccccggggaagatgcaggccagcagcgcgagtgggctcctccaggtggtcagtgggggcaggcccaccagcctcaccccaccgcctgcacccacccccgtaggagatcgggcgcatctccattgagatgaacgggaccctggaggaccagctgagccacctgaagcagtatgaacgcagcatcgtggactacaagcccaacctggacctgctggagcagcagcaccagctcatccaggaggccctcatcttcgacaacaagcacaccaactataccatggaggtgcgcggctgccccgcccgctggcctttccaccagcatggccggcttcctcactggaaatggttcgggccagtgagaagatagctgtctgctgtctgttgtttttcactctgtttaaaaattattgaagagaccagcactttgggaggccaagtgggaggatggcttgagcccaggagttcaagaccagcctgggcaacatagcaagaccctgtctctacaaaaaatgaaaatattagccaggcatggtggtgcatgcctatagtcccagctccccaggaggttgaggtgggcagattgcttgagccagggaggcagaggttgaggtgagccgaggtcatgccaccacacttcggtctgggtgacagagccagactctgtctcaaaaaaaaaaaaaaaaaagattgaaaagactagatcaaaatgtttagacatttttaaaaattacactttccctagcactgctctcatcaccatgacaatgcccctcacaggacaagctgttctaggggcccacagagggcaccgtttgccctgtggccttagcagtatcagccttgctcagggccagagccagccagcgggtgccgggtcagggcagcagctcccactggctaacactccggggacattacaagctggtcgccgtcatattggtagcttgagaaaccaaaagactggacactcttgatccaacccatacaggtccacagatgcttcaaaccagagttggcttttttgtttttttcccctgagagccagtggtgagacactgaccagagtttgtccaaacagtctccacagggatcccggcacaagattcatgggtccttgcccttctgctgcccctgtagctgggaaacacacttactgtggagacagacattggcagaggcagcagggaggcaccatggcccgtgtcccctgtgaggtgtacaggagagcaggggctttccccagggcgggaggacagttcacagtcctccacgtgtgaaccacggtgaggacagttcacagcacccggcccacgatcacgcccccgtctttccgcagcacatccgcgtgggctgggagcagctgctcaccaccattgcccgcaccatcaacgaggtggagaaccagatcctcacccgcgacgccaagggcatcagccaggagcagatgcaggagttccgggcgtccttcaaccacttcgacaaggtgagcagcctgccacctcctcggcctctcccctcccgccgttgccgtaccagcccacaccttcgtctctgcatctgttcgtccattcccatcacagttgctgagcgtcggccgccactcccagggccagcagggccctgccactgtcagggtgtaggtgtgcggcaccaagaccccagcctgggccacttcacacgcacaggcagggggccggaggtcccaagtcctgccttctggggtggcatcctcaccacccccagggcagatgaagtctcagcacacccaggctttgcgacccggtctgtgaacctggacacagacaccccgcacagtgcttttagaattcagatttggtccggcagcctcatcagaggggccctgagcgccagagtttgctgccatccccagcccacccctgccgggctgacggactgagaagtgtgcagcctcagctctgcacctggcgcccccaggacaggatacagtcccctctgtcccactccaaatcccaaaggcaaggagaaccccccccccgaccctccaccagtcctgggacttgtcctcagttctgtagcatccagctgccacccctgctgtgggcagagaggtcggggaggcctctgccttcctttgagcttccgaggttggggaaaggatgaaaggggcccgtgccgcccccgaccccacgtgtccctggccatctccttgtccatgttgcctctaactctgtgtttccctcccctacgtgtcccttccccctgccctctgcatgtgaccccgatccctcatcctggtctccacgccgcccctcccgcacacctgccttcggatggccccggcaggatcatggcggggcgctggggcccgaggagttcaaggcctgcctcatcagcctgggctacgacgtggagaacgaccggcaggtactgcaccctgggccccagcggaccatggcattaactgctctctctctctctctccttctctctttctcccctcgccatcccacccctgccatcctgtgtgccatctcatggctctcttgcctccctgcccacatctccctggaccccttcccttttacctggtctcttggggccgctgtctccctgctccccgccactgtcctgtctgcctgctgtgcacatggggcggcccctcttgcctactctgggcccggcctcctctgctatgcctgcgtcctcggagcagaagcagacaggcagcatggactccgatgacttcagggctctgcttatctccacaggatacagcctggtatgcagctctgtctccccagccacccgctcctcctcctcctcctcctcctcctcctcctcctcctcccccccacctctccccctcaccgcctccagagcttcctcgtcctcggggacactcctccgcccgagcagcgcagccgtgcctgcctcttcctctgctgcatctgccggggtggggtccctccgatgacttcccgagccccccttcttccctagaagtctccagaaagagggggcagctctcccactctctcccctttttctttctctttctctctttcttccccatcctccagagcttactcgtgagcctgggctgagggcagtagaccccagttccctgctgtgggagaccacgagaggggagggtgcagagaggccctgcttcccggcctggggcactgggggcttggaggcctgggtcagctggagcagtggcaggctctgcccggggccaaggctgctggagcaggcggggaacagggcgcacgcacacgtgggttgggccctactctctcggctgtttccctggagaccccaccagtgtgggcctggctgcccctgccccactaaatgtcgggtgtcccccaccccaccctctccttgcagggtgaggccgagttcaaccgcatcatgagcctggtcgaccccaaccatagcggccttgtgaccttccaagccttcatcgacttcatgtcgcgggagaccaccgacacggacacggctgaccaggtcatcgcttccttcaaggtcttagcaggggacaaggtgagcgagacccctacgaggtgcatgggggctggcgagaggggtccctgcagtgggaggggctgagggggccagtgtgtgggtggggatggctcagagtcccatcctgcctgccccagaacttcatcacagctgaggagctgcggagagagctgccccccgaccaggccgagtactgcatcgcccgcatggcgccataccagggccctgacgccgtgcccggtgccctcgactacaagtccttctccacggccttgtatggcgagagcgacctgtga

SEQ ID NO: 15369 - DNA, 61231 bp, Homo sapiens
attaggggaaaccgaggagatgactgggcaggctgaaatggaactgggatccgaggcgggcttgaagggtcggagcatgggttgggggtgctgggaggagaatcaggggaggctgagaagggaatttctgggtctgggaagtgtgaggaggagcttgagtgtggaggggttggttatttggagagcagaaagatctgaaggagattggaattgggggagcctcaggttgggggagttataaaggggatgaagaatcaagtgtgaggatggagtggagattgtggggtctgaagacgggtgggaagactagggaggctgggaagatgaaaacaggggctaagggtagaattgagcatgaaaagacatgggcttagggtgtgaggagggtagaggtgccaggactgggggtctgaggagggtggggtgcggaaggaagaagttaaggggcccgtgaatcagacgtttttgaagggggtgagatttatttgtggtgccctgttccaaaggggagaagattaagagataggaggaataataagaggaattgatgagggatggagaagccgaagtagaggggatacggagagtggggataatttggggagggatttctaaagaattgatgggaagctgaaaagctaaagcgttggagagaatgaggaagtgtagagggagaaggtgagatcggtgggagggagggtgagctggaatggtggataatgggagagaggttcgtttaggaaaatgaaagtctcattagaaagggaatgcgtaatggatagactgagaaaggaatttgaggagggggtgctggctcctggaggtgcagtcccgggactggagagcgtgtgtgtgtcgtgcaggcagaatgagtttggggaggaagcgttgagagtgtccaggaagaattgtgtcttttttggagagaccggaggtaggtgaagggatcctgaagcagagactgtgttcaggtggcactgtttttttggggggcggggggggcaacttggtagggccccacagcagtgaaaaggtgatcagaagtggagtgggatccccgagcgaggtgtcagtgtctgtgggggggggataaatccagtgtggttgaggggggagctctgagtgtgtgcaggaagagctaaagaaaggagcgtggtgagtgggtgtgtgtggggggaaggggttgttcagaagttttgtgcgtgaaatgggtgggaggtacttgaagttggaagcatttcgtgggatctggagatctggattttctttccagatttgttactgattcgctctgtggccttggacaagacccttgaactctccgggcagttttgttatctgcaaaatgcaaagggatccgagggttccctgcggtgattctgttaataaagagggatgtgtgtagagttgggactttggacagggctctgaaggtttgggagagtgagtttggtggagatttttcaggaacaggctacagggctttgagtggtgacctggcagagtggggagtgactggaagcctctcgagggcgcgagttggtggccaggagcttggcacaggcagcctagcccaggctggaggggaaagggtgggaagggtggaaggagcagctgttccaaggcagcctgaggtggggccgggcataaccttgggtccattaccagcgttgcttgaatttcctcatccgtagtaactgaggggcatggcagtggcttggtgggaggggtgtccttatccgtggccccacctactgcaggatggacaggttgcgatagttggcataaattcactttttgaggggaaggtgagatctgttctggagtctcaacaataatttattgcctgaggcagtgccaggttggaaaaggttgccaagagacctggaaagttgggagggagcaggggccacagtggtggttttgagaatgtctaggctttgtcttctgcagctgaaggtgctggagaaaataaacccctcccccttttttctcaggtgataagggtggggggaccttccttttctctcccttcctgtcttctgccactcctcaagtgactccttttgcgagccgggtttcactccctcccgagagttagggtgtgggctttgttcgtggttatagtgtcccttgcctacagggtgaggctggggcaccattcaggccctgggtggaaaccaggactccccagaacctccaggccttgctgccatgtgtcattctcttacctcccagctcccttcctctggggccgggcaggtttgagggaaaagggtggctcacagagtccgctaataccatctgctttcgtgtctcagccagagccagattctagtacctcctgctttacacctcctccagcaaatatttacccttagctgctctgtgggggaaactactgcttcacctctgtgccctttcctgttatggggtagggattctttttgaaatgggggaaggagtaatggaaaggaatacaccaatctgtgtggctctctaccttcctactaagaaacatccctgcactcccaggctggctgggttgtttgtttgtttgtttgtttgtttttggagacggagttttgctcttgttgcccgggcgtgatcttggctcaccgcaacctccgtctcccgggttcaagcgattctcctgcctcagcctcccgagtagctgggaatacgggcatgcgccaccacgcctggctttttgtatttttagtagagacggggtttctccatgttggtcgggctggtctcaaactcccgaccccaggagatccgcccgcctcggtctcccaaagtgctgggattacaggagtgagccactgcacccagactggctgggttttttctacattgcagtgttgctttagtgaatgacagattgcccttcttgcctctccaaggctgagccactgggcacgggaagaatgacagtcctgggggttctgtacatgcatactccaaaaaaatatgcatccagaacagctgtaggccctcaaagtgggtagaattgaattcttctaggaattaagcaagagttggcccaaatcagaggggacgtgtgtctcacttctgcttggaagccctttgctctgacttctagggacccctgtaacccgtaagtaggttatgcaacggtttttacatgagagggccatgagtgttctcctggcgggatggagaagcattgttctggtctttgagcaaattcttgagcaattacagttctgggccacagttccctctcccaatttctaaaagtggcctgggtaacctcatcaccctctgttgtcctggaagggtgagatctcttgaaggttatgccaaatctcattacagcaagaagaaatgactcacttgctaagttttcgtgttcattgaaacatcactatttcaggggcctcaatgtttcaaccctgaccgttggctttttttttggagacggagttttgctcttgttgcccatgtggctgtattaggtatgagttaactatttgaaagtttttgtttgttttttgtatttgttttttttgttttgttttgttttgttttttttgagacagagcctcactctgtcaccaggctggagtgcagtggtgtgatcttggctcaccacaacctcttccaggttcaaggaattctcctgcctcagcctcctgagtagctgggactacaggcgtgtgctaccgtgcctggctaatttttgtgtttttagtagagacagagagtttcaccatgttggccaggctggtctgaaactcctgaccccaagtgatccgcctgcctcggcctcccaaagtgctgggattacaggcgtgagccactgtgccctgccttgtttttcttgaagtagatctttttttctttttaaaggctgataatggaggccccaaagtagccatctgttactttgttccattactctaattgcttgcctcttaggatctggctaggactaacagttttcaaaattgagtaacacacttgacaaaaaaaaaggaaccaaactcaaactcaactgttatctagaaaaaagactgtgtaaatatgtgtgagaggcaagtatactctgtttgccctcttgtaagagggataggggaggccactcagctgctagcactctgttctctcccctcatcctctccagaatgtattttagaacttgactcttctaatgactgaagaaaaggtggggtatgggaagatggcctgggactgcagggtcacttacactcacctggctaagagttgagatctggctggtgccctggagtggcacctgccactcacctaatcctaaacaatccagggtgtgggcccaggattgccctctgccttttgaaacaccctccctggttccggcttctaagaccaacagggaggctactttggtggcagggagctgactcaccctccagttggaactggtgctaaaagcctccatttaacggcagccgactgcttggccccaagtgggctgccttgtgggggggaaagttcagtggaaagtgttggaggaagcagggtggtgtgtgaatatccaagtagtgctggtgctattaagctctgacacagtcagggaggtcagttaaaatgtggtcttatggccgggcgcagtggctcgcgcctgtaatcccagcactttgggaggctgaggtgggcagatcacctgaggtcaggagttcgagaccagcctggccaacatggtgaaaccccgtctctaccaataatacaaaaattaactgggcatggtggcaggtgcctgtaatcccagctacttgggaggctgaggcaggagaatcgcttgaacctgagaggtggaggttgcagtgagccaagatcgcgctactgcactccagcctgagtgacagaacaagactccatctcaaaaaaaaaaaaaaaaatcagatgacagaggggagcggggacaagttttaagtctaagcctcctgggtggggagttctgctgtttcaacatatgctccagtcatggcagactttggccagacagcgccctttttcagagtgaactgagtgtagcacaagttatctgccagtgctagttagcaaacagaatggagccaaaaaagaattgatttgggaaggcccaaggaatttgaaaccgttgagatgaacactttccgtttttgctacactgatttatgttgtgctgggaattgtacaagcctttgaccagaccttagggttgttctttaaaaaaaaaaaaaaaagattcccttgctgctgcttttacttttttgaagggcagaagggaagggcaaatataattagtgaacagctgtttgctctagtatcacttgctcgttcaggttttctgaatagctgaaatatcaacatgtttatctcttcccttgccttagtatatcctagagcagtgttttccccggctttatctttattccttcatttaatgaactccgtgttttcatcactcacattttgttcccttccctcagtttccttcctttgccttcatttatgtatttagtttacagaataacaaaagcactcgtgttacttttaaacaaggtaaaacttaaacagttttttcctccgtttctttttttatggaaataagaggcaagtgatagcaagtgggtaattcaatggcagtggtaactgaagcactgacctgttacaagagagacggaagcttctacttgagcagatacaaatactgtcatccgtggagatttgaaagaagtctttctatcactgggtagtttgagagctcattagtcttctttagaatgggtttaaacttggaaacatcaaagcaagttacaaggaaacttagttttacagtgttggcagcctaggcgccagaatttgttataaagtgtctgaaagtggcccaggtatcacttaacttttcttcaagaaggtctatgagttacattttactcggtatcccaggcatcaaggagtgtaactttcaatgaatcaaagagaaacagaatcattttaaattccagcctctgtttaaagaaggatcttatgaaggggagaaattaaccacctgacccagggaaggatcccgcctcctccagaaagtgaaatcgccgggtgtggtggctcacgcctgtaatcccagcactttgggaggtcgaggtaggtggatcacgtgaggtcaggacttcaagaccagcctggcgaacatggtgaaaccccatctctactaaaatgcaaaaaattagccgggcacggtggtgcacccctgtaatcccagctactggggaggctgaggcaggataatcactcaaacctggaaggtggaggttgcagtcagctgagatcacgccactgcactccagcctggacgacagagtaaggctccgtctcaaaaaaaaaaaaaaaagaaaaagaaaaggagttaaatctttgcatatatttaactggcaagagcatccttacatcagtgcatgggaagttttatccaagtagcagtttccctgggattataaaaatccccgaggcatttgtcttggtgttgtgcctttttttggttgtgttttttcacgtccctcccctcccctttctccataaacaagagaggcattaacttggaatgtccgtggaaagtcttagaagctgattggtgtaatttgcctgccttccctttagtttgaacagcgtttactctggaagaggtcagtggcctttttcttggttgtgatttatgcaagtgttatctgaaggcgagtggagtgagtttacgtgggatttgctgtttgccacctgttgttgtgctggctccttccttcctgggatgagttccattctctccccctcccccaggagtgaggctccccagccagagcagtccccctgtgcttatccccttccttcgtaaactgcagccatttgtgattttccataaccacttttatagacacataataatttcctttgaatcagtttgcattttaaattaagttttgaaaggaaaactgacaagagtatggcaactggaaaacccagctcccctggccataaatataatagaaggaaactgcaaaaataaacacattgaaaacaaaacagtgttgtttccaggtggttaccactcgggctgaaggccccccaggcttgaggcctgctccctttgttagaaagggattggcaagtgttggtgaggtgttaaagacccaccagcaccaagcagagactttctctttgaagtcatcaggtttacaagagaatcaaaggaaataactttctcaatgtgattcagggtgtaatgtaaggtgtagataacccttaaaattttccatgtgtgtatgtcacacttgggaaaaaaacttgatctcatctggtcgaggtgggcagggcagcaccttgtccaggagcacacagcccctcttggctctgtgtgtcatccggccatactagactcgaacatatggctcatgactggatgatgcttgattcatcttcagtttcaagtgttagtgcttttgaggttttgtaagaaaccaggacacattgaaaatacagtcatttctcagtatctgtgggggattggttccaggaacccccttatataccaaaatccacagatgctcaagttccttatgtaagataaaacgatgtgtaatttgcattttaactatgcacatcctcctgaatactttaaatcatctctagattacttataacctaatgctaaatgctacgtaaatggttgttacactgtgctgtttaggaaataatgacaaaaatatgtacatgttcagtgcagatgcaaccattcattttttttcttccagtattttcgatccattgttggttgaattcacagatagagaacccatggatacagagggctagctgtaagaaatgtgggtttatcatttgttcctcacacaacttttttctttcttcgtttttcttgcctttgttccttttttttgagacagggtgtcactctttttaccaaggctggagtgcagtggaacaatcttggctcactgaagctttgacctcgggctcaagccatccccccacctcagcttcccaagtagctgggactagaggtgcacaccaccacgcctgactgatttttgtgtttttgtagagatggggttttgctgtgttgcccagtctggtctcagcctcccaaagtcttgggattacaggtgtgagtcaccacgcccagccaactttttctcttaaggctccagttttcttcttagagttgggcccctcccacgaagaaagcacactgccaccccttcatcggatttgaaccctacattttgaaaggaaagcagtgccctcctgctgagttaacaaggcttatttaaatgtttttcttccaaatatcagagcagaacagattctttgtcttccagtggaactatccacatggggcagaagtagttggaagcggcagttactaccctgcagaacacaatgaagtcatcttgggaaatatcgtggatggtgttgcaatgattgaatgggatgctagaacaccagcaatacaatagcatttgtgtcttcagcttcaggcaggaataaagaagactttgtggtttgttttatgttttttaaagtttcccccccaaaggtgtggggctgagtgatgtctgtcactagctttctagtgggtttttcttttcatcttttcccctccctgatgtcttttgagagtgggtggaagccacagtctaggtggatcagaggaagcacagaaggcaggcagtataccccactttgtgttttccatgtctgaagggaacacatttggtttttgttctgttttgattttttagagacagggtttcactgtcacccaggctggagtgcagtggcctaatcataactcactgcagccttgaactcttgggctcaagggatctttcagcctcagcctccctagtagctgggattatgtgtgcaccaccatggccagctaattttaattttttttttttttgagatggagtctcactctgtcacccaggctggagtgcagtagcacgatctcagctcactgcaacctctgcctccccggttcaagtgattctcctgcctcagcttcccaagtagctgggattacaggcgcgcgccacgacgcccagctaatttttgtatttttagtagagacagggtttcaccatgttggccaggctggtcttgagctcctgaccttaagcgatccacccaccttggcccaacaaagtgctggggttacaggcatgagccactgtgcccgaactaatttttaaattttttgtaaagactgggtctcactatgttgcccaggcttttaatctgcaaaaagcccaagataaagagttttaatatcttacctcctgagtagtaatgactgattccagttctaataatgtcttaattacagctatacagattgaggggactgcaggaagtgaaatagatgcatttcttttttctttctttcttttccttttttaaatacacacttcgtttcggtggtgaaggccagtttgaggttaggagaggcatcttggaaggaagctcgcaggtggttcggcatctggacatgctgggaagttgcctgagggggacgtcacaataagaggactgtgggtctacagcctgccttagcaaaatgacaggccttcttttaccaaggccaagggcagtggtggaagctgacttcagttggtgtcatcaaggcctcagtatgtgtaacggttaacaaattactattctatgatcaatctccatctgggtgtgagtaaaaggtatttagttgctatcaccatggaaaccaagttgcttacttactgttttggggagtgccctcataccagaggcagtgctaatggtggagtgttaggccccgggcagaaaaaaagatcctgccacttggtatcacaggaaaatacctacaggcacagcagccttgccaggtaggggatgaaggccctctgtcctcggggcaggagttgggccagttgattgtgttgatgaggagtgtgcatttgtgcatgagagagggagaagaaaaaggagagcactccatgaaatccgctgctggctttgtagcctagaagagtgctttttttctctaggagtttggaactggaatctcagctatgtgacttcttaataataggacaaaatatgcctgtatcttttgcctacttccacaaacactgataaattaaaaagaactctaaatttcccacaaatcccaagcacaagtaactttttttttaaatccacatcctccctaatccaaatctaacagcaaatccttttctctctgtcactccctgcttttctttaagaaaatgagtaccttgccttaaactatatattggatgaaaatattaaacactttcacaaagtgcttctttggctgttactggtatgccttgcatttggaagggtcagagatttgaagacttctgtgatcttccagttctggcctatgaaatacagtcagtttcaaaattcaaaatgtctggaagagccaacttgccaggccggttcaagggcagtcagatgaatcgacccttcttacaggctgtctacgaaccagtcatgattcagatattcaagtcctggaaggtatccagacggtaaacatcaccaggattgtgaggcagttacttttttttttggatcgtttgagctacactgccaagactgtggtaggacttgtctgtgtaaaacagaaagggctgtctctaaatgtctttttcaagaatgtcggctataatcacccgacactgtgtctcatggtggggtgagatgaaatacctagaccggttaggggagggccttcttggccattttttgaactaattttccctttccctttgtaacttttttttcttcttttcttttctttttttttttttgagacggagtcttactctgtcacccaggctggagtgtagtggtgcaatctcggctcattgcaacctccgcatcctgggttcaagtgattctcctgccttaggctcccgagtagctgggactacaggcatgcattccacgcccagctagttttggtattttttaggagagacggagtttcaccatgttggccaggctggtcttgaacccttgacctcgtaatgcccacctaggcctcccaaagtgctgggattacaggtatgagccaccgcgcccagcccctttgtaactttcattaacactgatgaggcacaagccataggatagaattgaatccattgagagctgtgagccaattgagggatgattggttaatagattgtggcttgaagctgtggaaggtaaggggtgacacttgactcctattagccttgtagaaacacctcagagattcacaggaagcaaactttgaccataaaaatataagactcacagcgcaccgagttctcttagcagctaccttagagttgagaaagttttgggcctctttaataaacaagcacaaagcagttcttgccaaatacggcctgctctggggccacagggttagcttaggagacaactttcttgcctaaaaataaatgcatgttcctatcagacattccaagcatagtttaaacatgagacttctgagcagcagctcaagctctgtgggttcaattatgtcagagtatgggcagtgagggtctttggggagtgtgcccccttatttgggattggttgtggctaccaaggaaatcagatgatcaaatgcaaaacttcctccatcttatttctatatgatcttttttttttttttttgagttggagtcttgctctgttgcccaggctggagtgcagtggcaggatctcagctcactgcagcctctgtctcccagattcaagctattattctcctgcctcagccttccaaatagctgggactacaggcgtggccatcatgtccggctaatttttgtatttttagtagagacagggttttgccatgttggccaggctggtctccaactcctgacctcaggtcatccacccgctttggcctcccagagtgctgggattacaggcatgggccaccgcccccagccttatttctacacgttcttgatctatcacaggctggtgggggagacagcatgcatatagataatgaacaaggtaacttcagataggattatgtgcaataaattaaataacagctagcattttaccttgtgctagacactattctaagtgcttcccatggactgactggtttttgtttttttttctttcctttgagactgagtttcgctcttgttgcccaggctggagtgcaatggcgtgttcttggctcactgcaacctccgtctcctgggttcaagcaattctcctgcctcagcctcccgagtagctgggattacaggcacgtgccaccatgcctggctaatttttgtatttttagtagagacggggtttctccttgttggtcaggctggccttgaactcccaacctcaggtgacccacccgcctcagccaccccaagtgctgggattacaggcgcgagccaccatgcccgacccatggactcacttgtataatcttgtgaagcaggtgttgttacccttacatgcagaaatggatccatgggcctttaagccacttgcccctgtgacagtgccaggatttgaatgtagaagttgaggctttcaagtttatgctgttatttctacactacactgaagtctagtgattgggaatggctttgcgagcgggtggtgaggggaggagtgtgcagtgcaggtacttcagatggagaggaaggtctcaaagaggtggcatttcagctgttccttaacggatgagaaagagagaaccaagagagcaccagaggaacgcgcttccaacagagaaaaccaagcaagggggcccccgaggagcagaaaggcccgagtggtcagagcggagcccgtggaagagatgggcacagccagattgcttagagctgtgttgttagaagtgctgatgagtctacattcaacttgcgcctgcaaactcagtccctcttagatgccagtaggtcaggaacctcatgcttccaggactctggcgctcctaccctttcctcccaggcctcctggacaggccaaaccagaactgacttctaaagtgggaaccccaagacggcagaacatgaatcagccaaacaaaagctgcagttatctctgtgatgatttcggcagtcggcacgtgtatttgattaaagcgttggtaactttgaatctggagttttatggcactgtgtactactcataatggctttgtagtgtggctctcttagggagcttaacttttacaacatgaacaagttccagcctcctttggtcccatcaagaggccatttctacctggtgggatgccacttgctttacaaagcatcttttgtaaaatgttgagtctccttctttgaagttggaagccaggaagcctgattttttttccaataagtattgtagaagatggcagcctgatttatttttatttatttatttattttgagacggagtctcactctgttgcccaggctggagtgcagtggcacaatctcggctcactgcaagctccacctcccaggttcacgccattctcctgcctcagcctcccgagtagctgggactacaggcgcccgccaccatgcccggctaattttttgtattttttgtagagacggggtttcaccgtgttaaccaggatggtcttgatctcctgacctcgttatccgcccgcctcggcttcccaaagtgctgggattacaggcgtgagccaccgcgcccggcctggcagcctgatttttaaactggcttttctcctaggtcctttccttctctataaatccctctttcacttagtatttcctccttgtttcctttggtcagttggagtgagggtggttctagttcagagaaagagacaggcatacaggctgattcagtctgaggtgcttagctttctgtacctcactggaaaccagtccaggaatatgacaggtttcagtaggtttcattggacccacaactccccatttgaaggcagagcttgtcaaacgagttatgtggcttttactcaaggagggaggaacagcaacagggagctctgggctattgatagacactcctgcctctgaacacacagcacccagcaagaagttaccttcatgggttgtctagagtgaacatgggctgggattctctcagccttagcactgatgatttgacaacaaaaatcgccccgtgggtagagtataacggagcaaatgattatggtggcctgtgatggtgcagccagcccagctgcttcagctggaaagaagatggcgaggtttccattctcctggcagcatagccatgtgaacttgttaaatcttttaagtagctgtataggaggggagataagtgtgtgtgtgtttattcttatccccttaaatacaaaaacaaaacttccactttataaaatcaattcagagtgggaagaggtgcatggcacatggaaaatgtgtcggattaggttgagtcctaccccacgtttgggacacagctgtaagtttccatggtgggtggcttattatgcatttatgctgagctgaacctgctccaagctgctgcagataggaaagtctgtcttggagggggagctgcctctttctatcacactataaagacataaaaggtcctttgaaagactccagcagtcaccacttgggtaacagaattaggggctgctgagcaaagtgggtctgtttttttttttttttaaagacagagtttccctcttgttgttcaggagtggagtgcaatgtcacaatcttggctcactgcaacttccgcctcctgggttcaagtgattcttctgcttcagcctcccaagtagctgggattacaggtgccggccaccacgcctagctagttttttgtatttttagtagagacggggtttcatcatgttggccgggctggttgtgaactgctgacctcaggtgatccacccgcctcagcctcccaaagtgctgggattacgggtgtgagccactgcgcccggccacattttatagccaaccggcttcttgtgtaacatgagttggggcttcttgggccccagagtccagcactcaggtagaaatatgaccgccatggccagacagcagccctcgctgggcccctcttcagagcagagctctgtgccgagcctttaggggtatgagagaaaccggagacctggtccgtgctctcaaagagctcgcggtgtagctggggagagagcaaggccacatgagacctcagaaggacactaaacggcacaccgacaagctcacagcactctagctgtgtcccgggagaggaaaggggtgaatcagggcaggtggggtcagtcatggaaactttcataaaggaggtgagtgtgcaggaggggcgggcctttgcccccgctgcgggcaggttgccgagggcaagtattagggggtccggcgtgcaatcgaacatttcttagctgcctctttggagtagcgctaccagttcctgtccccatgagcatcgtcttcggggagctgctggtttgaaggatgaggtaccatgctcatcttggccatgtcttagaacctgtgatagccagacctgtcgttctgggtccgtatccattcatgcgtcctgtcactgtcacagatatcgtgagtgggccagactcttctccccaggtgggagggggtgccttctgaggcatatgttttcagcctgctgatggcctcttcagaattagcacaggtttcgacaaaaagaatggagagactcccttctcatgtccaagggtctccccaagccctgtgtctcagcccctcagggcgtgtggtgctgcacactgccgcccagatgaccacgcgcagccggaacggccgccctgtattgagaagtgggatcggctcccagtctgctggcgaggctgggttgccacagctcctctgttgccctgcaacgcgggtggcctaggagtgtgctgccttcagtttattcctgcctgccaagctacgcttccaggtgctattcttttctttaaataactgccttagtgctgcttgtggaacttagcgttcccatcccaggaaatactccagtgttgtgtttttttttttaaactcattcagatgctcatggccaaatgtgtgacttaaataccgcagtgtccttgatattgccttccccacaccgacaaaccgagttgcattctggtcccactgtgggataaggttagggtagcggcgcttgcctctttgtgtggtttcagatgtgtttctccccacttcagataacacatgacagctgtaatatagctcagttcgtgcaagtaaggtaggggcagaaatcatccaggagaactccagcctccatcctaaaggattagactgcctagcatcagtaggtttaccatagaaggattcagtggagatagcgagggtggtgagtgttgctggattgagcccgtccctgcagcctgggcacgggagcactgcagtgccatgaaggagagggctgggggatattagcacagccggttcctatttccttttccacctggttaagacttccggggaggccctgcccagcagtccttatgagatgctgccttcctcttttttgaaaggcatagatgataaggaggtggacatgttttgagaagagaacctagagctcattacttgtatttgaggcatgtattgcttcactcccactttgggagagttttttctggggaagttaaaggctattcaggatcagagagtttcctgcatggtcccaggggctgggaggagccacctgctcagctggtggttagctgatagcacccagcctacccaccaagataggaggcagctcagatgtcactgggattcgcagtaccacaggctgtccctgggcccaagcagttagctagctgcaccccgggagggggtgttgagagcactgaagctcctgtgggagagtgcctttgacatcccccactccccactgcccagaactaggaggtagtgaaaggtgtcagtggcaagaaggctgggccagagcatggagggaggccgacctgggctccacacccacctcctccaccaccggctggctgtgcgaccctgggcaggtggcgggggttaagcctcagtgtccttctttgaaaaggggcatcatcctatcctcagtttgaggattagacgtgatagtgcgcaggaagcactctggtgcctggtacattgtaagtgctcaataaatgcagcttcccaaaatgatttcaatggcacatggtcctgcatccaggtgggatctgctacttgagtctccccctcaaaggggcctgctgaaatacgcagctcagtgggaaaccaaaacatacacccctttcctccagtgctccccaggaagcgccaagtcctgagcccagccagcaacttcgaagaagtgccctccaacaagtggcagtgggcacttgagcaagtgacttaacgcagccctctccccagcccctgcatccatctgggcctcattatctgggaggtggcttcttgtttcagagttacaggccctgaacaattttgtgttgggatgtgccataggcagtgccaggaaggttctttcatgagtaatttaacttgttactaagtttgctatcagccggggggctctttccccgggttcccttctttccctgggtccccttccccgcaaagcaaagtccaactcaagttagaaacatcccacagcctggagtcaggctgccctctcttcagttggtgtgtgatgtagaagcaggaagggcttcccactgataaccctaaaaataactgcccagaaatgctgtcagatggggccaagaggtgcacaggagcctgtgcccagctgccgacctggaacgtgggactttctagagggcttggaggagccctgccccttccaggcctcttcccaacagtgcttctcacgcctgctgctccattcccttttcctccttcctcccgcgcccccccctttcctggggtcacttcctgatgccattcttcaacttcgcccctgtcccccccaaaagcaatcaaatccacaacctaataaggcaaaagaatgaggagaatgtccgcctcccagcctctcccctaacagggtgcaggcctgaagcaaatttggaaaatgttacaacggagtgacaaccgatgggggctgggggtggggcggtgcagccttgttcaggagctgcccattgttggcctgaggcaggaccctaagggaaggccacccggtttgcgctttcctgatcaggctgttgacacccttctagcacaagaaaatgtatggaaagtaactgcctgagtcagctgcatctccagttgtgggatccacgtgccaggagaacacgaagtacacacaggtccgcagtgggagcccgctcggagacacctccccgccatcacggctgggactgtgcatatccaaacacttcttgcctctgagatgagcagttttcttccccttgactgtgccagggttcaattagcctgggcattaattaaaacttgtcaacacttagagtggggcccccagaaatctgtcacccctcctagatcattatcccaggctaatcaaccctctctaaggcagtttccattcttgacttagtgggagggaggaacaagcccctcggtgctggggagctctgggggaggtagggactgactgggcccaacccactttgttttggaaggtcaagcttagtaattaacctgaatgcttgggggagggggtgaaggagaaagaactgagtctagggatgtgccaggtctttcaaattgctaattatcagcgagcatgaggtcatccgtaaatatatctaattctttagcttgtaattaaggtgctcattaaaagtgcagggaagtcttgttttcctaaaaggggaaaaaaacaacaacacaaaaagtctttgttttgacctgacacgatggctcagaacagggggaggactcaaggcacaggactagtttcctgccttaaagagcctttacaggaaattgactgcaaacagtattggtgaccctgccaaggaggcaaacctagggtgatgtcattgttcgaagctgtcaccgccaagcctctggccttggggcgaggagagttggtgggattaaaaaatgagtgtgtgtatgtgtgtgtgtgtttagcagtctctaaagaggcgagtcaagggaaaatcctagcgggagaaaaatcacaaggggtggggggtgtctcagaaatattcttagctgggttcaactttcctcgtttttctaagtttaaaaaatcctctcttactatttttgctcatcaaaatgctgctgctttttcagagacagccttttttgagccattccctatttagtgttttgggtaattggctgttacagtatggaatttgtggcccaaaggcagcgtggtaagttagacactaggtgcacggtgccccattgttatgaagtgtggaaactgagacgctggactagtctgatgtatctgtttcttccaccaaaaaaaaaaaaaaaccattttggagaactacccaatgccagtgacttggcatctctgagtcgctaatcttcccatgtgcctccaggaaccgtctggagcgtccctgaaaaaaggacaaggtttgtatcttgtcatttttcctctggctggaagtctaagaggtataaacacagtcttaaaatgaaagcaacaaaaataaactcaaagcagccctgcgtgaaggcattaatgcaaaatatgcaagctggcttcctatttatacggcggaaggcagtcagaagagccaggcctggttaaggaaggagttatgtctctggaggtgcctgttccttagaattacaaataaaccctgggtgattactcagatgaggttgtaatgtggtgtctcatttcatgctttgcacagtccagtttcttgatggaaccaacggcctctgaaatgctaatgcaggatcaggatacagttagagtgccccccttcctgtgcccctcctaacatcctaacagctttagaaggaagtttgaagattaaacaggagagccatgtaagtttcctgtgatcctagatcctgtgatttgttaatattctttctcttcaatccacctgacatttacccagataccatattaggcttggagatacaacaagaaagaaaaccaacccaaccctgtccttaaagaaaagatggacgatgaagggccaggcgcagtggctcactcctgtaatcccagcactttgggaggccaaggcgcacagatcacgaggtcgggagtttgagaccatcctggccaacatggtgataccccgtctctactaaaatacaaaacattagctgggcatggtggtgcgcgcctgtagtcccagctactcaggaggctgaggcaggggaattgcttgaacctgagaggcggaggttgcagtgagccgaggtcgtgccactgcactccagcctggcaagagagtgagactccatcgcaaaaaaagaaaaaagaaaaaaagaaaagatggacaatgaattgcatgatggaagtgaacagtgttagggcgatatgcagatgtaaatgtggtcttgttttactgctcactgacttactgaagtaaacccattgacttcgccttcatgggtttgaaaagggtttttccaatgtgctctgtgtgtctcggagctcaggtgttcagagctgcctcccttataaatcgacctccaggagagttgtgtgtttggttcttggtgtatggtttcgtaggctccccagggctgaggagtcaccttgggatccagctttttttcttttttcgagacagtctctccctgtcgcccaggctgaaatgcagtggtatgcacttggctcactgcaacctctgtctcctgggttcaagcgattctcctacctcagcctcccaactagctgggattacagacgcctgccaccgtgcccagctaatttttgtatttttagtagagacggggtttcaccatgttggccagattggtctcgaattcctgacctcaggtgatccactgccttggcctcccaaagtgctgggattacaggcgtgagtcaccgcgcccagccaaaatccagctttttcttagttcctggcttggggcatgttgctggaaaggaatgacagattgaggcaagaaggaggcaagaaggatgcatctcctggccaaggaaactagagtttggaggtgtcccctgtcaatggcatctgaagaatttctacattggaaaggcataggtgacccagtctggtttggagtagatgggactgggtaggggactagtcttgaagctgcaagcatgctgtttttacttagagcacaggtagctggggaggagatcactgtggtgtgggtggcagaagccatccctagccatcacctaggaagatggtggcccttgggttgcccgagctgctgcttgttttagtagctgcatttggtgccacatttttgtggtaactgccaggaagcggagcccagcgtggcctcaggaagttggtgaggtttgcaccactttttaacaggctggtaacagtgccggagctgacaccctcatggttgcagccctgggattttgttatttggggacactttggaatatgtcactcagaatgctggctcactagctccacaagcaaaagactccttgggtagctggaagcaagcgttgggggaaggagggagaggcaattgcagtccagccaagaatctcaaggctcagtcttcaatgtatggaaacttcagtccttttctgatctttagtggaaatagctgttcactcttagcgccaattggaaagtgttggcagctgaagggggtcgttcctcaggggtccccagagccagtgtatctggtatttctaacattttcctagccacccctttctcctccatatgcccctcccagccccaccattcagatagggtggctggaaagaacatctcctaggtcctctaggaaacttggtgtttccactcaagggagttggggatcacgtaacaccctccacttccacctgggatttcaggccatctgtgggagtgcaagagcatggtggggtggaggtcacaggaaggtggaagcaaagccagggcagctccacatgcagccccctttcaggaacagcaaggataggccggcctgtatcttgttgctcagagcaggtgatcctgtcatttggacccttgtgaggagaatggatgtgagtgtgcacctggttctcttctcctggggctgagggactgtggtcttggattatcacatggtaggtgaggtgacaaaatggagggaagtagcctgggtggggactggggtggccactgcagagctctagctgatggtggccaggtgggaatggggacctgggacttcacgaagctggaaatggagagttttatggggcatttcattcaacttaaaaacctggccgggtacagtggctcacgcctgtaatcccagcactttgggaggctgaggagggtggatcacgaggtcaggagattgagaccatcctggccaacatggtgaaaccccatctctactaaaaatacaaaaattagctgagcgtggtggcttgtgcttgtaatcccagctactcgggaggctgaggcaggagaatcccttgaaccagggcgtcggaggttgcagtgagctgagatgtcgccattgcactccagcctggtgacagagcaatactccaacttaaaaaaaaaaaaaaaaacctgcaggccatacaaaatagggcctattgggtgtgaagagctacccatttgtgacccctaaccttgcatggtcttgaccctgtctctgcctctcctctagtctcccctttcctcttgtctgaattgctgctgcttaatcctctcactaggagcgagaaaattgtactttgccccttagtgacagctctgataaaaggtggttgaagtggatggtagtaaaaagggtttgctttagctgtggttttccagcctccggactcctccccctttcccatcaccatagataattaagagttgactcctcaaaattcctcccaccatattgcatatttttaggcttcaggtttttgtgaaccaaaatagtggaaagtttttttgtttgtttgttttgggtagcccaaagcaacacttttctacagaggcagccattctgcacgcacaataacctggtgaacaatgccagctttctattaataaatgaactgccagttcagaatttgtacccatgtggcagatggacagaaatagtttctttaggattgatctcttaaatttgactttgggaagatactggcagtccaggttttgtgacagagatccatcctgagatctttgtaaatggaaaagcctgaatgcagcgtttcttattgataggagagttgatggatttcaggaaaatgggatatagtagatgtgcaatgaatttgttgacttggaaacaaatttggacacttatccctgaaaacttcaggccattttttcctaaactctaattgagtccctgtgattggagtactagccccacagtccttatcaaacttcgcatttggagcaggcagtctgtctgggaaaagccaggaagctcgccatgaaggcatcgccctctgcttttaacttttttaggctctgttacctctgcactggcttgagtatttcctggctcaattgtttctcaggctggccttgagtccttagatgttatttgtgtgcctagaaatagctggaagaaaaatggttgtaatgctttgcattgctcactgctctccatggatggaaattctgtgagggaaagagggctttccacccagaaaaagagctgggcagcgtagacttcattgtcctgctggcctgtcatgttattctgctatactacagcgattaggatgagagagtttctcgctctccctgggtgtgccacctaaggtacattagggtagggacgaacatggcgggagttctcatagtgggctttcctgccagacgtatggcccacacagcagtatttcttacatgtggttcttttttttttttttttttttgagacggagtctttctctgtcgcctaggctggagtacagtggcgtgatatcggcttactgcaacctccacctcccaggttcaagcaattctcctgcctcagcctcctgagtagctgggaccacagatgcatgccaccacacctggctaatttttgtatttttagtagagacgtggtttctccatgttggccaggctggtcttgaactcctgacctcaagtgacccactcgccttggcttcccaaagtgttgggattacaggtgtgagctaccacaccctgccaaggttctattatttgatctatgttctttgtttgtttgtttgtttgttttgagatggagtttcgctcttgttgcccaggctggagtgtaatggcacgatctcggctcaccgcaacctctgtctcccgggttcaagcaattctcctgcctcagcctcctgagtagctgggataacaggcatgtgccaccacacccggctaattttgtatttttagtagagacggggtttctccatgttggtcaggctggtctcaaactcctgaactcaagtgatccacctgccttggcctcccaaagtgttgggattacaggcgtgagccaccatgcccggcccctgtaaccatttttaagtgattgatcatctcagcatgattgatggagatgatggggttggccatccattcttttttttttttttttttggagacagtctcactctgtctccaaggctggagtgcagtggcacaatcttggctcactacaacctctgcctcctgggttcaagcgattcttctgcctcagcttcccaattagctgagattacatgcatgcaccaccatgcctggccagtttttgtgtttttaatagagacagggttttatcatgttggccaggctggtctcaagcccctgacctcaggtgatccccccacctcagcctcccaaagtgctaggattacaggcatgagccaccacacccggcctattcatcatttattgagcatttatttatacccactatgtgccgtaaacaaggtgctgagtaatgagatgtgaacagaatagtccttcttcttgtcctcatggagcacacagcctagtcggggacaataggcattaaaaaataccaacaatgaaaacccaagacatacatagagtgttccaaattgtggttttattttttatatatatatattcatatatatttatatatatttatatatatattcatatatatttatatatatgaatatatatttatatatattcatatatacttatatatatttatatatacttatatatatttatatatattcatatatatttatatatattcatatatattcatttatatttatatatattcatatatatttatatatatttatatatttatatatattatatatatttatatatttatatatattatatatatttatatatttatatatttatatatacttatatatatttatatatttatatatatttttatatatatatatttatatatgtataattttttttttttttttttttgtgatggagtctctatcacccaggctggagtgcagtagcgtgatctcagctcactgcaacctctgcctcccaggttcaagcaattctctgcctcagcctcctgagtagctgggattacaggtgcctgccaccacgtccggctaatttttgtatttttagtagagatgggatttcaccatcttggccaggctggtcttgaactcctgaccttgtgatctacccgcctcggcctcccaaagtgctgggattacaggcgtgagccactgcgcccggtgtgattatttttatgaaggaaaagaccagagtcctttaagaggggacagtgggggacttgcaatagattgtgtgggagctgtcaggggagactttccaagatgatgacagtgaagtgaggcctggagggagagttagagccaacctcagagaagggaacactgttctaggcaggaggacccagggttgtgggaagagagaaataaaatgagaccaagacagtggggagagcagtgtgagttgaagtcagaggggtgacagcagccagaatgtgccggtagcgaggatcttggattttattctagctgcaatgagagctttgattctacaaatatttattgcgtgctagtcactgttttaggtactgggtgtacaacagtgaaaaaagaacttcccagccgagtggaatgccgtggagcatatctgtttcgatgctgggacagatccctaacacagctcattaaagcagatagcaccattccgtctctttcttcagcttcactttacgtcagtcccagcatttttatccctacccttacagatgagagaactaaagttcagagaggtgacgtgacttgccccaggcccctcagtcagtaaaagacagaactgagaatccaaccagactcttccctttttaggttatttctctaacattagggccgagtatcgattctctttacctctgacttcgtgtccctggtattaagactcagggcccacagtgcctcttggaattcaggcatatggtgacatcagtgtgcctaccattcaggtcttggagaatagggtatggcgaaaggagagaactcgtgatatcgctgattcagtagcccagagttgtacgagtccttgggtgtttcaccttcatccaggcatctgagattggagacaagcatgtggctgaatgacgtatctgggggaagctgtctaaacagccgtgtggagttggagagttgaattagctctgtggccaaacctctgggctcagtctgcctatatatggcttgatctcaaagaacaggtgatagcagtaggagttgttttctgtgttgctggtgggagatgcccaggcacattcctttgtagacaagcacaaactagatatttttgaaatcggaggtctgaaaccagccgaagaattaatcctggcctggaaagcatatgggagagtacagccaacctggcttgggtgttgctttcttggttttgttgcatttttgaggcagggtcttgctctgtcacccaagtgggatcacagtggtacaatcatggctcattgcagccttaacctcctgggctcaagtgattctcctgccttattttttgattttttttgtagaggtgaggtctcaccatgttgcccaggctggtcttgagctcctgggctcaagtgatcctccaccttggtctcccaaagtgttaggattacaggcgtgagccgctgcccctggtgactttgttgctttttaataagcccagaaatttctttcaagagggaggatctttgtgaacatcttgagccgcgttcttgatcgctggctgtggaagcctccacctatcaggctcaagtccatgttgctatcatgtgcactttggctggtgaggtgctgagcagaggtttcagcctctaccacaaggtttcctgatgaaaggtcagctgggtgggcccagcttctccttacccaactgagaggcctcatagagcacaaggcctgggtacggaggttcctggggctcctgccatacccagccaggccaagcagagggccccagtgtgttgttgggtgctgagaggctgcccgcagctctcgcctgtgttggaaggctgtagacttggcttctcccaaacgtaagctgtgaagccatggactcagattctcagcctggccctgctacttactgtgggaccttgggcaaggaagtctccattttctcttttacaaaatggggccaataatctgactaccacagggctgtcaggatgcagcgggatggagcctttatagggtcttgttctgtgggatctggagtcccatatgggagttattagttgagggacgaggcatctgggaatctttattcaactaggaaacttcagccaaagaactaatgccatagagatgtcttatggtgtctgcatttgaagccagcggttctttgaaaatttatcctgagttccagaaagccaactgctagataagtaagcattgagcatttaaggggtcctggaagtaagattcctggaaagaagcagcaatctcttactcatccccgattatctcagacacagagtggtggatggaacctttgtggtttaggggctgactcttggtattgctggataaggaatatgagccagtagagacgagtgtgttgtatagcagtgtcctgcgactgggctggagacgtggctgagggaggccagggggcctcagagtgcacgggaggaggcttacagaggtcttttgcatcctgcagaacaccacatgtgtccttccctctgggaaacctcccacccgggcagggcctctggggccggatgtggaaggtaaacaggctgcctttctgctctctaccacagacaggcccggaaaggcctgagtaggagcttttcatctcaggaagccctgaggtcccacagcttctcctgaagcagcctcattgtccctttgtaagagcatgaccaggtgctctagctcctggagcaccagtggagaactagagtggcccaggtgctgatgccaagttcgagcaacagctcctggcgggtttccctgcatccccccactcactcccatctattcttcacataggggccaaagaacatcctgcttgacatcttgatcagtgtcccttgccctcaggatcaaacctgcaagtccccaaggccctgcaggatctgttttctcctctctgtgctccgggcgcatgccagctgcctctctgctccatgctcattcctgcctcctgagggacttcacacggggcccttgcctctgcccctttcgcctcagctcgccacctacctcctcctcattcttcagatggcagtttatgcttcactatttgtagggccgtcgcacctgacacctccagcctaggttaggagcatgtccatcacctctacttctccttttaactccaaccatccttggctctccctctcgagggtcacgagagcagagagagaatctattttgttcaccactgtgtccctaccatgtgggacattgtcaaggcaaatgtaagtgtgcactaaataaatatgtattgaatgaatagatagccaaacagacagaatggatctgccacaacacaaacaggatgcttttcaagtgggcagaagatggagacatcacttgtcgagacactcaaacaagtggctggatggatgagtggcagatccattctgtctttctgcttggctttaggagtagagggatcacccatggtccatcctctgaggacaagggtatcatgaccgcccaggccccactcacccctgccaggctcattgcatcccatctaaaagtgtgctctggaaggtcataagaagtcctcacctgggacacttctaggcccagtgttcagccagctgtcctgagttctgcatcagtccctgctagatatgaaacacaaacaggatgcgatgcttttcttttttttctttttcttttttgagacggagtctcgctgtgttgcccaggctggagtgcagtgggtgcaacccctacctcccgggttgaagtgattctcctgcctcagcctcccaagtagctgggattacaggtgcacaccaccatacccggctaatttttgtatttttggtagagacaatgtttcaccatgttggccaggctggtctcaaactcctggcctcaagtcatctgcctgtctcagcctcccaaagtgctgggattacaggtgtgagccaccgcgcctggccaaacaggatgctttgcaagtaggcagaagagggagacatcactgtcccatggagaggtgggaaaatcatcgttagcacaggataattcatcctattttgtgctcatgtttactgagctaggattgacctgtgtccgggcagcagggacacagaggtgagtaagacaaagagaaggcccttgcccttaaaaatgatacgtgtggctaaaacgctgtagacctttttgttttttcctttttgagacttcctttttatacagaaattgctacctgcaggtaaaattaacttacatcgtgaaagcgacagtaaagtgtttctagggatagctaaagacctaagaacacagccctgtggtttgactggctggccaccttcctgcagctgggtttactatggtgctgtgttctgggacagcccactcgtctccatttattgggctgagcctcgagacctgcaataccagggaaggaagggaagtctaggctgtctttggtggccattgttatttatggggcatcggcagagaagtcagtaccatggaaaatctagagaaagatagaggatacgcagtgtggttgagcagaatctgatagctccctggctctctccgggccatgggacccagggcgacacagccaccctttttctctctgctgtctggcttgggcttgggctttgtctcctgtgtccctccacaccttcttcgctgtcagtggtgaccaatcccgtggaatcagccactgtgtgttaccccaagtccttgcccctgggacctcgctctgttcggagacaaaacccgggactgtttctccttttaaatgcaaccttgttccacaggagaggagaaaagcaagaaagaggtggcttgtttatctgatggtagtggggtgtgctctgatatgcctttgaaaggggcccagctttgctttgcccagcggcctttgcaggataatgagagaaggaaaacacagggaacttagtgggaatttgaaactggagtgtgggagtgggaaagttcagcttttaccttggagcaatccagtctttctcctgtaggaaaacagaatggtgctgtatggcctccaagctgggttacatcctgggaaaaagacacgtgcttggctattggcctgggcgcagtttatgtgtaagcctttccttgtggattccattttcttatttcccgaatacttctcagccccacaagtccactgagtcttctgtctccagagactgcctggtttccatccccgagggcatctgcgcatcacttaccatggtgtaccatgcacctccagtgtgcccggcactgtgtcaggagctggggatacaggtgctggtccccacctcactcccctcaacctctgcaatatatgatacataacccacacacacagaccatatgcaaaagtggtgggactcctttgtacctgtcacctgcatcagtgattatcagcattttgccagacttgtttcatcagtgtctcccaacacactccccccagacattacccatacgtgctcaaatagatttgggtgtgcgtgtgtgtgtgtgtgtgtgtgtgtgtgtgtgtatttttttagagacagggtctcgccctgtcacccaggctggagtacagtggtgagatcatagctcactgcggcctctgaactcctgggcttgctttgttgcccaggctggtctcagaactcctggcctcaagcgattctgccaccttagcctcccaaaatgctgggattacaagtgtgagccaccgcacccggccaatgtatgtatttttaaacataaccacatactgttatatttaatgcttctgaccatgtcttaagaaaaaaacaaaaactccctttggcttccttgacatcacagtctctctgtttctctgactcttcttcctcatctcctatggctaaattctctccctctgtccactgcttacacatgggcatttcacaatgtcctttttccctgaaggaacttaccccctcccctcagccttaagtaccccatctgtggggatgatgcccatgcctgtagtcctgactcactcaccacgctctatcgcagttatttactgatgcatctctctcccctatcagacgctgaggtctttgatggagcaaccttgtatttgtccgtgtatccccagcaccacacctgtccatagctggagctcaggaagtttttttttttttttttttttttttttttttttaaagtcagagtctcactcagtcgcccaggctagagtgcagtggcacaatcttggctcactgcaacctccacctcctgggttcaagcaagcacgtctgggtaatttttgtatttttagtagagatggggtttcaccatttggccaggctggtctcgaagtcctgactgcaagtgatctggccgcctttggctcccagattgctgggattacagacaggcatgagccactgcgcccggcctcaggaagtagttgaatgagtgactgaatgaatgcccacgtgagcaaatgacctgtttgctgaactttagactgacgttgcctgatgcccactgcttgtgcagtacgtacttcagtctcagcgtgtctgagaccaaactcattttcaagtcccacttcttgggcttggcattgcccatttgtcagccatccgagtcagaaaccttggagtcagcttttgacttctcatcctgtaacaggcaccaagtttgatttctttcccttgaatatctcttagaaccctcaccttcctccttctctttattcctaccattgtccttactcaggaccatatagtgagggtttaaaagtgcagagtcttggccgggtgcggtggctcacacctgtaatcccagcactttgggaggccaaggcgggtagatcacctgaggtcaggagttcgagaccagcctggccaacatggtgaaaccccgtctctactaaaaatacaaaacttagctggatgtggtggtatgtgcctgtaatcccagctactcaggaggctgaggcaggagaattacttgaacccgggaggtggaggttgcagtgagctgagattgcgccactgtactctagcctgggtgacagagtgagactccaatctctagaaaaaaaaaaaaaaaaaaaaaaaagcagattctaaactcacagtgctgctgctggctgcctgagcttgtgtggctttggacagatgacttaaccactctgtgaagatggtatctgatgcacaggaaatgctccaacgttggctcttgtcgtcatctgtgcccatgtctccctcagcagcctcctgactggccttctccagtctcctggtttggattgaggctccctagaccctacctttctgagactggtatctagtcaggttactctgggagatctccaccccccactgcccagagagcaggttctgagctcttcagtctctccaccttctggccccggctgacaccatccctgccacttctcctggggtccccaaacatctgtggtacttttgtctttcttgcccttggtgttcccactctgcagaacaaccttctctccaggtcaccactgatcgcaatcgcgctctcctttcaaggcccagatcaggtgtcacctgacctttgctgtcctcagatcacacctccctgtagcgactggctcgccagtgtccctctctgaccgagctgtgcactcctccagggcagcactgtcagggtctcccccagacccttggttgtgattctctctccttgtcctgaatctcagttttcctgatacatgggatgctacctgaaggcaggtttcaactttcaatctttttttttgttttttgggtgagatggagtcttgctctgttggtcaggctggagtgcagtagcgccatctcggcttactgcagcctccgcctcctgggttcaagggattctcgtgcttcagcctcctgagtagctgggaccacaggggcctaccaccacacctggctaatttttgtatttttagtagagacggggttttgccatgttgaccaggctggtatcaagctcctggcctcaagtgatccacccacctcagcctcccaaagtgttgggattacaggcgtgagccaccgctcctggcctggaggatttcagatttaaagcaaagaggatattttccaacaaagcaactgcttttcttttttctttttaaattttgtttatttatttttaataaagatgggatcttgcatcttgcccaggctggtctcaaacttctggcctcaagtgatctgcctgcctcagcctcccgaagtgctgggattacgggtgtgagctaccatgccctgtctctttttttgtttgttttttttccaaattgaaacagggtctcactatgttgcccaggctggattgaactcctggcctcaagcagtcctctcgccttggcctcccaaagtgttgagattagaggtgtgagccaccatacctggccctgtagaggggaggcattgatgaaggtcaagaagtcctgttagctctgccttcagaatctaccccaggtccttttagttctctccagcctcactgctggaaccctcacccaagccaccaccttgcagtccacacacggccactgggattggggcggcgttctccgcgcgaaatctggctgtgctcctcccccatgaggccctccaaaggcttcctcttcttaggatgaaacccacactgccagccgaagctcctcaggctcccaccctctacaagctccttctgctccagccacactcaccaggcccgagttcccacctagcaccttccctgggaatgatctccccctggttggctctttctacttattcagcctcaaatgtcatctccactgagaggcctttcctgacctgctgagcttgattccctcccctccccagtcacattactccgtgttatggtacccatccctgtctccttagcttgtttttgtctgtattggctcttccactagactgtaagttgcatgagggcagggatgtctgtttaatcccagtgctcaggatagtgtatggctcgtgatagatgcctagtacattttaaaatgagaacgaatgaagtttgggagaggctcagagcagtgagtctcccccttgttgggggactggggagtgcctgggaggggctatctggtgccagcggtttggagtggctgggatgactctggaatcctgtgaggcccagtcagtttctttggttctcatgcagtgcagtgccctcagacctaaccattttgttccgtgctggcttgaaagggtctgcctccctcccagtgcagcccctgcctctcctctttctcgccccccgccctcctccagagaaagcaggtggtgagggctctctaacccagacaggacttgctgttcagccccagcttgaaattgatttcctccagccctccttgagccaggccccgtgaacagaggaggggtctgagccaggcctcctaggccattggtgggagggagaatgagacagccatttggcccacaggccaccaacttttcccccccttctctaaaagacacacaatggcagttgggctgcacctttgtgagtcaccggtgatagcccatcataaattgttatttcctatatttccagagcagctttatcgggcgttgcctgtgcagtccgggaaccgatttggtatggggtcagttaacatgctgtcttgttgaaatctgtcatcatgcccatataaggcaaactccttggattactttttaccttggcagaatcacaggaatgtcaaggtaaccaggccacctcagcatagctctgattctcacccggtcacctgacttgcccgccctcccccatgactcacccagtggctcagcatggggcctgctgcactgtggctgctggaatctgccaaggacctcctgggactgcccttggttttgtgtcttccttagagtagatcaaatgagaggaaccatgtgaagtagctcacacagggcctaacagagcaaacacaagacgtggaaagcagacttggtgaggcttgagtttagtttgggggttgcgggggtcccagctctgctgcttaacagccctgtggccatgggtatatcccccagcattcagagccttatctgtaaaattagagcacgcagaacaaaccctggtacacactaagtgctcaataaatgtgagtcatttgtgtaattatagtagggtaggccttatgccccacccagtcataaaaatgcctcttgctgttgttggttcaggctcagccccttagtggctttcatggggcaggttgacatggtacccagagtcctcctcggtcctcttcccatggtgtagtgagagcactcaggaccacctaggcctttcctagaaaactgaacccacaccttcccagtgctgccccaccctggtcccccaccccctgcaggacaaaccactcctcccttgttttggggccaggagtcagatctgcccctgagagcagcaggggcccctttgtcctttgacgtcatacccacaccgctcctggagacagccaccccttcatgccagccccaggaaggcttgtaggtggggcgagccagggtgagagtgtagccctgttcctcggccagggcagatgtttcaccatttttaatggagcaattatgagtcagaggtttcagtctctactggttcctcccgatcctataattactctttggctatagaatcctattttgatctcttcttttcttttctcttctttctctctctgtggtcatggtcaggtttttctttttttaaatcctcccaagacactgctaatgttgtctgtctcatgcatccaaggaatctgagatggactgaatattgtcaagggaaaaaaaaagagacccccaaatccagagtgatttcttaacccacccaaatggctttttgtttgtttgtttgtttgtttgagacggaatctcgctctttagccagggtggaaggcagtggcgtgatctcagctcactgcaacctctgcctcctgggttcaagcgattctcctgcctcagactcccaagtagctgtgattacaggcacatgccaccaagcccagctaatttttgtatttttagtagagatagggtttcaccatgttgaccgggatggtctcgaactcctgacctcgtgatccacccaccttggcctcccaaagtgctaggattacaggtgtgagccaccgtgcttggccaacccacccaaattgtgtaccctacaccatcctagtgcttgggagccaacacccactcacaggaggctaagggcaagtttaggtaactcttaacaccacgaattagttgcctgctggcaaacttcaaactccaagcctgaaatttctggttggagtcacctcccagatggactcagggattcattcaccccctcatccagtgctcacggagcctctgtgaggtgcaggcctggagaggagccctgtggcctcagcaaagggcaggcaggctggtgagcacccaacctctggatcgaggggactcaattatgcggataaaggcccctaatcctctcagtgctccaaactcactctgcttctgaaagggatcttcgtaccctgggttcagagagtaggaagcccgcagggaccgagtatgcatgaaacaagcccaagtctgtgggggctgtacatggtcaagatcacagatttccagaccaagccagctccaccctagctgggatgcccaccctgagacacccctctctgctttcactggaataggatggccctgacttggccgggtggactgttgaatcagagcctctcaaaacaggaaaaaggaaaaggatcaccaagcaggagtttcagttgtcaaagacaaaacccttaccacgattaaagattactccagggcctcgcatattcacccttccaccagcagggcccagtttacggatcatttgaatactagcaaaaaaacaagccatctgctggagagattgaacagagggagaaacaggagtgtttgccctgcttccagacacccctttcctgtggcagttcctgcacctggcaagatctactggggaattcccggggtcccactagctcaggacgggtgtgtagcacttgcctaaataacaatcccatcagtgccctgtctgaccttttctccccaaatgccaaaggcctcttgtctggatgaacaaatccctgggcggatttgtccagactaaaacgttaattctaaagactgggccccttaggcactcgctaagattccaggccacactgtctcaaggccagaattggcttacttggctatctttttgaaagatcaaagtttaaaccagatgatctgtagtcccccacccccaccctgaaacctgagcttagctgtaagcattgaaagtaaatggggtgtttgtagctcaccctccctgttctccaggtgaagggccccgtgtgcctgatcatttcatagcaaaatgctagatggggccagaggaggccccagcctctgctgctgccctaattttaaaactgccttttgggagtgtaagtttcctctgttaaaggtagttatttcaaggtaggcctcaccatctcctcctcctggtgagaagctctgcctggagggctgagcactgcctcccgctctgtgggccccacctgccttgggttgagacctatctcttcctggactctgtgtggggagtgcaggctcttccccttggggagaacccagttctttgacgtataatctgagtggtttgggttggttggttggttggttggttggtttcccatgtgtgggatggctccggaagtctgtttgagaacagaggcaggctcagatgggagcagctcctaccccgggccgcctatccccctttaccctggggtttcttttagctccaagcatccattccagtctaacaaatctggtggcagagtctcttttttttttttttttgagacagagtctcactctgttgcccaggctggagtacagtggcacaatctcggctcactgcagcctccgcctcctgggctcaagcgattctcttgcctcagcctcctgagtatctgggattacaggcgtgtgccaccacgtctggctaatttttctgtattattagtagagacggctggtctctactaatagttcaagacggctggtcttgaactcctgacctcaaatgatccacctgcctcagcccccccaaagtgctgggattacaggcgtgagcccctgcacccagcccctctggttctactgagacctcagatctttcatttatggaacaagggggttggattagattgttcgctctcagccctcacttcatgttagactcactaggtggactttgtcaaatgtcattgcccagggcccaccttgagggaatctgtctcattttgcctgtggtgaaattcaggtatttttaaaaagctcccaggtcccatacatctattgtcaattgattttcaacaagggtgcaggaccattcaatgggggaaagaatagtgttttcaacaaatagtgcaggaacaactattaatagatacccatctgcaaagaatgaagttgaacctttacctcacaccatatacaaaaattaactccaaacggatcagatacctaaatgtaagagctaaaactgtaaaactcttagaagaaaacacaagtgtaaatctcatgaccttgggttaggcaatggttattagatatgacagcagaaacacaaccgaagaaaaatagataaatcagactgtttcaaaactggaaactttttgcttcaaaggacactattaaagtaaaaggacaacccgcagaatatttacaaattgtatatctgataagggtctactgtccaaaatgtataaaggactcttaaattcaacagtaaaaagacacaccagttaaaaatgggcaaaggattcaaatagacacttctccaaagaagatctacaaatggtcaataagcacatgaaaaggtgttcgatgtcattactaattagggcaaatcaaaaccataaccactacaaatggtcaataagcacatgaaaaggtgttcaatgtcattactaattagggcaaatcaaaaccataacgtggttgggcctggtggctcatgtccataattccaacatttttggaggtagaagtgggaggatggcttggggccacgaattggagaccagcctgggcatcatagtgagaccctgcctctacagagaattaaaataaaaaattaggccgggtatggtggctcatgcctgtaatcctagcactttgggaggccgaggcgagtggatcacctgaggtcaggagtttgagaccagcctggcaaacatggtgaatgaaaccttgtctctaccaaaaaaaaaaaaaaaaaaaaacccacaaaaattagctggacatggtggtgggcgcctgttgtcccagctagtggggaggctgaggtgggagaatcgcttgaacctgggtgggagaggttgcattgagccgagatcacgccattgcactccagcctgggcaacagggtgagaccctgtctctaaataataataaaaatgagaaattggccaggtgtagtagcatattcctgggaggctgaggtgggcagattgcttgagcccaggagttcaaggctgcagtgagctatgatgacaccactgtactccagcctgggcaacagagtaagaccccaaccctaaaacaaaaaaaaacagaaaaccacaatgagataccactgcacacccaccatgatggctataatcagaaagtcagataataagtattgactaggatgggagaaatcagaaccctcacattgctggtcaaagtgtaatgtggtgcagcttcttgggaaaacagtctggcagttcctcaaaatttaaacatgttttgtatttttagtagagacggggtttcaccatgtcacccaggctggtcttgtctcagcctcccaaagtgttggaattacaggcatgagccaccacgcccagccaagttcctcaaatttttaaatataagaggtatcatatgactcagcaattttactcctaggtatatgcccaaggcagttgaaaacatgtccacataaaacttgtacatgaatattcacggtggtgctaatatccaaaagatagaagcaacacaaataatgcccatcagccaatgaattgataaataaaatgtggtatatccatacaatggaatgttattcagacaggaacgaagtactggtacatgctacaacatggctgaaccttgaaaacatgctaaggagaagccaaactcaaagatcatataccatatggttccacttatatgaaatgcccagaataggtaaattgcaagagacgaaagaaaggtaggttagtggttgccaggggctgggggctgggtaggagggaagtggggttggagagtaactgtaccagttttgcggtggtagacatgttccttgtatttttggttttttgttttgttttgttgttttgagataaggtctcactgtcgcccaggctagagtgcagtggcgctgtcatagctcactgtagcctcgaattcccaggcttaagtgttcctcccacctcagccttctgagtagctgggactacaggcaagagtcaccatacccagttaatttttaattttttttttctttttctttgagatggagtctcgctctgttgcccaggctggagtgcagtggcgcgatcttggctcattgcaacctttgcctcccgggttcaagcgattctcctgcctcagtctcctgagtagctggaactacaggcgtgcgccaccatgcccggctactttttgtattattagttagagacgaggtttcaccatgttggccatgagagacaggactagctggatttcctaggccgactaagaattgctaagcctagctggggaaggtgatcgcacccacctttaaacaccgggcttgtaactcagctcacacctgaccaatcaggcagtaaagagggctcattaaaataccaattaggttaaaagcaggaggtaaagaaatagtcaaatcatctatcatctgagagcacaggaggagggacaatgattgggatataaaccccaggcatttgaggcgggagtgggccaccccctttggttcccctcccactgtatggaagctctgttttcactctattaaatcttgcaactgcacactcttctggtccacgtttgttttggcttgagctgagctttcgctcaccatccttcactgctgttcaccgccatcacagacccactgttgacttccacccctccggatccagcagggtgtctgctgcatttctgatccagcgaggcgcccattgctgctcattcgggctagaggctcgccattgttcctgtgcggctcagtgctcgagtttgtcctaatcgagctaaacactagtcgctgggttccatggttctcttccatgacccacggcttctaatagagctataacactcactgcatggcccaaggttcaattccttggaatccgtgaggccaagaatgttaggtcagagaacaaaaggcttgctgccatcttgggagcagccactaccaacttgggagctctaagaacaaagacccaccggtaacagccaggctggtcttgaactcctgacctcgtgatctgcccgccttggcctcccaaagtgctgggattacaggcgtgagccaccttgcctagccttgttctggaattagtggtgattgttgcacgatcttgtgaatatactaaaactccctgaattttatgtaaaagggtgaattttttggtatgttatgtgaattacatttcaatttttaaaaattgattctccaaattatgtacatatttaaagagtacatgaaagagagggagagaaagaaaagctggatgcgagatgccgcaacctgattccactcactcctagatttgttgagtacctgctatgtgaaaggtaccagtccaggcagtgggttcccacagcaaacagaaccctcctctggggagcttatgctgcacttgggagggagactggttatgaacaaagaacatagtttttgatgatgaaaagtgcagtgagtaaaacaatgcagtgtgaggccgggtgtgttggctcacgcctgtaattccagcactttgggaggccgaggtgggcggatcacctgaggttgggagttcgagactagcctgaccaacatggagaaactccgtctctactaaaaataaaaaattagccaggcctgtaatcccagctactcgggaggctgaggccagagaatagcttgaactcaggaggcagaagttgcgttgagctgagatcatgccattgcactccagcctgggcaacaaaagtgaaactccgtctcaaaaaaaaaaaaacaaaaaaaacaaaaaaaaaaacccaacaacgcagagtggagtgatagcctaggggagatgacagagtccaggaaggcctcctgggttgctgacatttgaggcaagtcctgagtgatgagacaaaaccagctctataaagagctagacgaaagtcttagaccagtatttctcatgaggaggagacagcactccaaaatccatcctttggcctggcgcggtggctcacgcctgtaatcccagcactttgggaggctgaggcgggtggattacctgagatcaggagttcgagaccagcctggccaacatggcagaaacccgtctctactgaaaatataaaaattagccgggtgtgatggtgggtgcctgtaatgccagctactcgggaggctgaggcaggagaatcacttgaacccgggaggtggaggctgcagtgagccgagatcatgccaccgcactccaacctggcgacacagcgagactctgtctcaaaacaaacaaacaaacaaaatccgtcctttgcagcagcaacacgcacgctttctggcacctcaaaggggattgtccaagactggaacactggctgcagggagggggccgggtgcaaagagctggtttctgggtggacacgcaggacctttggaatgctcgctaccccactcagcagtatttatacctcttctccaactgcgaagtcagagctttttcatgcaggctgagaaaactccgaataaggcaacttcaggccaggacataagacgcattccatatttcactgtaattgctttcaaattaggttatgtcgtcatgtaacaggcacacacagtgcacttgctttgcccctggctggggttgggtcctggacaggctgccccgtgtgtcgctgaactgccgcagtgctagccctgattgcctgggcagtagggctgtctgcgtcccacgttgctgcacccatctaatttgtggctgtgttattgtgacctgctcgttttctgttctttcaacctgcttcctggcttttatctccttcagaatctggtggcagtggatcttcaaaaagtgctcaggtgtgcagtctcacaggccagaggctccacgggcccccttgccagggcgagcatctctgcctgtgccgctggtaacccagattccagaaggcttagccgtctggccctgaaagcgcctttatagttggtgatgaagcccatgggctggggagccgtttctgctttcaggaactgaaaagatgccccagtggggctaggccttgcctgaggtctggcaatagcctgccagatgggtgataagaaggcctacccaggtgataagcctacccaggaataaatagctgtacctcccctgtgtccaagccctggacacccttccctaggacccatggaagcaggaaccatgggcagcgtcagaggccacagcaggcaaggtggaagttcaggaggtgggacggcgccctccccctcaaagcaactgatgccccagcggagcgacaaaccctacacggtatttcagagccaaggtttgaaaactcccagggtgctagggagctccgtctggcctccgggtacctggggttggggctggctgtggccagttgcagtcaaccctgagcctgggcaaaatgcatgcaggctggtcctcctgggtgatatcctgctaggcgggtgggcagtgtacacggcagaagagggttgcggcatgaggcagcaaacgtttttttctaaaatcttgtcaagcgtggggtccgtggaatccacatgtgagcatcagcctggtgggtggggagagtgaagcctgcgatccagtctggatcatgtgctacacagtgcagagccggcatgctcacccctcctgagggatcgctcgagcctatttctaggcccaaagcgactttgcaagagactccctttattctgggcttagtggaattccagcttccaacagccatttccctccacccccttcagttctgagaacatgttttgtaacaggaaggcaggaagaaaagagaaggcgagtttgttcagctgggtcagccgcatcccaccaaggccctttcttccctccagctcaccatcgctctgcccactggaaccactcggttgccctgtgtctgccgaatgtttgtttcttaatcagcgccccagagtagagagggctttgcctcttcgggttgagggagggaatcattgatgaatggctcattaaagcccactgctgccacattcctgggtgcttaggtcacctcctgaacaatatccatcattcattcacctaccgccccacatcctggcggctgggaggggtccctgtgacgcaggaaggactttatgaccagagatgctaggtctccgtctccctcctgcagcccacagtgacaaagcagaaactgctcttggggccccctgaagcccgccttagctgggtcaccatgggccttggcacacggaggggtgacagtggatcccaactcaactgacaagcttgcctttctctgttcttccaccccccttccccgcactcacaccctgtgctattttagcaaccagagaagcctctttaataggctgcccgtgtgcaggggcaagctctgaagcctcctctctgtggtttggttcacatgtgttctcaaagacagatgagtccacatccttccttcctccctagataggtcaagggctgggtgcaggctgccttcacaggagggccagggacaggctgggaggagcggggccaccttttgcgaagcgggtgatctgctggggcgttgctctgcctgcctgccttgttctctgagtttacctctagcttggggaccaagggtgggctggggccttctttttttttttttgaaaccgagtcttactctgtctcccaggctggagtgcagtggcgcgatcttggctcactgcaacctctacctcccaggttcaagcgattctcctgtctcagcttcccgagtagctgggtttataggagcccgccaccacgcccaggtaatttttgtatttttagtagagacgaggtttcaccatgttggccaggctggtcttgaactcctgacctcaagtgatccgcccgcctcggcctcccaaagtgctgggattacaggtgcgagccactgcgcccggccctggctgggggcttcttgacctgactctgctgtctctccctcactggccagcacctcccattctactcagacatcgtggaatgaatgcccaccccgtgtttgtatgtatcatctgtgtctgtgtgacattaagcaagtcactgaacctctccctgcctcagtttcctcatcaaatggagatatatcgcatgtgatcatggggttggaggttttaaagagttgctaatgtgtaaatagtaagaactagcaattagccgttatagcataattacctttaatatgtcatgccccccgcacccccgtgctgaatgtaattttgcgggggggcgggttgagacagggtctggctctgtcaccgaggctggagtgcactaacacaatctcagcttactgcaacctctgcctctcaggcacaagctgtcttcccacctcagcctctcgagtagctgggactacaggcgctcagtaccacgcctggctaatttttgtagtttttgtagagatggggttttgccatgttgcctaggctgatctcaaactcctgtgctaaagcaatcctcccgcctcggcctcctaaagtgctgggattacatggtgtgtgccaccatgcctggctggccagaatgtaaatgataactgttttgcttcctcctgtgtccagtacataatagggctccaagtcagtatttgtgaggcaggtgcatgcctcttagttgcggtcctgagggcatggccactgccacgttctggacagtcagagtcgctgctgcccctggaagatgaccgcgatcatgaagcccaggagagctcgatgctttttgcctttccctcctcccacagagggctggcagctctggttcctcccaaatgaaatagaaaccttgagtttgcatttcttctttggcgtgccggcagggcacctctgccttcctcttcctgccagggggaggaagtttctctcaggggctcttcaccctgctttattcctggccatcacacattgacccttgtccccttcggctctttccctgcatggcagggacagcatgaccgtttaatggctttgtgaggccagcatgccagcctcacttctttactcccttccttctcggagtgggctctgtcccttctgcaggagggctttggcacatgctcttcccagtatctggaaggtctccctcatttttatcttattaactcctcatccttcagctcagagtttgagaatgacttcttcaaggacacctttctgtgtctgcctcaccagtcgcttggtgcccccccaccccgccaccatgctgaccgcactcttcagctcccatcccaggggaggtgacacaaactcggccccaggagcccagcacctggctttaaacccagctctgtaactttctaggtgtgtgactgatgggagcaagccacttcacctctcaggccctccgtttcctcatctgcaaaatggaggcagtactagcacctccctccagagatgattacgagggtgacagaattagtaagtgaccaagtgcctcgagcagtgcccgcccctagtagactctatggaagtgtctgctgcagttattgctgttattattaccacttttcctaagggcgttatttctggagtggactgatcgcttgattaatgagatcagacctggagcctcatgagagtgtctgcttttgctcactgttatggattcagcacagggcctggccctctgctgacccccagcatatgcttgtccagagaatgaatatgtacggacccatggtggcctggggcatcatgaggtcggctgcccacattctgagaattttgcatggtggagggcggcgtggtgggcgcatagggcccccatctatagaaaccacctctccacaccatccaccccacgcagcgtagtctaaaccgggtagggagaggaaggatggaagcagagtgttatttttgtaaccaagtagaagaagcgatgaatttttaatgtcccattcgaactccagctcctactcaccagtctctccgcatggagaagtggccgtcatggtcgacctgttcccaagggtggccttgtgagtgcaggctctcctcaccagagctgagggctttgtgaacctctgatgtcaatagatgcccctcatcttccaggaggacaaaacagggcaaagcaagacatggggtgagaacaggagtgcatcagtggggttccccaagcctgtgtcaggtccggatctgggtgggagttcccttctgcgtcatccaggccaggcgagtgggcatcctccctgagcacctgtgcttggggctttgcctgtgtcagtcaggaagacagagtacacggaagagttaccattgctttcagagcaaaccttcctttgacatgcatttaacacagcacggagtgattgacatgtgtccttgtgtttaatccctatcttaacctctcggttactgtcctgtttatcagtgaggaaactgaggcttattgcttgcctgaggcctcagtggcagaagcaagatgtgaatccgcacctgtgtgatgcccaagccagagctcttgtttactacccagagaagatgagcacaggtgggatgtacgtatggagggcgggtagggcagcagcccctctgaggacaggtggccagaacccaagcggcgaggtttgttcacagcctccacagggtggggtggggccatccgcagagggtctcctgccatcccattttccctgcataccagtgggtggtctgagagcctttgcagagaagagactggatctcagcacgtgcttatgtgcgtgtgtacatgcacacacatgcgtgtgattcatctggctcttactttatgccaaggagcctgtcacatgctttaaatgtattttccctagtttaattcttagagcacactgcaggaggtagattctgataaatccatcttacagggaaggaaacagacttaagtaggtaaagtcacttggttgaaaacatggaatgagtaagccaaggggcaggtattcaaacccaaacccaggtctgtgcccctgcagagcctgcaggagcagcccacacaggccaaggctgtgaggggtgctgtttgcacgcgtgcgtggccctccctgcagcccaggtgcctaggtctgggcctggcaacaccagagcacggggccttgccctcggggaacagccctcttttgtcctcaggctgtgggatgtgtcttggctactttgctgcccagcagtgcctgctctcaggcacatgtgagagtagaggcctagcatccgtggccacttccttcccagcccatttgctgctgccctttgctctgcagggctgctgggctcctgggctccacgcctgcttgctgcctgccatcaaggctggcagtgctctggggctgtaaaggtgcaggcgccgtacttcccaacccctggagctcgcacatggtaggagagaaagctcatgtgcatgcaacatccaataagactaaaagtgactgggggttgctacgggagaggtgctgagggtgggccggggacagagcaggcacactgtggagggggtgggcaggactcctgagaccagggcagggagggaggagatgctgggaggcacagggccatccagagagctgccacttcctgagcattgccatgcacgctgcaggcatggccatcttgagtcctcacactgcccgtggcctaggtggggtcttcatccccacgttgcagaggaggaaatggaagttaggaaggttaggtgacgtgcccacatgagtggtgtaagcatggttcccgccctgggctctctgaattcagtattgtatgggggaggctgggaaggtgagttagtactctccgcagtgagaacctgccttggctcccctcccctcaaggagttcatagccgtgggagggagggagacaagaactgttggagacaagaactgttagagaccagagagcaagggcgtgatgtggtctgcagggaggaggctgtctgaggcagaaccgggtcagggaggccatggtgcgggtaccctccaggcacggcatttggcctgacttttgaggggtgcccagggttggctacatggcggggcggaggtatctttagtgggggaacagcgttgtgccaccaggaggggtctctgtctcccaggtagaggaattctccatggtgagaggtggtggtgggggatggtctagctgtccactcttgccccctttcggatttggaaggaagccccatgctgggtccacactggtatggcgtattaattaggcagctgctttgtctgggagggggctttgtgtcgagtctccctgaatgagcagggctggcgacagttgtcaaaacacatggtgcttggtcagagcccccgtagaagccccttgtcctccgcatggcctccgcctgcacccggggcgtggaatgtgctcttgtgtgtccctggctgtctgcttgcttctacactggcccctgcagatggagggggtggggtacaggggttcctataagaagcagacacttggggtttttcccaggtcctgttgcaggagggtgcgtgggctggtttccctgaaggcgcctgggcgtgttggtgttaactgatctgagatcttctgtggccctgatgtctatgagcatgccccagcttgcagggggctgagtagccgggcaccaccaggaggctgcgtgccctgtgcttgggtgtacccatgccctgtcagcatcgttggtctgttagggtcagggacttcggcttcttgtttagtaccctccatcccttccagttgatcatcagaaacattctccttagatgcggctgcctgaccccggtgagggggcctgcctcccacttgccttccagcctcctctaagctgcactgagtcttaaaaataggaaggatagggctgggtgtggtggctcacgcctgtaatcccagcagtttgggagaccgaggcgggtagatcacttgaggccaggagttcaagaccagcctggccaacatggtaaaaccccatctctactaaaaagacaaaaattagatgggcatgttggcatacacccgtagtcccagctactcaggaggctgaggcatgagaatcgcttgaacccaggaggtagagattgcagtgagctgagattgcgccacagcactccagcctgggtgacagagcgagactccttctcaaaaaaaaaaaaaggaaaaaaaagaataggaaggatagggcatggcatgttctccaggagacagagggacgggggcatcttgcttgcaggaagccaggcgacacaggcgtgtgtgcagggctcagagggtctgtgttcctggcctttcctgggagggcttgctcttgggctgcccaaagctcaaagagagactcgaggaaatcctgcatttatgggagcttttcttttcctgccactttcctgttctgggttgtatctgtgcacgtgattggaacgtagcagcctgagctcctgcctgaggagagcagccacgggtcacggaagccagggtccagctggggcctttgggtctagctggcagatgaagggctggccttcatcaagaaaacaagccccatgagggcaggagcccgacctgttcattccacaccaccgagcctggtgctcagtcatgtttgtgtgactgagtgagccggcggcgggctgaggcgcttttgtctggtgtgcgtactggtctcccttgaggcagcttgggggtgtggaaaaagcacatgttgccaaaattgacagacctgggttcaaatccaagctctgccacttaccgcctggatggtcttgtgatgggtcattaaccaccccgagcctcagtttcctcacatctgcctcccggggtcactgtaaggatcagaaacaatgtgtgtatcggccatgtacggtgtgtgtcggcgagtgctccgtggcagctgcggttctcctgaggtcagagctgcggccctgcaggtgtgtggagagagccccgacagccaggctgactctgcgcactgtcctttgttctgcttccccagaccttcacggcatggtgcaactcccacctgcggaaggcaggcacacagatcgagaacattgatgaggacttccgagacgggctcaagctcatgctgctcctggaggtcatatcaggtgagactcccagccacgcagtgcggccgagccctggcacaggtgctctgccacagcggtccccagagaccctgcccacccagctgtcccattgctcctggggaggagagggcaccccttaatagctgcacggtggtctgatgggtggggccagagtggcctggtgggccagcagaggaacctgcttttggagaacagaggagactctaaagcctctctccctctcgccctctctccctttctctctctctgtctcgccccctcttttctctttgtgcacttctcaggggagcggttacctaagccggagcgggggaagatgagagtgcacaaaatcaacaatgtgaacaaagcgctggactttattgccagcaaaggcgtcaagctggtctccatcggggcagaaggtgagctggaggtggggcagcgagggtcctgctcggtttctgacctttaggctctgaagcacaacatctgcatcctgaagagaagttttgttggtggcagggcgcttggggcactcagagccccagtacatactcagcagtgatcacaacaactgctcttgatatgatgctgggcccacaagctcccccaaacccttggaaaaatccggtgggcgcagtccaaatctaggaagtgcaacccacccaaccacgggggcgacggcttctgcagggggaggaatggttttgactcggactcaggtcgccctcactggttctccttgtgccaggctcagcagacagtgacaaacatgtgccatggcctctctctgtaccaggaacacctttctcattatgccctgcccggtatcagagaaggactggaggccccatgtcaggcattgggacagggagtgcacggccaaaggtcagtgcctagactttgccctgtgtgcatgggcttggagaattttgcctctgaccaccccaggatcctcctgggccccacgtagataaccaggaccacagtccactacctgcaggccctcactagagcagcaggctctcagcaggggcccctgggttgagctcccaggcgcttttagagacaggcgaggcctgatggagccccagcagcatgagctcgcagtccactcattagtcagagtaagatttcttcaccctgacatccatgttgtcccagcttctagaaaaacaaagtaaactaattgccgttaatgacagggctctgagagtttggccaagactccgggccagaatgtgtgtgctgagttccaaggctctgccccggcccaggacctctgcgatgaggggtgccaagccttgcatgccacagtcgaggtggttggtgtttgtttaaaaaaatcacaacccaaaaattcagtcaggccctgagattttctgtccttgcatgggtctttcctccaggctctgttccagccttctgcttctcacagctgcatttattttgctcaaatgctagtctgtaaatacagaaggggttagaggagagacccatgtcagtcatcagttttcatttggagaaaaacttggtctaaaaatgttctctgttcatgcccaaattggttcactcccaatccctgtgactgtggggccttggaacaaagcctaatggaggcgttcctggggctcaaggcacctgagaaccccgccccaccctgtccccctgtccttccacatgattgggcattcgcgggagcattggcttcccgtgggggtgatgagaggggccggaggcacagctgcaggtcagagaagcagctggtggatgtgtcatgagaaacgccatcctcctctcctcaccggaactccataagccctccgttaccagctgcacctgtacttgctgagccggggagctgcggccttgcccagctctgcaggcccggccctcaggaggtgcacagaatagatttcctgaggctcgagctgcctcgctgcactaaggggcaggtggtgctgctcagtttctgggtctggggctctgaaccctaggacagggtggacactgggtccctcccctgtctctgggcagcagaatgagcatatttcctcctctcaaaacccgaaagctgtggctcatggacacccccttcctctgggtgtgtccccgggggaaggtgagccccatcttctctgtgacctctccacctgcttccaagcaagcctgccctggagtattctgctcagaggtcagtgagcagggtctcctgtggtgtcctgggcctccagctctgcagttagctttggaactcacccctgtgcccagcccttccccgagagtgcttgcagcagtggcgcccctctgtcttctttggaagccactccatcatgccccttgcatatggcgtgttgacaagttgggaggactgccctaggcacggctggctgatggactctgggatgaggcactgccttctctcacccagccgcagacacacagctgtcctgggccttgcagagatgatttttctcttaagttactgaggctgaagaaggtgtggtccaagcccttcttttgagaagtttcagcaatttttttttttttttttttgagatggaatctcactcttgtcacctaggctggagtgcaatggtgcaatctcagctcactgcaacctctgcctcccgggctcaagcaattctcctgcctcagcctccagagtagctgggattacaagcacccgccaccacgccaggctaattttgtgtttttagtagagacggggcttcaccatcttggccgggctggtctcgaactcctgacctcaggcgatccacacctgcctcagcctcccaaattgctgggactaaacaggcgtgagccaccacagccggccgcaaatgtttgtttttaggttagttcagaaagcgtgcagtctggcctcaggcccgtgctctccccttcctgacaacacagcagccatgcttgttcctcactggccttccaggcactggatccagtggtggtcagagcagccccgccctcacgagggcaggcagacagtgaacaagtaaacagcccgaccaacatgtgatttcactagtgatgccttggggcagcacaggggccagggagaggaactgggtggcgggttggggagctccttgggacgggcagtcagggaagccaccacgagaggtgacacaagcagaagcttacacgatgagaaggaccagccagttgagggtcgcaggctaggggcgtgctttgtgagtggacagagcgtatcaaagcaagaaagagcctggcttgcccagaggatgcagctagagaattccagcaggatggcagggcctgggccttcagggcaagccctttccctgtgggccaggcatggtggctcacacctgcaatcccagcactttgggaggccaaggcaggaagatcacttgagcaggagtttgagaccagcttgggtaacataataagacccagcctctacaaaaagtttaaaaactagcaagatgttgtggcatgcgtctgtggtcccagctactcgggagactgaggcagaaggattgcttgagcccaggcagtcaaggctgcagtgagctatgactacaccattgcactccagccagccagaccctgtctcaaaagaaggaaaccaaccatgctcgctgctgtgtcgatgtggattatgggcgggaagggtacataggaggcagccgcattgagctctggagatgacagtggcttggtggagagtgtcggcagtaggattggaaggaagtggacagattcacaataaacaataatgtagtgcacatttgctgactgcgagatgaaaaagaccacctttgccctgagagtgggggcccggggtgcccccctgtagtcaggaggtacgcagattacggcagaaatgtacagagcactgagagttgagagaggtgtgaacagaggccacacgcctgggaccagcctcttggaggagcggttttttgagttgggtcaggagaaggagctggctgcggggccagggacccttgtggccagaagcctgcaggcgctcagcagcaggaggctctgggacagtgctgcctagagactgttccctgcattttctcctgagggaggtggaggaggacaggcctgggagatgcaaccagggggtggtttggagcctttctctagatggggctggaaggccaccttcaggttgggcggaggagcctcactctggttttaacgaccttctgccctctgcccccttccctgtgtgcagagattgtggacggcaacgcaaagatgaccctgggaatgatctggaccatcatccttaggttcgccatccaggacatctccgtggaaggtgacagccacctgtactgcccccgcttcccacctgagtcagggcgggttagaggagagctgaagtgtgatcttcatgcttcaagcctcttcctgtttccttggggtcactcacagggcctggcccttgcaggggtagtcagtgggtggcaggtgaagggaggctcctcccagctgcctgcctcttggctccagtgccttccgagtgcctttgctctcacagcctcatctcagtggaccctcacgccaccctcatgagatgggctaggatggctgggcccgttttacagtccaggaacccaagtcccagaacagactagtgagagagttgggcctgggcctggttctctgtctgcttgacatccccatccttgaaacttggcccccatggacccgttatgagctcaggccgtccaggaatggacaatttcgcttccctgcaagcacctgtgtgcacacaggatgggcagagccacctgggctagcgtgcaggggctcccaggtgccaggtcgcagtgatgactgggagagatgtgcttcctgccctcgaagggctcccggtctgtgaggacagccgagctatccacggggaacagaagggccccctaggcctctctacagctggtatttcaccttgttcaaaagaggccaaggccggtatcaagggcctgtctgcagtgtgttctggtggtgaaaggcacaggcttggtggccaggcacatggcacagattcaggccctgacaccaccacctcctggggcagccctggtcaagcgactctcctcggggccgtgaggattaagcagggccgtgtgtcctggcagttgggcctggcagcatccgtctgcatccggaatgggagtggctgtcccgctgctatcactgctgctgttgttaggacagatatcctctccccttgggtttcgtttgaccccaggcctgagccgaaagtcccatccaacttgggctgagttctgagggtttatttttgagccagtgctcactgtctttgtgtgttttgcagagacctcggccaaggaagggctccttctctggtgccagagaaagacagccccgtataagaacgtcaatgtgcagaacttccacatcaggtaagcgccagtcctggtcatcctctcctttcctctaggaacctgagatccttcctcccacctgccctgtttgctgtgtttttgtcgtggtctgtgagatgccagccctcagtcagcccctccctggccacgggccctacaagcccatgggaaggtcacctggtcctctctgaggaagaggaggcagtttcccagccatcctggctgaaggcagtaaggtcagccctctcgccggcctaatagaacgttcttcgtccccaggcaaggtgactctcagaagcaacaataaagcttttcatttttgagacagggtcttgtgctgtcacccagactggagggcagtggtgtgatcactcatccctgctgccttggcctaggctcaagtgatcctcctgtctcagcctcccaagtagctgggactgcaggtgcatgcagccacacctggctaatttttaatttttatttttagtaggaacagggtctccctatgttgcccaggctggacttgaactcctgagctcaagcagtcctcctaccccggcctcccaaagtgctgggactacagatgtgagccactgcctgcctctggcctcttcctttattttgacagctcaggagtgaattgtttttagaattgctagtaaatttagtgttggggaaaaatgtactctgtggctgctaagatgaacaagcctcagctccaccatgaacctgcttccctcagggtgagcgggagatgagacatgtccaccatccccgtagctgaggcgagcatgggcactgccgcatgaggtccagggggcggcaagaggcaggcctgcctggtggttgggagcactggctctgggggcggtcctgaggtcagatccggtttgccttgtggctccaccctctgagtctcctggatggcccgcacaggaatgaagagcagggcctcatggggtttgcagcggcctcaggctctctgggacccttgctgggtacagagggcttttcccatcgtgctcaccctgatagcatgtggtccctcccttggtcactcttctctgtgtgtcttcttttttttcctgccactaactgactgaatctttctatagtttccattcattttcttcaactagtaagtatctagcatgcccgctgcatgccgttagtggagatacagtggcacccaaacaaagttcccatttgtgggaagtttacaccacagcgcggggaccagctgttagcacagcggccagtaatcctgcagcataacttcagtgagaagtgctgcacaaagacagggaagtcagatgaagaaagttccctgggtggcctttctgaggaggtgacatcgagcttgacctcagagggaaccaacccttagagggtctcagggaggagaatgtgacccatatagcttgtaactgaccaacttgtggccttggggaaggtctctttcctccagagaccagcatgccaagtgaaatcctggcatttagccagcccacggactggccttcctgtaagtcaggtccgccagggtgtggaggccacacagcacaaacaccagcatcctgcagtggccacctcccccgaagcggcctgtctggttcagggcggcctcccatggaaggtgctagcagttataaagcagttgtcaggagtcaggcactgatccaagcatttactcatttaatccgcacaacagccctatgtagcaggtatgtcactatccccatcatacagatgtggaaaccgagatagcctggcttacccgaggtcacactgtcagtaggcagaagagtcaggatttgatcacagactgcctggccccagaggtcatgcttgcagcctctctgccacactgtctccatgcagtgcctggcacaggccagactgcagtgaatgggaattagtcactgctgtgggtgcacagggccatacggcactctcatgacagtgagcgggccctcctataacctttgcctttccttccccagctggaaggatggtcttgccttcaatgccctgatccaccggcacagaccagagctgattgagtatgacaagctgaggaaggtgagtgtctccagctccccttgatggcccacagacgtgccctgtctgaccccctaactccgggtcaccatccccatgcccttccatcgccagcctccagatctgggttctgcacgcagatgggcagcctgggagagccttgtgcaggctctccgcaacccctggctcggtggctgactctcacctcccttattcccctcgtggactgtccagtctccctccatggcactgcaaccaacccggggttatttaagggcctggccagccatgctttataactccccttcctcaatcttctggattctagaacctcctctgcccaaaggggcagagggcaaggaattccaaaccatcaccacaagcccatgttgcccatgcagggtcctgctgtcatttgcctgtacaaagcctgtatggatccaggccctggccaccagaagctgccagcctcgtgggggaaggcaggacaaaaattgtgtccaaagcaaagcaccacaccaggccgtgtacatgtgctcaggctgaatggggtggcagggcatggggtcagatcagtgctgcggaggaggctagtgtaccccgagcgagcaggagccaggaaaggtcccggaagaagaggcagcttagagccagaggagggcttcctgggggaggcaccagatggcacccagcccgttccagccacagtgagcaagagagctgggccccggccagggagagttggagtgcagtgggctttagtcctgtaagcagtggggagcctgtgagggggctgggggacactttagggtggttgggacctgggacctctcggtttgctccccttacccagtccccagtgctctctcaggcctggcccacatcttccagtcaatgtgaaaaccaggttttagggcaaggggcttaagctagggtctgtgggtggctggaaattgtatgaaaagagtacacctgcatttttctggagaaaaagccctggtttgccccacaaagatttcacgaggcactcctgtgagtgggaattgaatttatccaggcggtgccctcccgctcacacatcacacgtggctgagaactgcctgaagaaacccccaaccctcgccctcccgggtctctccctctgggccagccctgcctccctcctgctcctgcaccctgccctgacggagttcttgttgtccccacttgcctccttctaggacgaccctgtcaccaacctgaacaatgc

SEQ ID NO: 15370 - DNA, 74230 bp, Homo sapiens
gaagcagctgaagcggcggtagcggcggcggctcgggcagaggggcgggagctgaggcgggagcggacaggctggtgggcgagcgagaggcggcggaatggtggactaccacgcggcgaaccagtcgtaccagtacggccccagcagcgcgggcaatggcgctggcggcgggggcagcatgggcgactacatggcccaggaggacgactgggaccgggacctgctgctggacccggcctgggagaagcagcagcgcaaggtgcgcggcccgcgggccggacgggctggaggggcttttctgagggggcccggggaggggtgggaggtcctgaaaggtaactggagcgtctgtgatgggaacgggggggtcccgagaaggaattggcgggtccgggaagggaattggagtcctgaggaggaatcgccgagctagaggaaggaattgggaatctgaaaagagaattggcggctgggtggggaatatgggagtcaaataaaaggaatcgggaaggctgatgaaggatttggagggtctgggcgtgccattaggggaaaccgaggagatgactgggcaggctgaaatggaactgggatccgaggcgggcttgaagggtcggagcatgggttgggggtgctgggaggagaatcaggggaggctgagaagggaatttctgggtctgggaagtgtgaggaggagcttgagtgtggaggggttggttatttggagagcagaaagatctgaaggagattggaattgggggagcctcaggttgggggagttataaaggggatgaagaatcaagtgtgaggatggagtggagattgtggggtctgaagacgggtgggaagactagggaggctgggaagatgaaaacaggggctaagggtagaattgagcatgaaaagacatgggcttagggtgtgaggagggtagaggtgccaggactgggggtctgaggagggtggggtgcggaaggaagaagttaaggggcccgtgaatcagacgtttttgaagggggtgagatttatttgtggtgccctgttccaaaggggagaagattaagagataggaggaataataagaggaattgatgagggatggagaagccgaagtagaggggatacggagagtggggataatttggggagggatttctaaagaattgatgggaagctgaaaagctaaagcgttggagagaatgaggaagtgtagagggagaaggtgagatcggtgggagggagggtgagctggaatggtggataatgggagagaggttcgtttaggaaaatgaaagtctcattagaaagggaatgcgtaatggatagactgagaaaggaatttgaggagggggtgctggctcctggaggtgcagtcccgggactggagagcgtgtgtgtgtcgtgcaggcagaatgagtttggggaggaagcgttgagagtgtccaggaagaattgtgtcttttttggagagaccggaggtaggtgaagggatcctgaagcagagactgtgttcaggtggcactgtttttttggggggcggggggggcaacttggtagggccccacagcagtgaaaaggtgatcagaagtggagtgggatccccgagcgaggtgtcagtgtctgtgggggggggataaatccagtgtggttgaggggggagctctgagtgtgtgcaggaagagctaaagaaaggagcgtggtgagtgggtgtgtgtggggggaaggggttgttcagaagttttgtgcgtgaaatgggtgggaggtacttgaagttggaagcatttcgtgggatctggagatctggattttctttccagatttgttactgattcgctctgtggccttggacaagacccttgaactctccgggcagttttgttatctgcaaaatgcaaagggatccgagggttccctgcggtgattctgttaataaagagggatgtgtgtagagttgggactttggacagggctctgaaggtttgggagagtgagtttggtggagatttttcaggaacaggctacagggctttgagtggtgacctggcagagtggggagtgactggaagcctctcgagggcgcgagttggtggccaggagcttggcacaggcagcctagcccaggctggaggggaaagggtgggaagggtggaaggagcagctgttccaaggcagcctgaggtggggccgggcataaccttgggtccattaccagcgttgcttgaatttcctcatccgtagtaactgaggggcatggcagtggcttggtgggaggggtgtccttatccgtggccccacctactgcaggatggacaggttgcgatagttggcataaattcactttttgaggggaaggtgagatctgttctggagtctcaacaataatttattgcctgaggcagtgccaggttggaaaaggttgccaagagacctggaaagttgggagggagcaggggccacagtggtggttttgagaatgtctaggctttgtcttctgcagctgaaggtgctggagaaaataaacccctcccccttttttctcaggtgataagggtggggggaccttccttttctctcccttcctgtcttctgccactcctcaagtgactccttttgcgagccgggtttcactccctcccgagagttagggtgtgggctttgttcgtggttatagtgtcccttgcctacagggtgaggctggggcaccattcaggccctgggtggaaaccaggactccccagaacctccaggccttgctgccatgtgtcattctcttacctcccagctcccttcctctggggccgggcaggtttgagggaaaagggtggctcacagagtccgctaataccatctgctttcgtgtctcagccagagccagattctagtacctcctgctttacacctcctccagcaaatatttacccttagctgctctgtgggggaaactactgcttcacctctgtgccctttcctgttatggggtagggattctttttgaaatgggggaaggagtaatggaaaggaatacaccaatctgtgtggctctctaccttcctactaagaaacatccctgcactcccaggctggctgggttgtttgtttgtttgtttgtttgtttttggagacggagttttgctcttgttgcccgggcgtgatcttggctcaccgcaacctccgtctcccgggttcaagcgattctcctgcctcagcctcccgagtagctgggaatacgggcatgcgccaccacgcctggctttttgtatttttagtagagacggggtttctccatgttggtcgggctggtctcaaactcccgaccccaggagatccgcccgcctcggtctcccaaagtgctgggattacaggagtgagccactgcacccagactggctgggttttttctacattgcagtgttgctttagtgaatgacagattgcccttcttgcctctccaaggctgagccactgggcacgggaagaatgacagtcctgggggttctgtacatgcatactccaaaaaaatatgcatccagaacagctgtaggccctcaaagtgggtagaattgaattcttctaggaattaagcaagagttggcccaaatcagaggggacgtgtgtctcacttctgcttggaagccctttgctctgacttctagggacccctgtaacccgtaagtaggttatgcaacggtttttacatgagagggccatgagtgttctcctggcgggatggagaagcattgttctggtctttgagcaaattcttgagcaattacagttctgggccacagttccctctcccaatttctaaaagtggcctgggtaacctcatcaccctctgttgtcctggaagggtgagatctcttgaaggttatgccaaatctcattacagcaagaagaaatgactcacttgctaagttttcgtgttcattgaaacatcactatttcaggggcctcaatgtttcaaccctgaccgttggctttttttttggagacggagttttgctcttgttgcccatgtggctgtattaggtatgagttaactatttgaaagtttttgtttgttttttgtatttgttttttttgttttgttttgttttgttttttttgagacagagcctcactctgtcaccaggctggagtgcagtggtgtgatcttggctcaccacaacctcttccaggttcaaggaattctcctgcctcagcctcctgagtagctgggactacaggcgtgtgctaccgtgcctggctaatttttgtgtttttagtagagacagagagtttcaccatgttggccaggctggtctgaaactcctgaccccaagtgatccgcctgcctcggcctcccaaagtgctgggattacaggcgtgagccactgtgccctgccttgtttttcttgaagtagatctttttttctttttaaaggctgataatggaggccccaaagtagccatctgttactttgttccattactctaattgcttgcctcttaggatctggctaggactaacagttttcaaaattgagtaacacacttgacaaaaaaaaaggaaccaaactcaaactcaactgttatctagaaaaaagactgtgtaaatatgtgtgagaggcaagtatactctgtttgccctcttgtaagagggataggggaggccactcagctgctagcactctgttctctcccctcatcctctccagaatgtattttagaacttgactcttctaatgactgaagaaaaggtggggtatgggaagatggcctgggactgcagggtcacttacactcacctggctaagagttgagatctggctggtgccctggagtggcacctgccactcacctaatcctaaacaatccagggtgtgggcccaggattgccctctgccttttgaaacaccctccctggttccggcttctaagaccaacagggaggctactttggtggcagggagctgactcaccctccagttggaactggtgctaaaagcctccatttaacggcagccgactgcttggccccaagtgggctgccttgtgggggggaaagttcagtggaaagtgttggaggaagcagggtggtgtgtgaatatccaagtagtgctggtgctattaagctctgacacagtcagggaggtcagttaaaatgtggtcttatggccgggcgcagtggctcgcgcctgtaatcccagcactttgggaggctgaggtgggcagatcacctgaggtcaggagttcgagaccagcctggccaacatggtgaaaccccgtctctaccaataatacaaaaattaactgggcatggtggcaggtgcctgtaatcccagctacttgggaggctgaggcaggagaatcgcttgaacctgagaggtggaggttgcagtgagccaagatcgcgctactgcactccagcctgagtgacagaacaagactccatctcaaaaaaaaaaaaaaaaatcagatgacagaggggagcggggacaagttttaagtctaagcctcctgggtggggagttctgctgtttcaacatatgctccagtcatggcagactttggccagacagcgccctttttcagagtgaactgagtgtagcacaagttatctgccagtgctagttagcaaacagaatggagccaaaaaagaattgatttgggaaggcccaaggaatttgaaaccgttgagatgaacactttccgtttttgctacactgatttatgttgtgctgggaattgtacaagcctttgaccagaccttagggttgttctttaaaaaaaaaaaaaaaagattcccttgctgctgcttttacttttttgaagggcagaagggaagggcaaatataattagtgaacagctgtttgctctagtatcacttgctcgttcaggttttctgaatagctgaaatatcaacatgtttatctcttcccttgccttagtatatcctagagcagtgttttccccggctttatctttattccttcatttaatgaactccgtgttttcatcactcacattttgttcccttccctcagtttccttcctttgccttcatttatgtatttagtttacagaataacaaaagcactcgtgttacttttaaacaaggtaaaacttaaacagttttttcctccgtttctttttttatggaaataagaggcaagtgatagcaagtgggtaattcaatggcagtggtaactgaagcactgacctgttacaagagagacggaagcttctacttgagcagatacaaatactgtcatccgtggagatttgaaagaagtctttctatcactgggtagtttgagagctcattagtcttctttagaatgggtttaaacttggaaacatcaaagcaagttacaaggaaacttagttttacagtgttggcagcctaggcgccagaatttgttataaagtgtctgaaagtggcccaggtatcacttaacttttcttcaagaaggtctatgagttacattttactcggtatcccaggcatcaaggagtgtaactttcaatgaatcaaagagaaacagaatcattttaaattccagcctctgtttaaagaaggatcttatgaaggggagaaattaaccacctgacccagggaaggatcccgcctcctccagaaagtgaaatcgccgggtgtggtggctcacgcctgtaatcccagcactttgggaggtcgaggtaggtggatcacgtgaggtcaggacttcaagaccagcctggcgaacatggtgaaaccccatctctactaaaatgcaaaaaattagccgggcacggtggtgcacccctgtaatcccagctactggggaggctgaggcaggataatcactcaaacctggaaggtggaggttgcagtcagctgagatcacgccactgcactccagcctggacgacagagtaaggctccgtctcaaaaaaaaaaaaaaaagaaaaagaaaaggagttaaatctttgcatatatttaactggcaagagcatccttacatcagtgcatgggaagttttatccaagtagcagtttccctgggattataaaaatccccgaggcatttgtcttggtgttgtgcctttttttggttgtgttttttcacgtccctcccctcccctttctccataaacaagagaggcattaacttggaatgtccgtggaaagtcttagaagctgattggtgtaatttgcctgccttccctttagtttgaacagcgtttactctggaagaggtcagtggcctttttcttggttgtgatttatgcaagtgttatctgaaggcgagtggagtgagtttacgtgggatttgctgtttgccacctgttgttgtgctggctccttccttcctgggatgagttccattctctccccctcccccaggagtgaggctccccagccagagcagtccccctgtgcttatccccttccttcgtaaactgcagccatttgtgattttccataaccacttttatagacacataataatttcctttgaatcagtttgcattttaaattaagttttgaaaggaaaactgacaagagtatggcaactggaaaacccagctcccctggccataaatataatagaaggaaactgcaaaaataaacacattgaaaacaaaacagtgttgtttccaggtggttaccactcgggctgaaggccccccaggcttgaggcctgctccctttgttagaaagggattggcaagtgttggtgaggtgttaaagacccaccagcaccaagcagagactttctctttgaagtcatcaggtttacaagagaatcaaaggaaataactttctcaatgtgattcagggtgtaatgtaaggtgtagataacccttaaaattttccatgtgtgtatgtcacacttgggaaaaaaacttgatctcatctggtcgaggtgggcagggcagcaccttgtccaggagcacacagcccctcttggctctgtgtgtcatccggccatactagactcgaacatatggctcatgactggatgatgcttgattcatcttcagtttcaagtgttagtgcttttgaggttttgtaagaaaccaggacacattgaaaatacagtcatttctcagtatctgtgggggattggttccaggaacccccttatataccaaaatccacagatgctcaagttccttatgtaagataaaacgatgtgtaatttgcattttaactatgcacatcctcctgaatactttaaatcatctctagattacttataacctaatgctaaatgctacgtaaatggttgttacactgtgctgtttaggaaataatgacaaaaatatgtacatgttcagtgcagatgcaaccattcattttttttcttccagtattttcgatccattgttggttgaattcacagatagagaacccatggatacagagggctagctgtaagaaatgtgggtttatcatttgttcctcacacaacttttttctttcttcgtttttcttgcctttgttccttttttttgagacagggtgtcactctttttaccaaggctggagtgcagtggaacaatcttggctcactgaagctttgacctcgggctcaagccatccccccacctcagcttcccaagtagctgggactagaggtgcacaccaccacgcctgactgatttttgtgtttttgtagagatggggttttgctgtgttgcccagtctggtctcagcctcccaaagtcttgggattacaggtgtgagtcaccacgcccagccaactttttctcttaaggctccagttttcttcttagagttgggcccctcccacgaagaaagcacactgccaccccttcatcggatttgaaccctacattttgaaaggaaagcagtgccctcctgctgagttaacaaggcttatttaaatgtttttcttccaaatatcagagcagaacagattctttgtcttccagtggaactatccacatggggcagaagtagttggaagcggcagttactaccctgcagaacacaatgaagtcatcttgggaaatatcgtggatggtgttgcaatgattgaatgggatgctagaacaccagcaatacaatagcatttgtgtcttcagcttcaggcaggaataaagaagactttgtggtttgttttatgttttttaaagtttcccccccaaaggtgtggggctgagtgatgtctgtcactagctttctagtgggtttttcttttcatcttttcccctccctgatgtcttttgagagtgggtggaagccacagtctaggtggatcagaggaagcacagaaggcaggcagtataccccactttgtgttttccatgtctgaagggaacacatttggtttttgttctgttttgattttttagagacagggtttcactgtcacccaggctggagtgcagtggcctaatcataactcactgcagccttgaactcttgggctcaagggatctttcagcctcagcctccctagtagctgggattatgtgtgcaccaccatggccagctaattttaattttttttttttttgagatggagtctcactctgtcacccaggctggagtgcagtagcacgatctcagctcactgcaacctctgcctccccggttcaagtgattctcctgcctcagcttcccaagtagctgggattacaggcgcgcgccacgacgcccagctaatttttgtatttttagtagagacagggtttcaccatgttggccaggctggtcttgagctcctgaccttaagcgatccacccaccttggcccaacaaagtgctggggttacaggcatgagccactgtgcccgaactaatttttaaattttttgtaaagactgggtctcactatgttgcccaggcttttaatctgcaaaaagcccaagataaagagttttaatatcttacctcctgagtagtaatgactgattccagttctaataatgtcttaattacagctatacagattgaggggactgcaggaagtgaaatagatgcatttcttttttctttctttcttttccttttttaaatacacacttcgtttcggtggtgaaggccagtttgaggttaggagaggcatcttggaaggaagctcgcaggtggttcggcatctggacatgctgggaagttgcctgagggggacgtcacaataagaggactgtgggtctacagcctgccttagcaaaatgacaggccttcttttaccaaggccaagggcagtggtggaagctgacttcagttggtgtcatcaaggcctcagtatgtgtaacggttaacaaattactattctatgatcaatctccatctgggtgtgagtaaaaggtatttagttgctatcaccatggaaaccaagttgcttacttactgttttggggagtgccctcataccagaggcagtgctaatggtggagtgttaggccccgggcagaaaaaaagatcctgccacttggtatcacaggaaaatacctacaggcacagcagccttgccaggtaggggatgaaggccctctgtcctcggggcaggagttgggccagttgattgtgttgatgaggagtgtgcatttgtgcatgagagagggagaagaaaaaggagagcactccatgaaatccgctgctggctttgtagcctagaagagtgctttttttctctaggagtttggaactggaatctcagctatgtgacttcttaataataggacaaaatatgcctgtatcttttgcctacttccacaaacactgataaattaaaaagaactctaaatttcccacaaatcccaagcacaagtaactttttttttaaatccacatcctccctaatccaaatctaacagcaaatccttttctctctgtcactccctgcttttctttaagaaaatgagtaccttgccttaaactatatattggatgaaaatattaaacactttcacaaagtgcttctttggctgttactggtatgccttgcatttggaagggtcagagatttgaagacttctgtgatcttccagttctggcctatgaaatacagtcagtttcaaaattcaaaatgtctggaagagccaacttgccaggccggttcaagggcagtcagatgaatcgacccttcttacaggctgtctacgaaccagtcatgattcagatattcaagtcctggaaggtatccagacggtaaacatcaccaggattgtgaggcagttacttttttttttggatcgtttgagctacactgccaagactgtggtaggacttgtctgtgtaaaacagaaagggctgtctctaaatgtctttttcaagaatgtcggctataatcacccgacactgtgtctcatggtggggtgagatgaaatacctagaccggttaggggagggccttcttggccattttttgaactaattttccctttccctttgtaacttttttttcttcttttcttttctttttttttttttgagacggagtcttactctgtcacccaggctggagtgtagtggtgcaatctcggctcattgcaacctccgcatcctgggttcaagtgattctcctgccttaggctcccgagtagctgggactacaggcatgcattccacgcccagctagttttggtattttttaggagagacggagtttcaccatgttggccaggctggtcttgaacccttgacctcgtaatgcccacctaggcctcccaaagtgctgggattacaggtatgagccaccgcgcccagcccctttgtaactttcattaacactgatgaggcacaagccataggatagaattgaatccattgagagctgtgagccaattgagggatgattggttaatagattgtggcttgaagctgtggaaggtaaggggtgacacttgactcctattagccttgtagaaacacctcagagattcacaggaagcaaactttgaccataaaaatataagactcacagcgcaccgagttctcttagcagctaccttagagttgagaaagttttgggcctctttaataaacaagcacaaagcagttcttgccaaatacggcctgctctggggccacagggttagcttaggagacaactttcttgcctaaaaataaatgcatgttcctatcagacattccaagcatagtttaaacatgagacttctgagcagcagctcaagctctgtgggttcaattatgtcagagtatgggcagtgagggtctttggggagtgtgcccccttatttgggattggttgtggctaccaaggaaatcagatgatcaaatgcaaaacttcctccatcttatttctatatgatcttttttttttttttttgagttggagtcttgctctgttgcccaggctggagtgcagtggcaggatctcagctcactgcagcctctgtctcccagattcaagctattattctcctgcctcagccttccaaatagctgggactacaggcgtggccatcatgtccggctaatttttgtatttttagtagagacagggttttgccatgttggccaggctggtctccaactcctgacctcaggtcatccacccgctttggcctcccagagtgctgggattacaggcatgggccaccgcccccagccttatttctacacgttcttgatctatcacaggctggtgggggagacagcatgcatatagataatgaacaaggtaacttcagataggattatgtgcaataaattaaataacagctagcattttaccttgtgctagacactattctaagtgcttcccatggactgactggtttttgtttttttttctttcctttgagactgagtttcgctcttgttgcccaggctggagtgcaatggcgtgttcttggctcactgcaacctccgtctcctgggttcaagcaattctcctgcctcagcctcccgagtagctgggattacaggcacgtgccaccatgcctggctaatttttgtatttttagtagagacggggtttctccttgttggtcaggctggccttgaactcccaacctcaggtgacccacccgcctcagccaccccaagtgctgggattacaggcgcgagccaccatgcccgacccatggactcacttgtataatcttgtgaagcaggtgttgttacccttacatgcagaaatggatccatgggcctttaagccacttgcccctgtgacagtgccaggatttgaatgtagaagttgaggctttcaagtttatgctgttatttctacactacactgaagtctagtgattgggaatggctttgcgagcgggtggtgaggggaggagtgtgcagtgcaggtacttcagatggagaggaaggtctcaaagaggtggcatttcagctgttccttaacggatgagaaagagagaaccaagagagcaccagaggaacgcgcttccaacagagaaaaccaagcaagggggcccccgaggagcagaaaggcccgagtggtcagagcggagcccgtggaagagatgggcacagccagattgcttagagctgtgttgttagaagtgctgatgagtctacattcaacttgcgcctgcaaactcagtccctcttagatgccagtaggtcaggaacctcatgcttccaggactctggcgctcctaccctttcctcccaggcctcctggacaggccaaaccagaactgacttctaaagtgggaaccccaagacggcagaacatgaatcagccaaacaaaagctgcagttatctctgtgatgatttcggcagtcggcacgtgtatttgattaaagcgttggtaactttgaatctggagttttatggcactgtgtactactcataatggctttgtagtgtggctctcttagggagcttaacttttacaacatgaacaagttccagcctcctttggtcccatcaagaggccatttctacctggtgggatgccacttgctttacaaagcatcttttgtaaaatgttgagtctccttctttgaagttggaagccaggaagcctgattttttttccaataagtattgtagaagatggcagcctgatttatttttatttatttatttattttgagacggagtctcactctgttgcccaggctggagtgcagtggcacaatctcggctcactgcaagctccacctcccaggttcacgccattctcctgcctcagcctcccgagtagctgggactacaggcgcccgccaccatgcccggctaattttttgtattttttgtagagacggggtttcaccgtgttaaccaggatggtcttgatctcctgacctcgttatccgcccgcctcggcttcccaaagtgctgggattacaggcgtgagccaccgcgcccggcctggcagcctgatttttaaactggcttttctcctaggtcctttccttctctataaatccctctttcacttagtatttcctccttgtttcctttggtcagttggagtgagggtggttctagttcagagaaagagacaggcatacaggctgattcagtctgaggtgcttagctttctgtacctcactggaaaccagtccaggaatatgacaggtttcagtaggtttcattggacccacaactccccatttgaaggcagagcttgtcaaacgagttatgtggcttttactcaaggagggaggaacagcaacagggagctctgggctattgatagacactcctgcctctgaacacacagcacccagcaagaagttaccttcatgggttgtctagagtgaacatgggctgggattctctcagccttagcactgatgatttgacaacaaaaatcgccccgtgggtagagtataacggagcaaatgattatggtggcctgtgatggtgcagccagcccagctgcttcagctggaaagaagatggcgaggtttccattctcctggcagcatagccatgtgaacttgttaaatcttttaagtagctgtataggaggggagataagtgtgtgtgtgtttattcttatccccttaaatacaaaaacaaaacttccactttataaaatcaattcagagtgggaagaggtgcatggcacatggaaaatgtgtcggattaggttgagtcctaccccacgtttgggacacagctgtaagtttccatggtgggtggcttattatgcatttatgctgagctgaacctgctccaagctgctgcagataggaaagtctgtcttggagggggagctgcctctttctatcacactataaagacataaaaggtcctttgaaagactccagcagtcaccacttgggtaacagaattaggggctgctgagcaaagtgggtctgtttttttttttttttaaagacagagtttccctcttgttgttcaggagtggagtgcaatgtcacaatcttggctcactgcaacttccgcctcctgggttcaagtgattcttctgcttcagcctcccaagtagctgggattacaggtgccggccaccacgcctagctagttttttgtatttttagtagagacggggtttcatcatgttggccgggctggttgtgaactgctgacctcaggtgatccacccgcctcagcctcccaaagtgctgggattacgggtgtgagccactgcgcccggccacattttatagccaaccggcttcttgtgtaacatgagttggggcttcttgggccccagagtccagcactcaggtagaaatatgaccgccatggccagacagcagccctcgctgggcccctcttcagagcagagctctgtgccgagcctttaggggtatgagagaaaccggagacctggtccgtgctctcaaagagctcgcggtgtagctggggagagagcaaggccacatgagacctcagaaggacactaaacggcacaccgacaagctcacagcactctagctgtgtcccgggagaggaaaggggtgaatcagggcaggtggggtcagtcatggaaactttcataaaggaggtgagtgtgcaggaggggcgggcctttgcccccgctgcgggcaggttgccgagggcaagtattagggggtccggcgtgcaatcgaacatttcttagctgcctctttggagtagcgctaccagttcctgtccccatgagcatcgtcttcggggagctgctggtttgaaggatgaggtaccatgctcatcttggccatgtcttagaacctgtgatagccagacctgtcgttctgggtccgtatccattcatgcgtcctgtcactgtcacagatatcgtgagtgggccagactcttctccccaggtgggagggggtgccttctgaggcatatgttttcagcctgctgatggcctcttcagaattagcacaggtttcgacaaaaagaatggagagactcccttctcatgtccaagggtctccccaagccctgtgtctcagcccctcagggcgtgtggtgctgcacactgccgcccagatgaccacgcgcagccggaacggccgccctgtattgagaagtgggatcggctcccagtctgctggcgaggctgggttgccacagctcctctgttgccctgcaacgcgggtggcctaggagtgtgctgccttcagtttattcctgcctgccaagctacgcttccaggtgctattcttttctttaaataactgccttagtgctgcttgtggaacttagcgttcccatcccaggaaatactccagtgttgtgtttttttttttaaactcattcagatgctcatggccaaatgtgtgacttaaataccgcagtgtccttgatattgccttccccacaccgacaaaccgagttgcattctggtcccactgtgggataaggttagggtagcggcgcttgcctctttgtgtggtttcagatgtgtttctccccacttcagataacacatgacagctgtaatatagctcagttcgtgcaagtaaggtaggggcagaaatcatccaggagaactccagcctccatcctaaaggattagactgcctagcatcagtaggtttaccatagaaggattcagtggagatagcgagggtggtgagtgttgctggattgagcccgtccctgcagcctgggcacgggagcactgcagtgccatgaaggagagggctgggggatattagcacagccggttcctatttccttttccacctggttaagacttccggggaggccctgcccagcagtccttatgagatgctgccttcctcttttttgaaaggcatagatgataaggaggtggacatgttttgagaagagaacctagagctcattacttgtatttgaggcatgtattgcttcactcccactttgggagagttttttctggggaagttaaaggctattcaggatcagagagtttcctgcatggtcccaggggctgggaggagccacctgctcagctggtggttagctgatagcacccagcctacccaccaagataggaggcagctcagatgtcactgggattcgcagtaccacaggctgtccctgggcccaagcagttagctagctgcaccccgggagggggtgttgagagcactgaagctcctgtgggagagtgcctttgacatcccccactccccactgcccagaactaggaggtagtgaaaggtgtcagtggcaagaaggctgggccagagcatggagggaggccgacctgggctccacacccacctcctccaccaccggctggctgtgcgaccctgggcaggtggcgggggttaagcctcagtgtccttctttgaaaaggggcatcatcctatcctcagtttgaggattagacgtgatagtgcgcaggaagcactctggtgcctggtacattgtaagtgctcaataaatgcagcttcccaaaatgatttcaatggcacatggtcctgcatccaggtgggatctgctacttgagtctccccctcaaaggggcctgctgaaatacgcagctcagtgggaaaccaaaacatacacccctttcctccagtgctccccaggaagcgccaagtcctgagcccagccagcaacttcgaagaagtgccctccaacaagtggcagtgggcacttgagcaagtgacttaacgcagccctctccccagcccctgcatccatctgggcctcattatctgggaggtggcttcttgtttcagagttacaggccctgaacaattttgtgttgggatgtgccataggcagtgccaggaaggttctttcatgagtaatttaacttgttactaagtttgctatcagccggggggctctttccccgggttcccttctttccctgggtccccttccccgcaaagcaaagtccaactcaagttagaaacatcccacagcctggagtcaggctgccctctcttcagttggtgtgtgatgtagaagcaggaagggcttcccactgataaccctaaaaataactgcccagaaatgctgtcagatggggccaagaggtgcacaggagcctgtgcccagctgccgacctggaacgtgggactttctagagggcttggaggagccctgccccttccaggcctcttcccaacagtgcttctcacgcctgctgctccattcccttttcctccttcctcccgcgcccccccctttcctggggtcacttcctgatgccattcttcaacttcgcccctgtcccccccaaaagcaatcaaatccacaacctaataaggcaaaagaatgaggagaatgtccgcctcccagcctctcccctaacagggtgcaggcctgaagcaaatttggaaaatgttacaacggagtgacaaccgatgggggctgggggtggggcggtgcagccttgttcaggagctgcccattgttggcctgaggcaggaccctaagggaaggccacccggtttgcgctttcctgatcaggctgttgacacccttctagcacaagaaaatgtatggaaagtaactgcctgagtcagctgcatctccagttgtgggatccacgtgccaggagaacacgaagtacacacaggtccgcagtgggagcccgctcggagacacctccccgccatcacggctgggactgtgcatatccaaacacttcttgcctctgagatgagcagttttcttccccttgactgtgccagggttcaattagcctgggcattaattaaaacttgtcaacacttagagtggggcccccagaaatctgtcacccctcctagatcattatcccaggctaatcaaccctctctaaggcagtttccattcttgacttagtgggagggaggaacaagcccctcggtgctggggagctctgggggaggtagggactgactgggcccaacccactttgttttggaaggtcaagcttagtaattaacctgaatgcttgggggagggggtgaaggagaaagaactgagtctagggatgtgccaggtctttcaaattgctaattatcagcgagcatgaggtcatccgtaaatatatctaattctttagcttgtaattaaggtgctcattaaaagtgcagggaagtcttgttttcctaaaaggggaaaaaaacaacaacacaaaaagtctttgttttgacctgacacgatggctcagaacagggggaggactcaaggcacaggactagtttcctgccttaaagagcctttacaggaaattgactgcaaacagtattggtgaccctgccaaggaggcaaacctagggtgatgtcattgttcgaagctgtcaccgccaagcctctggccttggggcgaggagagttggtgggattaaaaaatgagtgtgtgtatgtgtgtgtgtgtttagcagtctctaaagaggcgagtcaagggaaaatcctagcgggagaaaaatcacaaggggtggggggtgtctcagaaatattcttagctgggttcaactttcctcgtttttctaagtttaaaaaatcctctcttactatttttgctcatcaaaatgctgctgctttttcagagacagccttttttgagccattccctatttagtgttttgggtaattggctgttacagtatggaatttgtggcccaaaggcagcgtggtaagttagacactaggtgcacggtgccccattgttatgaagtgtggaaactgagacgctggactagtctgatgtatctgtttcttccaccaaaaaaaaaaaaaaaccattttggagaactacccaatgccagtgacttggcatctctgagtcgctaatcttcccatgtgcctccaggaaccgtctggagcgtccctgaaaaaaggacaaggtttgtatcttgtcatttttcctctggctggaagtctaagaggtataaacacagtcttaaaatgaaagcaacaaaaataaactcaaagcagccctgcgtgaaggcattaatgcaaaatatgcaagctggcttcctatttatacggcggaaggcagtcagaagagccaggcctggttaaggaaggagttatgtctctggaggtgcctgttccttagaattacaaataaaccctgggtgattactcagatgaggttgtaatgtggtgtctcatttcatgctttgcacagtccagtttcttgatggaaccaacggcctctgaaatgctaatgcaggatcaggatacagttagagtgccccccttcctgtgcccctcctaacatcctaacagctttagaaggaagtttgaagattaaacaggagagccatgtaagtttcctgtgatcctagatcctgtgatttgttaatattctttctcttcaatccacctgacatttacccagataccatattaggcttggagatacaacaagaaagaaaaccaacccaaccctgtccttaaagaaaagatggacgatgaagggccaggcgcagtggctcactcctgtaatcccagcactttgggaggccaaggcgcacagatcacgaggtcgggagtttgagaccatcctggccaacatggtgataccccgtctctactaaaatacaaaacattagctgggcatggtggtgcgcgcctgtagtcccagctactcaggaggctgaggcaggggaattgcttgaacctgagaggcggaggttgcagtgagccgaggtcgtgccactgcactccagcctggcaagagagtgagactccatcgcaaaaaaagaaaaaagaaaaaaagaaaagatggacaatgaattgcatgatggaagtgaacagtgttagggcgatatgcagatgtaaatgtggtcttgttttactgctcactgacttactgaagtaaacccattgacttcgccttcatgggtttgaaaagggtttttccaatgtgctctgtgtgtctcggagctcaggtgttcagagctgcctcccttataaatcgacctccaggagagttgtgtgtttggttcttggtgtatggtttcgtaggctccccagggctgaggagtcaccttgggatccagctttttttcttttttcgagacagtctctccctgtcgcccaggctgaaatgcagtggtatgcacttggctcactgcaacctctgtctcctgggttcaagcgattctcctacctcagcctcccaactagctgggattacagacgcctgccaccgtgcccagctaatttttgtatttttagtagagacggggtttcaccatgttggccagattggtctcgaattcctgacctcaggtgatccactgccttggcctcccaaagtgctgggattacaggcgtgagtcaccgcgcccagccaaaatccagctttttcttagttcctggcttggggcatgttgctggaaaggaatgacagattgaggcaagaaggaggcaagaaggatgcatctcctggccaaggaaactagagtttggaggtgtcccctgtcaatggcatctgaagaatttctacattggaaaggcataggtgacccagtctggtttggagtagatgggactgggtaggggactagtcttgaagctgcaagcatgctgtttttacttagagcacaggtagctggggaggagatcactgtggtgtgggtggcagaagccatccctagccatcacctaggaagatggtggcccttgggttgcccgagctgctgcttgttttagtagctgcatttggtgccacatttttgtggtaactgccaggaagcggagcccagcgtggcctcaggaagttggtgaggtttgcaccactttttaacaggctggtaacagtgccggagctgacaccctcatggttgcagccctgggattttgttatttggggacactttggaatatgtcactcagaatgctggctcactagctccacaagcaaaagactccttgggtagctggaagcaagcgttgggggaaggagggagaggcaattgcagtccagccaagaatctcaaggctcagtcttcaatgtatggaaacttcagtccttttctgatctttagtggaaatagctgttcactcttagcgccaattggaaagtgttggcagctgaagggggtcgttcctcaggggtccccagagccagtgtatctggtatttctaacattttcctagccacccctttctcctccatatgcccctcccagccccaccattcagatagggtggctggaaagaacatctcctaggtcctctaggaaacttggtgtttccactcaagggagttggggatcacgtaacaccctccacttccacctgggatttcaggccatctgtgggagtgcaagagcatggtggggtggaggtcacaggaaggtggaagcaaagccagggcagctccacatgcagccccctttcaggaacagcaaggataggccggcctgtatcttgttgctcagagcaggtgatcctgtcatttggacccttgtgaggagaatggatgtgagtgtgcacctggttctcttctcctggggctgagggactgtggtcttggattatcacatggtaggtgaggtgacaaaatggagggaagtagcctgggtggggactggggtggccactgcagagctctagctgatggtggccaggtgggaatggggacctgggacttcacgaagctggaaatggagagttttatggggcatttcattcaacttaaaaacctggccgggtacagtggctcacgcctgtaatcccagcactttgggaggctgaggagggtggatcacgaggtcaggagattgagaccatcctggccaacatggtgaaaccccatctctactaaaaatacaaaaattagctgagcgtggtggcttgtgcttgtaatcccagctactcgggaggctgaggcaggagaatcccttgaaccagggcgtcggaggttgcagtgagctgagatgtcgccattgcactccagcctggtgacagagcaatactccaacttaaaaaaaaaaaaaaaaacctgcaggccatacaaaatagggcctattgggtgtgaagagctacccatttgtgacccctaaccttgcatggtcttgaccctgtctctgcctctcctctagtctcccctttcctcttgtctgaattgctgctgcttaatcctctcactaggagcgagaaaattgtactttgccccttagtgacagctctgataaaaggtggttgaagtggatggtagtaaaaagggtttgctttagctgtggttttccagcctccggactcctccccctttcccatcaccatagataattaagagttgactcctcaaaattcctcccaccatattgcatatttttaggcttcaggtttttgtgaaccaaaatagtggaaagtttttttgtttgtttgttttgggtagcccaaagcaacacttttctacagaggcagccattctgcacgcacaataacctggtgaacaatgccagctttctattaataaatgaactgccagttcagaatttgtacccatgtggcagatggacagaaatagtttctttaggattgatctcttaaatttgactttgggaagatactggcagtccaggttttgtgacagagatccatcctgagatctttgtaaatggaaaagcctgaatgcagcgtttcttattgataggagagttgatggatttcaggaaaatgggatatagtagatgtgcaatgaatttgttgacttggaaacaaatttggacacttatccctgaaaacttcaggccattttttcctaaactctaattgagtccctgtgattggagtactagccccacagtccttatcaaacttcgcatttggagcaggcagtctgtctgggaaaagccaggaagctcgccatgaaggcatcgccctctgcttttaacttttttaggctctgttacctctgcactggcttgagtatttcctggctcaattgtttctcaggctggccttgagtccttagatgttatttgtgtgcctagaaatagctggaagaaaaatggttgtaatgctttgcattgctcactgctctccatggatggaaattctgtgagggaaagagggctttccacccagaaaaagagctgggcagcgtagacttcattgtcctgctggcctgtcatgttattctgctatactacagcgattaggatgagagagtttctcgctctccctgggtgtgccacctaaggtacattagggtagggacgaacatggcgggagttctcatagtgggctttcctgccagacgtatggcccacacagcagtatttcttacatgtggttcttttttttttttttttttttgagacggagtctttctctgtcgcctaggctggagtacagtggcgtgatatcggcttactgcaacctccacctcccaggttcaagcaattctcctgcctcagcctcctgagtagctgggaccacagatgcatgccaccacacctggctaatttttgtatttttagtagagacgtggtttctccatgttggccaggctggtcttgaactcctgacctcaagtgacccactcgccttggcttcccaaagtgttgggattacaggtgtgagctaccacaccctgccaaggttctattatttgatctatgttctttgtttgtttgtttgtttgttttgagatggagtttcgctcttgttgcccaggctggagtgtaatggcacgatctcggctcaccgcaacctctgtctcccgggttcaagcaattctcctgcctcagcctcctgagtagctgggataacaggcatgtgccaccacacccggctaattttgtatttttagtagagacggggtttctccatgttggtcaggctggtctcaaactcctgaactcaagtgatccacctgccttggcctcccaaagtgttgggattacaggcgtgagccaccatgcccggcccctgtaaccatttttaagtgattgatcatctcagcatgattgatggagatgatggggttggccatccattcttttttttttttttttttggagacagtctcactctgtctccaaggctggagtgcagtggcacaatcttggctcactacaacctctgcctcctgggttcaagcgattcttctgcctcagcttcccaattagctgagattacatgcatgcaccaccatgcctggccagtttttgtgtttttaatagagacagggttttatcatgttggccaggctggtctcaagcccctgacctcaggtgatccccccacctcagcctcccaaagtgctaggattacaggcatgagccaccacacccggcctattcatcatttattgagcatttatttatacccactatgtgccgtaaacaaggtgctgagtaatgagatgtgaacagaatagtccttcttcttgtcctcatggagcacacagcctagtcggggacaataggcattaaaaaataccaacaatgaaaacccaagacatacatagagtgttccaaattgtggttttattttttatatatatatattcatatatatttatatatatttatatatatattcatatatatttatatatatgaatatatatttatatatattcatatatacttatatatatttatatatacttatatatatttatatatattcatatatatttatatatattcatatatattcatttatatttatatatattcatatatatttatatatatttatatatttatatatattatatatatttatatatttatatatattatatatatttatatatttatatatttatatatacttatatatatttatatatttatatatatttttatatatatatatttatatatgtataattttttttttttttttttttgtgatggagtctctatcacccaggctggagtgcagtagcgtgatctcagctcactgcaacctctgcctcccaggttcaagcaattctctgcctcagcctcctgagtagctgggattacaggtgcctgccaccacgtccggctaatttttgtatttttagtagagatgggatttcaccatcttggccaggctggtcttgaactcctgaccttgtgatctacccgcctcggcctcccaaagtgctgggattacaggcgtgagccactgcgcccggtgtgattatttttatgaaggaaaagaccagagtcctttaagaggggacagtgggggacttgcaatagattgtgtgggagctgtcaggggagactttccaagatgatgacagtgaagtgaggcctggagggagagttagagccaacctcagagaagggaacactgttctaggcaggaggacccagggttgtgggaagagagaaataaaatgagaccaagacagtggggagagcagtgtgagttgaagtcagaggggtgacagcagccagaatgtgccggtagcgaggatcttggattttattctagctgcaatgagagctttgattctacaaatatttattgcgtgctagtcactgttttaggtactgggtgtacaacagtgaaaaaagaacttcccagccgagtggaatgccgtggagcatatctgtttcgatgctgggacagatccctaacacagctcattaaagcagatagcaccattccgtctctttcttcagcttcactttacgtcagtcccagcatttttatccctacccttacagatgagagaactaaagttcagagaggtgacgtgacttgccccaggcccctcagtcagtaaaagacagaactgagaatccaaccagactcttccctttttaggttatttctctaacattagggccgagtatcgattctctttacctctgacttcgtgtccctggtattaagactcagggcccacagtgcctcttggaattcaggcatatggtgacatcagtgtgcctaccattcaggtcttggagaatagggtatggcgaaaggagagaactcgtgatatcgctgattcagtagcccagagttgtacgagtccttgggtgtttcaccttcatccaggcatctgagattggagacaagcatgtggctgaatgacgtatctgggggaagctgtctaaacagccgtgtggagttggagagttgaattagctctgtggccaaacctctgggctcagtctgcctatatatggcttgatctcaaagaacaggtgatagcagtaggagttgttttctgtgttgctggtgggagatgcccaggcacattcctttgtagacaagcacaaactagatatttttgaaatcggaggtctgaaaccagccgaagaattaatcctggcctggaaagcatatgggagagtacagccaacctggcttgggtgttgctttcttggttttgttgcatttttgaggcagggtcttgctctgtcacccaagtgggatcacagtggtacaatcatggctcattgcagccttaacctcctgggctcaagtgattctcctgccttattttttgattttttttgtagaggtgaggtctcaccatgttgcccaggctggtcttgagctcctgggctcaagtgatcctccaccttggtctcccaaagtgttaggattacaggcgtgagccgctgcccctggtgactttgttgctttttaataagcccagaaatttctttcaagagggaggatctttgtgaacatcttgagccgcgttcttgatcgctggctgtggaagcctccacctatcaggctcaagtccatgttgctatcatgtgcactttggctggtgaggtgctgagcagaggtttcagcctctaccacaaggtttcctgatgaaaggtcagctgggtgggcccagcttctccttacccaactgagaggcctcatagagcacaaggcctgggtacggaggttcctggggctcctgccatacccagccaggccaagcagagggccccagtgtgttgttgggtgctgagaggctgcccgcagctctcgcctgtgttggaaggctgtagacttggcttctcccaaacgtaagctgtgaagccatggactcagattctcagcctggccctgctacttactgtgggaccttgggcaaggaagtctccattttctcttttacaaaatggggccaataatctgactaccacagggctgtcaggatgcagcgggatggagcctttatagggtcttgttctgtgggatctggagtcccatatgggagttattagttgagggacgaggcatctgggaatctttattcaactaggaaacttcagccaaagaactaatgccatagagatgtcttatggtgtctgcatttgaagccagcggttctttgaaaatttatcctgagttccagaaagccaactgctagataagtaagcattgagcatttaaggggtcctggaagtaagattcctggaaagaagcagcaatctcttactcatccccgattatctcagacacagagtggtggatggaacctttgtggtttaggggctgactcttggtattgctggataaggaatatgagccagtagagacgagtgtgttgtatagcagtgtcctgcgactgggctggagacgtggctgagggaggccagggggcctcagagtgcacgggaggaggcttacagaggtcttttgcatcctgcagaacaccacatgtgtccttccctctgggaaacctcccacccgggcagggcctctggggccggatgtggaaggtaaacaggctgcctttctgctctctaccacagacaggcccggaaaggcctgagtaggagcttttcatctcaggaagccctgaggtcccacagcttctcctgaagcagcctcattgtccctttgtaagagcatgaccaggtgctctagctcctggagcaccagtggagaactagagtggcccaggtgctgatgccaagttcgagcaacagctcctggcgggtttccctgcatccccccactcactcccatctattcttcacataggggccaaagaacatcctgcttgacatcttgatcagtgtcccttgccctcaggatcaaacctgcaagtccccaaggccctgcaggatctgttttctcctctctgtgctccgggcgcatgccagctgcctctctgctccatgctcattcctgcctcctgagggacttcacacggggcccttgcctctgcccctttcgcctcagctcgccacctacctcctcctcattcttcagatggcagtttatgcttcactatttgtagggccgtcgcacctgacacctccagcctaggttaggagcatgtccatcacctctacttctccttttaactccaaccatccttggctctccctctcgagggtcacgagagcagagagagaatctattttgttcaccactgtgtccctaccatgtgggacattgtcaaggcaaatgtaagtgtgcactaaataaatatgtattgaatgaatagatagccaaacagacagaatggatctgccacaacacaaacaggatgcttttcaagtgggcagaagatggagacatcacttgtcgagacactcaaacaagtggctggatggatgagtggcagatccattctgtctttctgcttggctttaggagtagagggatcacccatggtccatcctctgaggacaagggtatcatgaccgcccaggccccactcacccctgccaggctcattgcatcccatctaaaagtgtgctctggaaggtcataagaagtcctcacctgggacacttctaggcccagtgttcagccagctgtcctgagttctgcatcagtccctgctagatatgaaacacaaacaggatgcgatgcttttcttttttttctttttcttttttgagacggagtctcgctgtgttgcccaggctggagtgcagtgggtgcaacccctacctcccgggttgaagtgattctcctgcctcagcctcccaagtagctgggattacaggtgcacaccaccatacccggctaatttttgtatttttggtagagacaatgtttcaccatgttggccaggctggtctcaaactcctggcctcaagtcatctgcctgtctcagcctcccaaagtgctgggattacaggtgtgagccaccgcgcctggccaaacaggatgctttgcaagtaggcagaagagggagacatcactgtcccatggagaggtgggaaaatcatcgttagcacaggataattcatcctattttgtgctcatgtttactgagctaggattgacctgtgtccgggcagcagggacacagaggtgagtaagacaaagagaaggcccttgcccttaaaaatgatacgtgtggctaaaacgctgtagacctttttgttttttcctttttgagacttcctttttatacagaaattgctacctgcaggtaaaattaacttacatcgtgaaagcgacagtaaagtgtttctagggatagctaaagacctaagaacacagccctgtggtttgactggctggccaccttcctgcagctgggtttactatggtgctgtgttctgggacagcccactcgtctccatttattgggctgagcctcgagacctgcaataccagggaaggaagggaagtctaggctgtctttggtggccattgttatttatggggcatcggcagagaagtcagtaccatggaaaatctagagaaagatagaggatacgcagtgtggttgagcagaatctgatagctccctggctctctccgggccatgggacccagggcgacacagccaccctttttctctctgctgtctggcttgggcttgggctttgtctcctgtgtccctccacaccttcttcgctgtcagtggtgaccaatcccgtggaatcagccactgtgtgttaccccaagtccttgcccctgggacctcgctctgttcggagacaaaacccgggactgtttctccttttaaatgcaaccttgttccacaggagaggagaaaagcaagaaagaggtggcttgtttatctgatggtagtggggtgtgctctgatatgcctttgaaaggggcccagctttgctttgcccagcggcctttgcaggataatgagagaaggaaaacacagggaacttagtgggaatttgaaactggagtgtgggagtgggaaagttcagcttttaccttggagcaatccagtctttctcctgtaggaaaacagaatggtgctgtatggcctccaagctgggttacatcctgggaaaaagacacgtgcttggctattggcctgggcgcagtttatgtgtaagcctttccttgtggattccattttcttatttcccgaatacttctcagccccacaagtccactgagtcttctgtctccagagactgcctggtttccatccccgagggcatctgcgcatcacttaccatggtgtaccatgcacctccagtgtgcccggcactgtgtcaggagctggggatacaggtgctggtccccacctcactcccctcaacctctgcaatatatgatacataacccacacacacagaccatatgcaaaagtggtgggactcctttgtacctgtcacctgcatcagtgattatcagcattttgccagacttgtttcatcagtgtctcccaacacactccccccagacattacccatacgtgctcaaatagatttgggtgtgcgtgtgtgtgtgtgtgtgtgtgtgtgtgtgtgtatttttttagagacagggtctcgccctgtcacccaggctggagtacagtggtgagatcatagctcactgcggcctctgaactcctgggcttgctttgttgcccaggctggtctcagaactcctggcctcaagcgattctgccaccttagcctcccaaaatgctgggattacaagtgtgagccaccgcacccggccaatgtatgtatttttaaacataaccacatactgttatatttaatgcttctgaccatgtcttaagaaaaaaacaaaaactccctttggcttccttgacatcacagtctctctgtttctctgactcttcttcctcatctcctatggctaaattctctccctctgtccactgcttacacatgggcatttcacaatgtcctttttccctgaaggaacttaccccctcccctcagccttaagtaccccatctgtggggatgatgcccatgcctgtagtcctgactcactcaccacgctctatcgcagttatttactgatgcatctctctcccctatcagacgctgaggtctttgatggagcaaccttgtatttgtccgtgtatccccagcaccacacctgtccatagctggagctcaggaagtttttttttttttttttttttttttttttttttaaagtcagagtctcactcagtcgcccaggctagagtgcagtggcacaatcttggctcactgcaacctccacctcctgggttcaagcaagcacgtctgggtaatttttgtatttttagtagagatggggtttcaccatttggccaggctggtctcgaagtcctgactgcaagtgatctggccgcctttggctcccagattgctgggattacagacaggcatgagccactgcgcccggcctcaggaagtagttgaatgagtgactgaatgaatgcccacgtgagcaaatgacctgtttgctgaactttagactgacgttgcctgatgcccactgcttgtgcagtacgtacttcagtctcagcgtgtctgagaccaaactcattttcaagtcccacttcttgggcttggcattgcccatttgtcagccatccgagtcagaaaccttggagtcagcttttgacttctcatcctgtaacaggcaccaagtttgatttctttcccttgaatatctcttagaaccctcaccttcctccttctctttattcctaccattgtccttactcaggaccatatagtgagggtttaaaagtgcagagtcttggccgggtgcggtggctcacacctgtaatcccagcactttgggaggccaaggcgggtagatcacctgaggtcaggagttcgagaccagcctggccaacatggtgaaaccccgtctctactaaaaatacaaaacttagctggatgtggtggtatgtgcctgtaatcccagctactcaggaggctgaggcaggagaattacttgaacccgggaggtggaggttgcagtgagctgagattgcgccactgtactctagcctgggtgacagagtgagactccaatctctagaaaaaaaaaaaaaaaaaaaaaaaagcagattctaaactcacagtgctgctgctggctgcctgagcttgtgtggctttggacagatgacttaaccactctgtgaagatggtatctgatgcacaggaaatgctccaacgttggctcttgtcgtcatctgtgcccatgtctccctcagcagcctcctgactggccttctccagtctcctggtttggattgaggctccctagaccctacctttctgagactggtatctagtcaggttactctgggagatctccaccccccactgcccagagagcaggttctgagctcttcagtctctccaccttctggccccggctgacaccatccctgccacttctcctggggtccccaaacatctgtggtacttttgtctttcttgcccttggtgttcccactctgcagaacaaccttctctccaggtcaccactgatcgcaatcgcgctctcctttcaaggcccagatcaggtgtcacctgacctttgctgtcctcagatcacacctccctgtagcgactggctcgccagtgtccctctctgaccgagctgtgcactcctccagggcagcactgtcagggtctcccccagacccttggttgtgattctctctccttgtcctgaatctcagttttcctgatacatgggatgctacctgaaggcaggtttcaactttcaatctttttttttgttttttgggtgagatggagtcttgctctgttggtcaggctggagtgcagtagcgccatctcggcttactgcagcctccgcctcctgggttcaagggattctcgtgcttcagcctcctgagtagctgggaccacaggggcctaccaccacacctggctaatttttgtatttttagtagagacggggttttgccatgttgaccaggctggtatcaagctcctggcctcaagtgatccacccacctcagcctcccaaagtgttgggattacaggcgtgagccaccgctcctggcctggaggatttcagatttaaagcaaagaggatattttccaacaaagcaactgcttttcttttttctttttaaattttgtttatttatttttaataaagatgggatcttgcatcttgcccaggctggtctcaaacttctggcctcaagtgatctgcctgcctcagcctcccgaagtgctgggattacgggtgtgagctaccatgccctgtctctttttttgtttgttttttttccaaattgaaacagggtctcactatgttgcccaggctggattgaactcctggcctcaagcagtcctctcgccttggcctcccaaagtgttgagattagaggtgtgagccaccatacctggccctgtagaggggaggcattgatgaaggtcaagaagtcctgttagctctgccttcagaatctaccccaggtccttttagttctctccagcctcactgctggaaccctcacccaagccaccaccttgcagtccacacacggccactgggattggggcggcgttctccgcgcgaaatctggctgtgctcctcccccatgaggccctccaaaggcttcctcttcttaggatgaaacccacactgccagccgaagctcctcaggctcccaccctctacaagctccttctgctccagccacactcaccaggcccgagttcccacctagcaccttccctgggaatgatctccccctggttggctctttctacttattcagcctcaaatgtcatctccactgagaggcctttcctgacctgctgagcttgattccctcccctccccagtcacattactccgtgttatggtacccatccctgtctccttagcttgtttttgtctgtattggctcttccactagactgtaagttgcatgagggcagggatgtctgtttaatcccagtgctcaggatagtgtatggctcgtgatagatgcctagtacattttaaaatgagaacgaatgaagtttgggagaggctcagagcagtgagtctcccccttgttgggggactggggagtgcctgggaggggctatctggtgccagcggtttggagtggctgggatgactctggaatcctgtgaggcccagtcagtttctttggttctcatgcagtgcagtgccctcagacctaaccattttgttccgtgctggcttgaaagggtctgcctccctcccagtgcagcccctgcctctcctctttctcgccccccgccctcctccagagaaagcaggtggtgagggctctctaacccagacaggacttgctgttcagccccagcttgaaattgatttcctccagccctccttgagccaggccccgtgaacagaggaggggtctgagccaggcctcctaggccattggtgggagggagaatgagacagccatttggcccacaggccaccaacttttcccccccttctctaaaagacacacaatggcagttgggctgcacctttgtgagtcaccggtgatagcccatcataaattgttatttcctatatttccagagcagctttatcgggcgttgcctgtgcagtccgggaaccgatttggtatggggtcagttaacatgctgtcttgttgaaatctgtcatcatgcccatataaggcaaactccttggattactttttaccttggcagaatcacaggaatgtcaaggtaaccaggccacctcagcatagctctgattctcacccggtcacctgacttgcccgccctcccccatgactcacccagtggctcagcatggggcctgctgcactgtggctgctggaatctgccaaggacctcctgggactgcccttggttttgtgtcttccttagagtagatcaaatgagaggaaccatgtgaagtagctcacacagggcctaacagagcaaacacaagacgtggaaagcagacttggtgaggcttgagtttagtttgggggttgcgggggtcccagctctgctgcttaacagccctgtggccatgggtatatcccccagcattcagagccttatctgtaaaattagagcacgcagaacaaaccctggtacacactaagtgctcaataaatgtgagtcatttgtgtaattatagtagggtaggccttatgccccacccagtcataaaaatgcctcttgctgttgttggttcaggctcagccccttagtggctttcatggggcaggttgacatggtacccagagtcctcctcggtcctcttcccatggtgtagtgagagcactcaggaccacctaggcctttcctagaaaactgaacccacaccttcccagtgctgccccaccctggtcccccaccccctgcaggacaaaccactcctcccttgttttggggccaggagtcagatctgcccctgagagcagcaggggcccctttgtcctttgacgtcatacccacaccgctcctggagacagccaccccttcatgccagccccaggaaggcttgtaggtggggcgagccagggtgagagtgtagccctgttcctcggccagggcagatgtttcaccatttttaatggagcaattatgagtcagaggtttcagtctctactggttcctcccgatcctataattactctttggctatagaatcctattttgatctcttcttttcttttctcttctttctctctctgtggtcatggtcaggtttttctttttttaaatcctcccaagacactgctaatgttgtctgtctcatgcatccaaggaatctgagatggactgaatattgtcaagggaaaaaaaaagagacccccaaatccagagtgatttcttaacccacccaaatggctttttgtttgtttgtttgtttgtttgagacggaatctcgctctttagccagggtggaaggcagtggcgtgatctcagctcactgcaacctctgcctcctgggttcaagcgattctcctgcctcagactcccaagtagctgtgattacaggcacatgccaccaagcccagctaatttttgtatttttagtagagatagggtttcaccatgttgaccgggatggtctcgaactcctgacctcgtgatccacccaccttggcctcccaaagtgctaggattacaggtgtgagccaccgtgcttggccaacccacccaaattgtgtaccctacaccatcctagtgcttgggagccaacacccactcacaggaggctaagggcaagtttaggtaactcttaacaccacgaattagttgcctgctggcaaacttcaaactccaagcctgaaatttctggttggagtcacctcccagatggactcagggattcattcaccccctcatccagtgctcacggagcctctgtgaggtgcaggcctggagaggagccctgtggcctcagcaaagggcaggcaggctggtgagcacccaacctctggatcgaggggactcaattatgcggataaaggcccctaatcctctcagtgctccaaactcactctgcttctgaaagggatcttcgtaccctgggttcagagagtaggaagcccgcagggaccgagtatgcatgaaacaagcccaagtctgtgggggctgtacatggtcaagatcacagatttccagaccaagccagctccaccctagctgggatgcccaccctgagacacccctctctgctttcactggaataggatggccctgacttggccgggtggactgttgaatcagagcctctcaaaacaggaaaaaggaaaaggatcaccaagcaggagtttcagttgtcaaagacaaaacccttaccacgattaaagattactccagggcctcgcatattcacccttccaccagcagggcccagtttacggatcatttgaatactagcaaaaaaacaagccatctgctggagagattgaacagagggagaaacaggagtgtttgccctgcttccagacacccctttcctgtggcagttcctgcacctggcaagatctactggggaattcccggggtcccactagctcaggacgggtgtgtagcacttgcctaaataacaatcccatcagtgccctgtctgaccttttctccccaaatgccaaaggcctcttgtctggatgaacaaatccctgggcggatttgtccagactaaaacgttaattctaaagactgggccccttaggcactcgctaagattccaggccacactgtctcaaggccagaattggcttacttggctatctttttgaaagatcaaagtttaaaccagatgatctgtagtcccccacccccaccctgaaacctgagcttagctgtaagcattgaaagtaaatggggtgtttgtagctcaccctccctgttctccaggtgaagggccccgtgtgcctgatcatttcatagcaaaatgctagatggggccagaggaggccccagcctctgctgctgccctaattttaaaactgccttttgggagtgtaagtttcctctgttaaaggtagttatttcaaggtaggcctcaccatctcctcctcctggtgagaagctctgcctggagggctgagcactgcctcccgctctgtgggccccacctgccttgggttgagacctatctcttcctggactctgtgtggggagtgcaggctcttccccttggggagaacccagttctttgacgtataatctgagtggtttgggttggttggttggttggttggttggtttcccatgtgtgggatggctccggaagtctgtttgagaacagaggcaggctcagatgggagcagctcctaccccgggccgcctatccccctttaccctggggtttcttttagctccaagcatccattccagtctaacaaatctggtggcagagtctcttttttttttttttttgagacagagtctcactctgttgcccaggctggagtacagtggcacaatctcggctcactgcagcctccgcctcctgggctcaagcgattctcttgcctcagcctcctgagtatctgggattacaggcgtgtgccaccacgtctggctaatttttctgtattattagtagagacggctggtctctactaatagttcaagacggctggtcttgaactcctgacctcaaatgatccacctgcctcagcccccccaaagtgctgggattacaggcgtgagcccctgcacccagcccctctggttctactgagacctcagatctttcatttatggaacaagggggttggattagattgttcgctctcagccctcacttcatgttagactcactaggtggactttgtcaaatgtcattgcccagggcccaccttgagggaatctgtctcattttgcctgtggtgaaattcaggtatttttaaaaagctcccaggtcccatacatctattgtcaattgattttcaacaagggtgcaggaccattcaatgggggaaagaatagtgttttcaacaaatagtgcaggaacaactattaatagatacccatctgcaaagaatgaagttgaacctttacctcacaccatatacaaaaattaactccaaacggatcagatacctaaatgtaagagctaaaactgtaaaactcttagaagaaaacacaagtgtaaatctcatgaccttgggttaggcaatggttattagatatgacagcagaaacacaaccgaagaaaaatagataaatcagactgtttcaaaactggaaactttttgcttcaaaggacactattaaagtaaaaggacaacccgcagaatatttacaaattgtatatctgataagggtctactgtccaaaatgtataaaggactcttaaattcaacagtaaaaagacacaccagttaaaaatgggcaaaggattcaaatagacacttctccaaagaagatctacaaatggtcaataagcacatgaaaaggtgttcgatgtcattactaattagggcaaatcaaaaccataaccactacaaatggtcaataagcacatgaaaaggtgttcaatgtcattactaattagggcaaatcaaaaccataacgtggttgggcctggtggctcatgtccataattccaacatttttggaggtagaagtgggaggatggcttggggccacgaattggagaccagcctgggcatcatagtgagaccctgcctctacagagaattaaaataaaaaattaggccgggtatggtggctcatgcctgtaatcctagcactttgggaggccgaggcgagtggatcacctgaggtcaggagtttgagaccagcctggcaaacatggtgaatgaaaccttgtctctaccaaaaaaaaaaaaaaaaaaaaacccacaaaaattagctggacatggtggtgggcgcctgttgtcccagctagtggggaggctgaggtgggagaatcgcttgaacctgggtgggagaggttgcattgagccgagatcacgccattgcactccagcctgggcaacagggtgagaccctgtctctaaataataataaaaatgagaaattggccaggtgtagtagcatattcctgggaggctgaggtgggcagattgcttgagcccaggagttcaaggctgcagtgagctatgatgacaccactgtactccagcctgggcaacagagtaagaccccaaccctaaaacaaaaaaaaacagaaaaccacaatgagataccactgcacacccaccatgatggctataatcagaaagtcagataataagtattgactaggatgggagaaatcagaaccctcacattgctggtcaaagtgtaatgtggtgcagcttcttgggaaaacagtctggcagttcctcaaaatttaaacatgttttgtatttttagtagagacggggtttcaccatgtcacccaggctggtcttgtctcagcctcccaaagtgttggaattacaggcatgagccaccacgcccagccaagttcctcaaatttttaaatataagaggtatcatatgactcagcaattttactcctaggtatatgcccaaggcagttgaaaacatgtccacataaaacttgtacatgaatattcacggtggtgctaatatccaaaagatagaagcaacacaaataatgcccatcagccaatgaattgataaataaaatgtggtatatccatacaatggaatgttattcagacaggaacgaagtactggtacatgctacaacatggctgaaccttgaaaacatgctaaggagaagccaaactcaaagatcatataccatatggttccacttatatgaaatgcccagaataggtaaattgcaagagacgaaagaaaggtaggttagtggttgccaggggctgggggctgggtaggagggaagtggggttggagagtaactgtaccagttttgcggtggtagacatgttccttgtatttttggttttttgttttgttttgttgttttgagataaggtctcactgtcgcccaggctagagtgcagtggcgctgtcatagctcactgtagcctcgaattcccaggcttaagtgttcctcccacctcagccttctgagtagctgggactacaggcaagagtcaccatacccagttaatttttaattttttttttctttttctttgagatggagtctcgctctgttgcccaggctggagtgcagtggcgcgatcttggctcattgcaacctttgcctcccgggttcaagcgattctcctgcctcagtctcctgagtagctggaactacaggcgtgcgccaccatgcccggctactttttgtattattagttagagacgaggtttcaccatgttggccatgagagacaggactagctggatttcctaggccgactaagaattgctaagcctagctggggaaggtgatcgcacccacctttaaacaccgggcttgtaactcagctcacacctgaccaatcaggcagtaaagagggctcattaaaataccaattaggttaaaagcaggaggtaaagaaatagtcaaatcatctatcatctgagagcacaggaggagggacaatgattgggatataaaccccaggcatttgaggcgggagtgggccaccccctttggttcccctcccactgtatggaagctctgttttcactctattaaatcttgcaactgcacactcttctggtccacgtttgttttggcttgagctgagctttcgctcaccatccttcactgctgttcaccgccatcacagacccactgttgacttccacccctccggatccagcagggtgtctgctgcatttctgatccagcgaggcgcccattgctgctcattcgggctagaggctcgccattgttcctgtgcggctcagtgctcgagtttgtcctaatcgagctaaacactagtcgctgggttccatggttctcttccatgacccacggcttctaatagagctataacactcactgcatggcccaaggttcaattccttggaatccgtgaggccaagaatgttaggtcagagaacaaaaggcttgctgccatcttgggagcagccactaccaacttgggagctctaagaacaaagacccaccggtaacagccaggctggtcttgaactcctgacctcgtgatctgcccgccttggcctcccaaagtgctgggattacaggcgtgagccaccttgcctagccttgttctggaattagtggtgattgttgcacgatcttgtgaatatactaaaactccctgaattttatgtaaaagggtgaattttttggtatgttatgtgaattacatttcaatttttaaaaattgattctccaaattatgtacatatttaaagagtacatgaaagagagggagagaaagaaaagctggatgcgagatgccgcaacctgattccactcactcctagatttgttgagtacctgctatgtgaaaggtaccagtccaggcagtgggttcccacagcaaacagaaccctcctctggggagcttatgctgcacttgggagggagactggttatgaacaaagaacatagtttttgatgatgaaaagtgcagtgagtaaaacaatgcagtgtgaggccgggtgtgttggctcacgcctgtaattccagcactttgggaggccgaggtgggcggatcacctgaggttgggagttcgagactagcctgaccaacatggagaaactccgtctctactaaaaataaaaaattagccaggcctgtaatcccagctactcgggaggctgaggccagagaatagcttgaactcaggaggcagaagttgcgttgagctgagatcatgccattgcactccagcctgggcaacaaaagtgaaactccgtctcaaaaaaaaaaaaacaaaaaaaacaaaaaaaaaaacccaacaacgcagagtggagtgatagcctaggggagatgacagagtccaggaaggcctcctgggttgctgacatttgaggcaagtcctgagtgatgagacaaaaccagctctataaagagctagacgaaagtcttagaccagtatttctcatgaggaggagacagcactccaaaatccatcctttggcctggcgcggtggctcacgcctgtaatcccagcactttgggaggctgaggcgggtggattacctgagatcaggagttcgagaccagcctggccaacatggcagaaacccgtctctactgaaaatataaaaattagccgggtgtgatggtgggtgcctgtaatgccagctactcgggaggctgaggcaggagaatcacttgaacccgggaggtggaggctgcagtgagccgagatcatgccaccgcactccaacctggcgacacagcgagactctgtctcaaaacaaacaaacaaacaaaatccgtcctttgcagcagcaacacgcacgctttctggcacctcaaaggggattgtccaagactggaacactggctgcagggagggggccgggtgcaaagagctggtttctgggtggacacgcaggacctttggaatgctcgctaccccactcagcagtatttatacctcttctccaactgcgaagtcagagctttttcatgcaggctgagaaaactccgaataaggcaacttcaggccaggacataagacgcattccatatttcactgtaattgctttcaaattaggttatgtcgtcatgtaacaggcacacacagtgcacttgctttgcccctggctggggttgggtcctggacaggctgccccgtgtgtcgctgaactgccgcagtgctagccctgattgcctgggcagtagggctgtctgcgtcccacgttgctgcacccatctaatttgtggctgtgttattgtgacctgctcgttttctgttctttcaacctgcttcctggcttttatctccttcagaatctggtggcagtggatcttcaaaaagtgctcaggtgtgcagtctcacaggccagaggctccacgggcccccttgccagggcgagcatctctgcctgtgccgctggtaacccagattccagaaggcttagccgtctggccctgaaagcgcctttatagttggtgatgaagcccatgggctggggagccgtttctgctttcaggaactgaaaagatgccccagtggggctaggccttgcctgaggtctggcaatagcctgccagatgggtgataagaaggcctacccaggtgataagcctacccaggaataaatagctgtacctcccctgtgtccaagccctggacacccttccctaggacccatggaagcaggaaccatgggcagcgtcagaggccacagcaggcaaggtggaagttcaggaggtgggacggcgccctccccctcaaagcaactgatgccccagcggagcgacaaaccctacacggtatttcagagccaaggtttgaaaactcccagggtgctagggagctccgtctggcctccgggtacctggggttggggctggctgtggccagttgcagtcaaccctgagcctgggcaaaatgcatgcaggctggtcctcctgggtgatatcctgctaggcgggtgggcagtgtacacggcagaagagggttgcggcatgaggcagcaaacgtttttttctaaaatcttgtcaagcgtggggtccgtggaatccacatgtgagcatcagcctggtgggtggggagagtgaagcctgcgatccagtctggatcatgtgctacacagtgcagagccggcatgctcacccctcctgagggatcgctcgagcctatttctaggcccaaagcgactttgcaagagactccctttattctgggcttagtggaattccagcttccaacagccatttccctccacccccttcagttctgagaacatgttttgtaacaggaaggcaggaagaaaagagaaggcgagtttgttcagctgggtcagccgcatcccaccaaggccctttcttccctccagctcaccatcgctctgcccactggaaccactcggttgccctgtgtctgccgaatgtttgtttcttaatcagcgccccagagtagagagggctttgcctcttcgggttgagggagggaatcattgatgaatggctcattaaagcccactgctgccacattcctgggtgcttaggtcacctcctgaacaatatccatcattcattcacctaccgccccacatcctggcggctgggaggggtccctgtgacgcaggaaggactttatgaccagagatgctaggtctccgtctccctcctgcagcccacagtgacaaagcagaaactgctcttggggccccctgaagcccgccttagctgggtcaccatgggccttggcacacggaggggtgacagtggatcccaactcaactgacaagcttgcctttctctgttcttccaccccccttccccgcactcacaccctgtgctattttagcaaccagagaagcctctttaataggctgcccgtgtgcaggggcaagctctgaagcctcctctctgtggtttggttcacatgtgttctcaaagacagatgagtccacatccttccttcctccctagataggtcaagggctgggtgcaggctgccttcacaggagggccagggacaggctgggaggagcggggccaccttttgcgaagcgggtgatctgctggggcgttgctctgcctgcctgccttgttctctgagtttacctctagcttggggaccaagggtgggctggggccttctttttttttttttgaaaccgagtcttactctgtctcccaggctggagtgcagtggcgcgatcttggctcactgcaacctctacctcccaggttcaagcgattctcctgtctcagcttcccgagtagctgggtttataggagcccgccaccacgcccaggtaatttttgtatttttagtagagacgaggtttcaccatgttggccaggctggtcttgaactcctgacctcaagtgatccgcccgcctcggcctcccaaagtgctgggattacaggtgcgagccactgcgcccggccctggctgggggcttcttgacctgactctgctgtctctccctcactggccagcacctcccattctactcagacatcgtggaatgaatgcccaccccgtgtttgtatgtatcatctgtgtctgtgtgacattaagcaagtcactgaacctctccctgcctcagtttcctcatcaaatggagatatatcgcatgtgatcatggggttggaggttttaaagagttgctaatgtgtaaatagtaagaactagcaattagccgttatagcataattacctttaatatgtcatgccccccgcacccccgtgctgaatgtaattttgcgggggggcgggttgagacagggtctggctctgtcaccgaggctggagtgcactaacacaatctcagcttactgcaacctctgcctctcaggcacaagctgtcttcccacctcagcctctcgagtagctgggactacaggcgctcagtaccacgcctggctaatttttgtagtttttgtagagatggggttttgccatgttgcctaggctgatctcaaactcctgtgctaaagcaatcctcccgcctcggcctcctaaagtgctgggattacatggtgtgtgccaccatgcctggctggccagaatgtaaatgataactgttttgcttcctcctgtgtccagtacataatagggctccaagtcagtatttgtgaggcaggtgcatgcctcttagttgcggtcctgagggcatggccactgccacgttctggacagtcagagtcgctgctgcccctggaagatgaccgcgatcatgaagcccaggagagctcgatgctttttgcctttccctcctcccacagagggctggcagctctggttcctcccaaatgaaatagaaaccttgagtttgcatttcttctttggcgtgccggcagggcacctctgccttcctcttcctgccagggggaggaagtttctctcaggggctcttcaccctgctttattcctggccatcacacattgacccttgtccccttcggctctttccctgcatggcagggacagcatgaccgtttaatggctttgtgaggccagcatgccagcctcacttctttactcccttccttctcggagtgggctctgtcccttctgcaggagggctttggcacatgctcttcccagtatctggaaggtctccctcatttttatcttattaactcctcatccttcagctcagagtttgagaatgacttcttcaaggacacctttctgtgtctgcctcaccagtcgcttggtgcccccccaccccgccaccatgctgaccgcactcttcagctcccatcccaggggaggtgacacaaactcggccccaggagcccagcacctggctttaaacccagctctgtaactttctaggtgtgtgactgatgggagcaagccacttcacctctcaggccctccgtttcctcatctgcaaaatggaggcagtactagcacctccctccagagatgattacgagggtgacagaattagtaagtgaccaagtgcctcgagcagtgcccgcccctagtagactctatggaagtgtctgctgcagttattgctgttattattaccacttttcctaagggcgttatttctggagtggactgatcgcttgattaatgagatcagacctggagcctcatgagagtgtctgcttttgctcactgttatggattcagcacagggcctggccctctgctgacccccagcatatgcttgtccagagaatgaatatgtacggacccatggtggcctggggcatcatgaggtcggctgcccacattctgagaattttgcatggtggagggcggcgtggtgggcgcatagggcccccatctatagaaaccacctctccacaccatccaccccacgcagcgtagtctaaaccgggtagggagaggaaggatggaagcagagtgttatttttgtaaccaagtagaagaagcgatgaatttttaatgtcccattcgaactccagctcctactcaccagtctctccgcatggagaagtggccgtcatggtcgacctgttcccaagggtggccttgtgagtgcaggctctcctcaccagagctgagggctttgtgaacctctgatgtcaatagatgcccctcatcttccaggaggacaaaacagggcaaagcaagacatggggtgagaacaggagtgcatcagtggggttccccaagcctgtgtcaggtccggatctgggtgggagttcccttctgcgtcatccaggccaggcgagtgggcatcctccctgagcacctgtgcttggggctttgcctgtgtcagtcaggaagacagagtacacggaagagttaccattgctttcagagcaaaccttcctttgacatgcatttaacacagcacggagtgattgacatgtgtccttgtgtttaatccctatcttaacctctcggttactgtcctgtttatcagtgaggaaactgaggcttattgcttgcctgaggcctcagtggcagaagcaagatgtgaatccgcacctgtgtgatgcccaagccagagctcttgtttactacccagagaagatgagcacaggtgggatgtacgtatggagggcgggtagggcagcagcccctctgaggacaggtggccagaacccaagcggcgaggtttgttcacagcctccacagggtggggtggggccatccgcagagggtctcctgccatcccattttccctgcataccagtgggtggtctgagagcctttgcagagaagagactggatctcagcacgtgcttatgtgcgtgtgtacatgcacacacatgcgtgtgattcatctggctcttactttatgccaaggagcctgtcacatgctttaaatgtattttccctagtttaattcttagagcacactgcaggaggtagattctgataaatccatcttacagggaaggaaacagacttaagtaggtaaagtcacttggttgaaaacatggaatgagtaagccaaggggcaggtattcaaacccaaacccaggtctgtgcccctgcagagcctgcaggagcagcccacacaggccaaggctgtgaggggtgctgtttgcacgcgtgcgtggccctccctgcagcccaggtgcctaggtctgggcctggcaacaccagagcacggggccttgccctcggggaacagccctcttttgtcctcaggctgtgggatgtgtcttggctactttgctgcccagcagtgcctgctctcaggcacatgtgagagtagaggcctagcatccgtggccacttccttcccagcccatttgctgctgccctttgctctgcagggctgctgggctcctgggctccacgcctgcttgctgcctgccatcaaggctggcagtgctctggggctgtaaaggtgcaggcgccgtacttcccaacccctggagctcgcacatggtaggagagaaagctcatgtgcatgcaacatccaataagactaaaagtgactgggggttgctacgggagaggtgctgagggtgggccggggacagagcaggcacactgtggagggggtgggcaggactcctgagaccagggcagggagggaggagatgctgggaggcacagggccatccagagagctgccacttcctgagcattgccatgcacgctgcaggcatggccatcttgagtcctcacactgcccgtggcctaggtggggtcttcatccccacgttgcagaggaggaaatggaagttaggaaggttaggtgacgtgcccacatgagtggtgtaagcatggttcccgccctgggctctctgaattcagtattgtatgggggaggctgggaaggtgagttagtactctccgcagtgagaacctgccttggctcccctcccctcaaggagttcatagccgtgggagggagggagacaagaactgttggagacaagaactgttagagaccagagagcaagggcgtgatgtggtctgcagggaggaggctgtctgaggcagaaccgggtcagggaggccatggtgcgggtaccctccaggcacggcatttggcctgacttttgaggggtgcccagggttggctacatggcggggcggaggtatctttagtgggggaacagcgttgtgccaccaggaggggtctctgtctcccaggtagaggaattctccatggtgagaggtggtggtgggggatggtctagctgtccactcttgccccctttcggatttggaaggaagccccatgctgggtccacactggtatggcgtattaattaggcagctgctttgtctgggagggggctttgtgtcgagtctccctgaatgagcagggctggcgacagttgtcaaaacacatggtgcttggtcagagcccccgtagaagccccttgtcctccgcatggcctccgcctgcacccggggcgtggaatgtgctcttgtgtgtccctggctgtctgcttgcttctacactggcccctgcagatggagggggtggggtacaggggttcctataagaagcagacacttggggtttttcccaggtcctgttgcaggagggtgcgtgggctggtttccctgaaggcgcctgggcgtgttggtgttaactgatctgagatcttctgtggccctgatgtctatgagcatgccccagcttgcagggggctgagtagccgggcaccaccaggaggctgcgtgccctgtgcttgggtgtacccatgccctgtcagcatcgttggtctgttagggtcagggacttcggcttcttgtttagtaccctccatcccttccagttgatcatcagaaacattctccttagatgcggctgcctgaccccggtgagggggcctgcctcccacttgccttccagcctcctctaagctgcactgagtcttaaaaataggaaggatagggctgggtgtggtggctcacgcctgtaatcccagcagtttgggagaccgaggcgggtagatcacttgaggccaggagttcaagaccagcctggccaacatggtaaaaccccatctctactaaaaagacaaaaattagatgggcatgttggcatacacccgtagtcccagctactcaggaggctgaggcatgagaatcgcttgaacccaggaggtagagattgcagtgagctgagattgcgccacagcactccagcctgggtgacagagcgagactccttctcaaaaaaaaaaaaaggaaaaaaaagaataggaaggatagggcatggcatgttctccaggagacagagggacgggggcatcttgcttgcaggaagccaggcgacacaggcgtgtgtgcagggctcagagggtctgtgttcctggcctttcctgggagggcttgctcttgggctgcccaaagctcaaagagagactcgaggaaatcctgcatttatgggagcttttcttttcctgccactttcctgttctgggttgtatctgtgcacgtgattggaacgtagcagcctgagctcctgcctgaggagagcagccacgggtcacggaagccagggtccagctggggcctttgggtctagctggcagatgaagggctggccttcatcaagaaaacaagccccatgagggcaggagcccgacctgttcattccacaccaccgagcctggtgctcagtcatgtttgtgtgactgagtgagccggcggcgggctgaggcgcttttgtctggtgtgcgtactggtctcccttgaggcagcttgggggtgtggaaaaagcacatgttgccaaaattgacagacctgggttcaaatccaagctctgccacttaccgcctggatggtcttgtgatgggtcattaaccaccccgagcctcagtttcctcacatctgcctcccggggtcactgtaaggatcagaaacaatgtgtgtatcggccatgtacggtgtgtgtcggcgagtgctccgtggcagctgcggttctcctgaggtcagagctgcggccctgcaggtgtgtggagagagccccgacagccaggctgactctgcgcactgtcctttgttctgcttccccagaccttcacggcatggtgcaactcccacctgcggaaggcaggcacacagatcgagaacattgatgaggacttccgagacgggctcaagctcatgctgctcctggaggtcatatcaggtgagactcccagccacgcagtgcggccgagccctggcacaggtgctctgccacagcggtccccagagaccctgcccacccagctgtcccattgctcctggggaggagagggcaccccttaatagctgcacggtggtctgatgggtggggccagagtggcctggtgggccagcagaggaacctgcttttggagaacagaggagactctaaagcctctctccctctcgccctctctccctttctctctctctgtctcgccccctcttttctctttgtgcacttctcaggggagcggttacctaagccggagcgggggaagatgagagtgcacaaaatcaacaatgtgaacaaagcgctggactttattgccagcaaaggcgtcaagctggtctccatcggggcagaaggtgagctggaggtggggcagcgagggtcctgctcggtttctgacctttaggctctgaagcacaacatctgcatcctgaagagaagttttgttggtggcagggcgcttggggcactcagagccccagtacatactcagcagtgatcacaacaactgctcttgatatgatgctgggcccacaagctcccccaaacccttggaaaaatccggtgggcgcagtccaaatctaggaagtgcaacccacccaaccacgggggcgacggcttctgcagggggaggaatggttttgactcggactcaggtcgccctcactggttctccttgtgccaggctcagcagacagtgacaaacatgtgccatggcctctctctgtaccaggaacacctttctcattatgccctgcccggtatcagagaaggactggaggccccatgtcaggcattgggacagggagtgcacggccaaaggtcagtgcctagactttgccctgtgtgcatgggcttggagaattttgcctctgaccaccccaggatcctcctgggccccacgtagataaccaggaccacagtccactacctgcaggccctcactagagcagcaggctctcagcaggggcccctgggttgagctcccaggcgcttttagagacaggcgaggcctgatggagccccagcagcatgagctcgcagtccactcattagtcagagtaagatttcttcaccctgacatccatgttgtcccagcttctagaaaaacaaagtaaactaattgccgttaatgacagggctctgagagtttggccaagactccgggccagaatgtgtgtgctgagttccaaggctctgccccggcccaggacctctgcgatgaggggtgccaagccttgcatgccacagtcgaggtggttggtgtttgtttaaaaaaatcacaacccaaaaattcagtcaggccctgagattttctgtccttgcatgggtctttcctccaggctctgttccagccttctgcttctcacagctgcatttattttgctcaaatgctagtctgtaaatacagaaggggttagaggagagacccatgtcagtcatcagttttcatttggagaaaaacttggtctaaaaatgttctctgttcatgcccaaattggttcactcccaatccctgtgactgtggggccttggaacaaagcctaatggaggcgttcctggggctcaaggcacctgagaaccccgccccaccctgtccccctgtccttccacatgattgggcattcgcgggagcattggcttcccgtgggggtgatgagaggggccggaggcacagctgcaggtcagagaagcagctggtggatgtgtcatgagaaacgccatcctcctctcctcaccggaactccataagccctccgttaccagctgcacctgtacttgctgagccggggagctgcggccttgcccagctctgcaggcccggccctcaggaggtgcacagaatagatttcctgaggctcgagctgcctcgctgcactaaggggcaggtggtgctgctcagtttctgggtctggggctctgaaccctaggacagggtggacactgggtccctcccctgtctctgggcagcagaatgagcatatttcctcctctcaaaacccgaaagctgtggctcatggacacccccttcctctgggtgtgtccccgggggaaggtgagccccatcttctctgtgacctctccacctgcttccaagcaagcctgccctggagtattctgctcagaggtcagtgagcagggtctcctgtggtgtcctgggcctccagctctgcagttagctttggaactcacccctgtgcccagcccttccccgagagtgcttgcagcagtggcgcccctctgtcttctttggaagccactccatcatgccccttgcatatggcgtgttgacaagttgggaggactgccctaggcacggctggctgatggactctgggatgaggcactgccttctctcacccagccgcagacacacagctgtcctgggccttgcagagatgatttttctcttaagttactgaggctgaagaaggtgtggtccaagcccttcttttgagaagtttcagcaatttttttttttttttttttgagatggaatctcactcttgtcacctaggctggagtgcaatggtgcaatctcagctcactgcaacctctgcctcccgggctcaagcaattctcctgcctcagcctccagagtagctgggattacaagcacccgccaccacgccaggctaattttgtgtttttagtagagacggggcttcaccatcttggccgggctggtctcgaactcctgacctcaggcgatccacacctgcctcagcctcccaaattgctgggactaaacaggcgtgagccaccacagccggccgcaaatgtttgtttttaggttagttcagaaagcgtgcagtctggcctcaggcccgtgctctccccttcctgacaacacagcagccatgcttgttcctcactggccttccaggcactggatccagtggtggtcagagcagccccgccctcacgagggcaggcagacagtgaacaagtaaacagcccgaccaacatgtgatttcactagtgatgccttggggcagcacaggggccagggagaggaactgggtggcgggttggggagctccttgggacgggcagtcagggaagccaccacgagaggtgacacaagcagaagcttacacgatgagaaggaccagccagttgagggtcgcaggctaggggcgtgctttgtgagtggacagagcgtatcaaagcaagaaagagcctggcttgcccagaggatgcagctagagaattccagcaggatggcagggcctgggccttcagggcaagccctttccctgtgggccaggcatggtggctcacacctgcaatcccagcactttgggaggccaaggcaggaagatcacttgagcaggagtttgagaccagcttgggtaacataataagacccagcctctacaaaaagtttaaaaactagcaagatgttgtggcatgcgtctgtggtcccagctactcgggagactgaggcagaaggattgcttgagcccaggcagtcaaggctgcagtgagctatgactacaccattgcactccagccagccagaccctgtctcaaaagaaggaaaccaaccatgctcgctgctgtgtcgatgtggattatgggcgggaagggtacataggaggcagccgcattgagctctggagatgacagtggcttggtggagagtgtcggcagtaggattggaaggaagtggacagattcacaataaacaataatgtagtgcacatttgctgactgcgagatgaaaaagaccacctttgccctgagagtgggggcccggggtgcccccctgtagtcaggaggtacgcagattacggcagaaatgtacagagcactgagagttgagagaggtgtgaacagaggccacacgcctgggaccagcctcttggaggagcggttttttgagttgggtcaggagaaggagctggctgcggggccagggacccttgtggccagaagcctgcaggcgctcagcagcaggaggctctgggacagtgctgcctagagactgttccctgcattttctcctgagggaggtggaggaggacaggcctgggagatgcaaccagggggtggtttggagcctttctctagatggggctggaaggccaccttcaggttgggcggaggagcctcactctggttttaacgaccttctgccctctgcccccttccctgtgtgcagagattgtggacggcaacgcaaagatgaccctgggaatgatctggaccatcatccttaggttcgccatccaggacatctccgtggaaggtgacagccacctgtactgcccccgcttcccacctgagtcagggcgggttagaggagagctgaagtgtgatcttcatgcttcaagcctcttcctgtttccttggggtcactcacagggcctggcccttgcaggggtagtcagtgggtggcaggtgaagggaggctcctcccagctgcctgcctcttggctccagtgccttccgagtgcctttgctctcacagcctcatctcagtggaccctcacgccaccctcatgagatgggctaggatggctgggcccgttttacagtccaggaacccaagtcccagaacagactagtgagagagttgggcctgggcctggttctctgtctgcttgacatccccatccttgaaacttggcccccatggacccgttatgagctcaggccgtccaggaatggacaatttcgcttccctgcaagcacctgtgtgcacacaggatgggcagagccacctgggctagcgtgcaggggctcccaggtgccaggtcgcagtgatgactgggagagatgtgcttcctgccctcgaagggctcccggtctgtgaggacagccgagctatccacggggaacagaagggccccctaggcctctctacagctggtatttcaccttgttcaaaagaggccaaggccggtatcaagggcctgtctgcagtgtgttctggtggtgaaaggcacaggcttggtggccaggcacatggcacagattcaggccctgacaccaccacctcctggggcagccctggtcaagcgactctcctcggggccgtgaggattaagcagggccgtgtgtcctggcagttgggcctggcagcatccgtctgcatccggaatgggagtggctgtcccgctgctatcactgctgctgttgttaggacagatatcctctccccttgggtttcgtttgaccccaggcctgagccgaaagtcccatccaacttgggctgagttctgagggtttatttttgagccagtgctcactgtctttgtgtgttttgcagagacctcggccaaggaagggctccttctctggtgccagagaaagacagccccgtataagaacgtcaatgtgcagaacttccacatcaggtaagcgccagtcctggtcatcctctcctttcctctaggaacctgagatccttcctcccacctgccctgtttgctgtgtttttgtcgtggtctgtgagatgccagccctcagtcagcccctccctggccacgggccctacaagcccatgggaaggtcacctggtcctctctgaggaagaggaggcagtttcccagccatcctggctgaaggcagtaaggtcagccctctcgccggcctaatagaacgttcttcgtccccaggcaaggtgactctcagaagcaacaataaagcttttcatttttgagacagggtcttgtgctgtcacccagactggagggcagtggtgtgatcactcatccctgctgccttggcctaggctcaagtgatcctcctgtctcagcctcccaagtagctgggactgcaggtgcatgcagccacacctggctaatttttaatttttatttttagtaggaacagggtctccctatgttgcccaggctggacttgaactcctgagctcaagcagtcctcctaccccggcctcccaaagtgctgggactacagatgtgagccactgcctgcctctggcctcttcctttattttgacagctcaggagtgaattgtttttagaattgctagtaaatttagtgttggggaaaaatgtactctgtggctgctaagatgaacaagcctcagctccaccatgaacctgcttccctcagggtgagcgggagatgagacatgtccaccatccccgtagctgaggcgagcatgggcactgccgcatgaggtccagggggcggcaagaggcaggcctgcctggtggttgggagcactggctctgggggcggtcctgaggtcagatccggtttgccttgtggctccaccctctgagtctcctggatggcccgcacaggaatgaagagcagggcctcatggggtttgcagcggcctcaggctctctgggacccttgctgggtacagagggcttttcccatcgtgctcaccctgatagcatgtggtccctcccttggtcactcttctctgtgtgtcttcttttttttcctgccactaactgactgaatctttctatagtttccattcattttcttcaactagtaagtatctagcatgcccgctgcatgccgttagtggagatacagtggcacccaaacaaagttcccatttgtgggaagtttacaccacagcgcggggaccagctgttagcacagcggccagtaatcctgcagcataacttcagtgagaagtgctgcacaaagacagggaagtcagatgaagaaagttccctgggtggcctttctgaggaggtgacatcgagcttgacctcagagggaaccaacccttagagggtctcagggaggagaatgtgacccatatagcttgtaactgaccaacttgtggccttggggaaggtctctttcctccagagaccagcatgccaagtgaaatcctggcatttagccagcccacggactggccttcctgtaagtcaggtccgccagggtgtggaggccacacagcacaaacaccagcatcctgcagtggccacctcccccgaagcggcctgtctggttcagggcggcctcccatggaaggtgctagcagttataaagcagttgtcaggagtcaggcactgatccaagcatttactcatttaatccgcacaacagccctatgtagcaggtatgtcactatccccatcatacagatgtggaaaccgagatagcctggcttacccgaggtcacactgtcagtaggcagaagagtcaggatttgatcacagactgcctggccccagaggtcatgcttgcagcctctctgccacactgtctccatgcagtgcctggcacaggccagactgcagtgaatgggaattagtcactgctgtgggtgcacagggccatacggcactctcatgacagtgagcgggccctcctataacctttgcctttccttccccagctggaaggatggtcttgccttcaatgccctgatccaccggcacagaccagagctgattgagtatgacaagctgaggaaggtgagtgtctccagctccccttgatggcccacagacgtgccctgtctgaccccctaactccgggtcaccatccccatgcccttccatcgccagcctccagatctgggttctgcacgcagatgggcagcctgggagagccttgtgcaggctctccgcaacccctggctcggtggctgactctcacctcccttattcccctcgtggactgtccagtctccctccatggcactgcaaccaacccggggttatttaagggcctggccagccatgctttataactccccttcctcaatcttctggattctagaacctcctctgcccaaaggggcagagggcaaggaattccaaaccatcaccacaagcccatgttgcccatgcagggtcctgctgtcatttgcctgtacaaagcctgtatggatccaggccctggccaccagaagctgccagcctcgtgggggaaggcaggacaaaaattgtgtccaaagcaaagcaccacaccaggccgtgtacatgtgctcaggctgaatggggtggcagggcatggggtcagatcagtgctgcggaggaggctagtgtaccccgagcgagcaggagccaggaaaggtcccggaagaagaggcagcttagagccagaggagggcttcctgggggaggcaccagatggcacccagcccgttccagccacagtgagcaagagagctgggccccggccagggagagttggagtgcagtgggctttagtcctgtaagcagtggggagcctgtgagggggctgggggacactttagggtggttgggacctgggacctctcggtttgctccccttacccagtccccagtgctctctcaggcctggcccacatcttccagtcaatgtgaaaaccaggttttagggcaaggggcttaagctagggtctgtgggtggctggaaattgtatgaaaagagtacacctgcatttttctggagaaaaagccctggtttgccccacaaagatttcacgaggcactcctgtgagtgggaattgaatttatccaggcggtgccctcccgctcacacatcacacgtggctgagaactgcctgaagaaacccccaaccctcgccctcccgggtctctccctctgggccagccctgcctccctcctgctcctgcaccctgccctgacggagttcttgttgtccccacttgcctccttctaggacgaccctgtcaccaacctgaacaatgccttcgaagtggctgagaaatacctcgacatccccaagatgctggatgcagagggtaagtcatctcttctgttcagccaccactgtgcttcctgatggccttttctgtccagggctggcctcgggcaaggggctgtgggcacatcagagctttgggtcaccttggggagctggcagagccagcaagaagggctgaatgattctgggtgaactggggacagccatgtcgccctgggagacagagcaagggtagcctgggctggccagatgccttcagggatgaagaagcgtatggggagggggagctgaaggatcaactctcctgagggtgcatctcctcagggcccaggaagggcaaggtggctgaggaggggtgcttcaggcttcctgcgagcaaccctggcctctccctccctacctgcagcaggcatggagtatggagcccgacaaagtggagtgttttgttttttccttttccggctttgctccatttcccagccatgcactgccccatttcctagccatgcactgccccagctgggacctgtgtctctggcctctggtggcccttggagttgactgtcctgctgctccttgaggccattctcagagagaggaagtggcctcattttaatccgcttcccacagccttgtcctttccagacccatgggagagggaggggctgagggtgtggctgagcccacccaagtcacgcgtcactctgcaggtccctctcccccaaggccgtggccttgggagcccgtggatcccagtgagtgacgcctccaccccccgccctactcgggcagtttaacccttgttgttcacttgcagacatcgtgaacacggcccggcccgacgagaaggccataatgacctatgtgtccagcttctaccatgccttttcaggagcgcagaaggtaccgagcagggccaggcaggccctcctcgccgccaccgcgcaatgccgccgctgcctctcgcctcccgtgctcacctcatttctcttgcagacggcagtggcctctctccaactggaagccacccccagctccctggcgttgctgccccctcagccttagctcacacacctattgggtacctcatctgtgccaggcttttccaggcattgaggatgccctggtgactgagtcagacaaggtccctgttctcagggcacttccatgctagtgggagaaacatacagcaggcctgtcacaggagtggaatagagaaaatggggccagatgggggacagagatggctggggtgaccttcagctggtgctgtcaatgtggaggggtgaagtgagcaggtacttgcagcaggagctgctagatgcaggctggggcacaggtgttccaggcagagggtgaagcactacgaaggccctgagacaggaagaagcttggcgtattcagggaccagctagagaggagtgagtgacacgcagtgatgggtcaggcccaacaagacccttgtggtgtgggataagaaattcatgttccactctgagggccatgggagccccttagggtcttactccgtggtgggagctgctcactcacattttcagacagatcatttagcaactgactcctccaacccaaaacaaagctgcctttatagggcccacagctagtctgtctccagcccaggccggttagaaaaggaatgcaccctattcggactccacaaaaccccgcaaggcatgtccacgcaggcctggggctggcttccagtccagagcaagtgctcttcctcctgcatgagcctcaggccggcccggccgccctccctgcgtctttcactctctcctgcctctctctctctttctctctctctctgtgcagatattgtgggcactctgaggccagatgagaaggccatcatgacttacgtgtcctgcttctaccacgctttctcgggggctcagaaggtgagctgggccaggcacacctcgctgctggggctgcagacctgccttcaccaccgcccttgcatcaccgctggccatctgtggttggagccctggccaggccgtgggccgccacaccacacagactgaccctgccggcctctgactcggaaggtcccctggggcaggtttcccgcctggccggtgctgggcctgtgctgaggagtcacagacctctgtttgaacacagcccaccctgggaggtgggtggtggcatcctaggctctcaggcggggaaactgaagccctgcattacagtcaatggcagagctgggatttgactgcccggcgttcccactcgccctgtccatcatctgcaccagggctgcctgcctgcccctgccaagcccttcgtggggagcactgggctttacccgttttgcagctccttcctgccaggaaaggctcagcatgtgcagcccaacctgcactcacggtcccagccctccagaggccaggcagagcccacagagcttgcgtggcagtggccgccctcctgggcccagctgacctcatgctgcctcacagctcctgccgggccctcagcgttcacgcagaggcccaagcactgctccccccgcttgccttgtggtctctgaagtatctcaggcagcattcccgatgcctgctttgaagtgtcagcagttggcacaggttcagaggaggaggcagaatcgattcttgtttactgaacatgtactacacgctaggcaccctccaaggccttcacatgcacaggcttccagagggtccctgtgcacacccccaggagggctaggcgcagttagccccatttgagagaggaggaattgaagtttagggaaacagctattcctaaaactagaaggggggggccgtaccttctgtggacccctgctttgagcctcccaactagcaggtgcattacctaccgtcagtctggcctggccccactctgccacctcttggtactgtgaccttgggtgggtcacttgacctcagcttccccacctgtgaaatgggcatcgctgtagttcggtctcacaggattgttctgggcgtgaaacgagctcctgcaggcaaagggcttagcacagtgcctggcacggcagctgccatttaggcagctgccagggagccacagtggtggggagtgtggttcttcccagcctcgggccagaaaggcctcttcacctcctcagcatgcgattggagcttgtgtttggagtgttctgctagagggcacgggccaggagggtggagggaggacccctgacccacactcccgcgggagggtgggcagggaccagcagcaatggacgattcgtcaccacagaccccaactaacagcatgtttgccattggactcacccctacgggccccgaaccagccccctgcccaccacatggcctcaccagattgcttttctttctacccacactgctcccctgtgcttagggctgaactccagtctggaggctctgagggattttgggggagcagggactggcaggcaagcccaggacagtatgggtgggtgctgaggcactgggcctggaggcttgtcactggcccctctctgagggggtagtggaggcccggctgcagggcgctggctggtcagaaaggaaagtgctgggtccctgtgtgctcctcaggacagccccgtggtgctgctcctgctgcctcgtttccccagagacccagtccaagctcttgcaagagtgctctctggggttcatgttttataaacgcagagtgaaccccaggtctagcgccagtgtgcccattctgtcctgagatcatttatttctagtcaccgaagcgttcccgcctcgttcctttattcactcactcattcagcaaccctgaacaccgccagtgcactgagccccaagctggatgcgggaactcagcggtgaaacatgattcccttgccttgcggcagccccgtgctcacagagaggacttgagtttcgggtgccagttgtctctgccaagttaggagtcagggactgacctctgtgacccccacaagctgcagccctggctgtgttttccacactggcctggggcccatgttcattggctgaggaacctcttggacctcatctctgaggagcaccgcctggggccctgggtgtgtgtcccgcagcatggcgcggggtgtgcacgtgcgtgtgtgcgctcacacgagcaccggctgccgcctccccgcctgtctccaggtgccatgtgtggaggggagaggctgggcgtcgctgcctgcagcactggctctgagccgttggccaagcctctccattttccttccccatcactctgtagaccctcctcactctttctgttcctgttctgttgccgtttcaactcctcctcttggaccctttctgtgcttcctgaaaggtacctggtctctctctccccgtgtgcaccccctgcctcctctacactgttcactgccccctagcaggacagggcaggacgctctcctgtagttcaggcccagggactatgtccaccactctcaccctccaaagccccagcacttttctgccccacggatggtgacttctgtcctctggagctcctattaacattgcctccaaggcaggagagtggacaggcctgagtgtgctcctgtgcacggaccactaggctcctccgggacccgggcgcccctgctctgttgcccccagctctccagctctcggcttcccatcctttcaccttcccaccgggagagactcctccgcagtcttaggtccaacgcagccgacccgtccagcctcaccctcctctgtgtggggcactagagggtttgcgagcagcagtgggagggctccccaaccctcctcggtgcctccagggtctgggctttctggacccaggggcattttgcagtcagcagtgaggatgccaacaaggcctattgggacagggcaccatctcactggagctgtgcttcctctccttcccctctgtgaggagttccgtgggccatggaccagctgctttcaagggacgtgcccgtcaggagggagggtggccagcccccaggcagccctgactgtgtgctcccctccaggctgaaactgccgccaaccggatctgtaaggtgctggctgtcaaccaagagaacgagcacctgatggaggactacgagaagctggccagcgacgtgagtgttcccccagtgaaagtcagggccacctcattatcctcagccagaggtcactgtgactcttgcagggggaaagcaggtgtggcagcgagatgacctagaaaaggctgcgtggtcacagaccatggcatttagccagctggtgtgtacacgacctctccgtttgcttccacaaggctaagggtcagaccggcagccaccttgccagccagcccctgggctcccgagcttgggttcctacagagatgctcagggacagtgtttcctgggcacctcagtgctttagaatcacctggggagctttgtgaaagcccctcttcccgtgccctggccctggagagagtgattcagaaggatggagaggggcctgggaaccaataggatagcaggccctgtgcaggtgcttaacgagcagcccagcaagacgggaactcggattatcctcctttccaagtgaggaaactgaggcccagggagggtcaggcacgtgcctgctgttacatgactagtgggacagagagctgggcttcacccaggcagccctgctctagagtccaaacccaatgcttcagttggaaataagggtggttagtacaactcttctggaggctcttcatttttgaaatctccatatttaaaaaataaacgtaggctgggcgcagtggctcacacctgtaatcgcagcattttgggaggccaaggcaggtggatcacttgaggtctggagttcaaaaccagcctggccaacatggtgaaaccttgtctctactgaaaatacaaaaattagccgggtgttgtggcacacacctgtagtcccagctacttgggaggctgaggcaggaggatcgcttgagcctgggaggcagaggttgcagtgagccaagattgcgccactgtactctagcctagcgacagagcaagactccattaaaataaaaataaaataaaataaaatttcccaaagagcagtggtttgactgctcatctagaaccagtggttcccagattttgcaatctcatagaccaggaaaatttgaaaaactattggatgtccaacctaagagggccagctttttattttgccaagttacggatgttttaaaaagaaacactaccatctgttaccaccagcacttctaacaccaagataaggtaaaaaggttattcttagaaccccagccattgccaagaaagggcagctggcagcacgcctcacaatgtatccacacagaggtatttctgtctttgaatttctcactttgccagaagttggcatttgggaaccacttctccagcttgtccgtgctggcagataactgattttgtacttctagaattgttttattatttttttgagatggagtttcactcttgtcacccaggctggagtgcaatggcacgaccttggctcactgcaacctctgcctcccaggttcaagcagttctcctgcctcagcctcccaagtagctgggattacaggcgcgcaccaccacgcccagctaatttttgtattttttttagtagagatggggtttcaccatgttggtcaggctgatcttgaactcctgacctcaggtgatccactcacctcagcctcccaaagtgctgggattacaggtgtgaaccagcgtgcctggcctagaattgttttagaatgtccaactgtttgttaccctttctcactccattaaagatctgagtagttcctaaaagaatatgtttgtttctttttcaattttattttctaatttatgtcccaggcccagtgcacatactggcctagccagactgagccaggtgggcttgtcggccttgcccttgaggcacttagtgagcccagaagcagtcaggctctcagcatggagctcagtgaagacagcggcagtggggcatgtgacagcatggaaagggacctttttggcgggggcatgggagtggaggtttcccctcttagacctgagggaaaagactaagagcaaaggcatgggccaggcatggtggctcacccctgtcatcccaccactttgggaggctaaagtgggattgcttgaagttcaggagctcaagaccagcctgggcagtatactgagacccccttctctataaaaacttaaaataaaaatcagccaggctcggaggtaggcacctgtagtcccaactacttgggagactgaggtggaaggatggcttcagcccgggaggttgctatgatcatgccacttcactccagcctgggtgacaaagcgtgaacctgtctttaaaaagaaaagcacaggcaggaacaggaagtaacaagagaacagtacagtgatgcagggacagggagggagcccacgctcccagagttccaggttgggggttctagcaggaatcgtggagaagttgggctggggagcaggggtaaccccctaaggtggggccctcaaagatccagatcccatgtgcccataagctggggggcagcccgtcagcactctgagggtcccccacaaaggccacgctggcttctgtggcccacagctcctggagtggatccggcgcaccatcccctggctggaggaccgtgtgccccaaaagactatccaggagatgcagcagaagctggaggacttccgcgactaccggcgtgtgcacaagccgcccaaggtgcaggagaagtgccagctggagatcaacttcaacacgctgcagaccaagctgcgcctcagcaaccggcccgccttcatgccctccgagggcaagatggtctcggtgagcaccaggattcacatgggagcagctgtgaggggcagaggcagccctagaactgcctgtgggcagtttggccagcgtaatctttcctaagttgttgatgtcctgtgggacatggcatggcctttcggatgcagtggtcggggaggggtgcacttcactcggcattgtgctcccctttggccctcactcactgtattttacacccagggttttatacgcatcccaaatccttgccacgggttgtgtgggtgtggagtggtgtgaatttggagccgtggtctgccatgatggcatgaccgccatgtgcttgaggcccttcatcagcggaggggcagtgcgccctggacggtaccacctccccatctatggtattcatccattcattcatgcactcacccgttcacgcattcattttgttaatccagaattgattgtacctgctgagtgctggggggccctgtgtaggcatccaggtataatagcaaagcatgacacagacatgaccccagccaagttctgccaccttcccatcagcatcccttggagacatccccctgggtgcctccacttccttgtgatagccctgcctgctcctgccctgccccaggacatcaacaatggctggcagcacttggagcaggctgagaagggctacgaggagtggctgctgaatgagatccgcaggctggagcggctcgaccacctggcagagaagttccggcagaaggcctccatccacgaggcctggactgacggtacggcccagctctgccccactctgcccagccccgctcccgtgctcccctcctgtctctcaggcatgcatgggtgtgcacacacagccccctgccacgttgggtctgtttctcaggtgccctttcttgctgcttgggagcatgtgtgtgtgtcagaaatgctgctttagagccaggttcagtggctcacacctgtaatcccagcactttggcaggccaaggcaggaggatcacttgagcccaagagtttgagaccagcctgggcaacatagcgagaccctgcctatacaaaaaaattttagaataataaaattagccaggcatagtggtgcacacctgtggtcccagctactttggaggctgaggtgggaggattgattgagccagggaggtcaaggctgcagtgagccgtgattgtaccactgcactccagcctgggtgacagagcaagaccctgtctcaaaaaaaaaggaaagaaatgctgctttggattccttcagccccagaaagcagggaccattcaggggccaggtcctctttgttgcccagtctgccctcgcctcagaggtgggaccctgtcagtcatccaggaacacagccaagccccctccagcacttcagggaagtgaccttacacccatctgtttgtcccctctgcgtgtcttccccatccagggcgagtgtgtggggcaggcctcttccatcccccgcaccctgtgttcagagtcggcttccctctcccacacctctgtgagcgtggacggaaggctggggagcccatgttcactggcacgtccctcaggctagaggagggcctgcctcctgggcctgctgccggaccacagccagtgctcaccctcagacagtgctcacccactgccttcggcccacccttcagcatggcccacctgtgagctcctcccacctcccatcccttcccagagcctccttcccgggcctggctccccctgcaggagcgccactgtgctttctgttctcggcagccctgcagctgcctggccgttggctccagatgtgggatttcatcacgtccctggccctcttttgggtcatgccaaggttgagatttcagatcccaggggtctggaagccttcagaaagctgccagtgcctgggagagccacaagagccactcacaggactcctctcccactctggccaccaccttcccaacacagtctccctggccctccggccgccactccgcccagctgagcccttccttgcattcctgagtgcattttctcacccctccccaccctggcccgcatgcgagtgtgcagctccacacggcctgcagccctggccacggcccagcttgtgccctcctcacatgagctcagctcgccattcccgcggcagctgccagcctcagagcagcccagcccctttgctaccaggaaagagtgcgagtgagagagtggatagtgagggaggaagggcctggccaggccgggtgccgcacttccctcttgcctggcagaaaggcacccatgtgaggagagcgtgttagcaccgatgccatcttgtgtggttggtggcctccatccattcccggattcactcattcgttcaacagacagctcaggtggctccagccgtccttatccatggaggcctgggcgtcgccctgtggctgaaccttctgggggtctttctgcccacccatcagctcttcagtccctctacagggctccatgaggccctgcagatggtttcctgaggccaaggggctgggtgtggtggccccactggcattcctcccctgggaagggctctggggcagccttcacctgaggtgtttagaagccagctcagtctccggccagggcccagctggttcagcggcctccacacgtccctgccccacccctacctgactgggcatccacgcgggtctgcccatggcgtctgccagagcccccaggcaggctggcctactaattcccaagactcagagcctctgtcctctcaagtagcagttacgtgaaacaggacaggcaggccctccacaccccagggtctggtcgtagcggcctcctccgccctggggtgggtgggccaccttcactccacacccctcaccatcccccacagcccgcagcgggagggtcgtcgtggatgcttctctgagggacttgatttcctgggaatacgaccaaccccgaacgaccccttgtccccactccagttgtcccttggcctggatcccagatagctgtggcaatggtccgctgcccacatcctctcggtgcacccttgccaggactctgcggaggcagagggagatgtcacctgctgtttctggttcctgcccctgggagaaagcagttggagaagggaattgcaaggccgccttgtggctgagcctcctgccccagggctgcgcagcagggccggtggagccagagtctcccaggcctcccacttcttggccatcagtgccagagccgatcctgtggggagtctggtaggtgcctgacagttgagactgggagaggctgaggtgaggctggtactggctccatgcctgctgtgctcgaacaccacctcactgaaacttgagaatagttccatgccacacaggtactggggctggccccattttacagatgaaggcacaggcccagagaggcctcggtggctgcactgggcgggcagctgtcaggtgctgggacagagctgaggggatctccgctaccacttgggggaagcccaaggtggtgtgcctgaggcagggcccctgtaggagctggggtgcagccaccttcccaggctggcattttccctgcggttccctaaagaccttcacttgcttgcagggcttccttgagctttggttctgggatgtgtaattagccaggatcagggactaataacagcgttcctcctttcctttaaagggcctgatggtgggcccgccccaatgcacacaggacaccttaggacagcgtggggcacttagacgtggagaggaccaccacctgtgcgggtgcagggtcagggtcctagaagaagctggctctgatgcttccccttccccaagcctgctgggacatgggctttgaccccgggtgcttctccggatcaaagccctccagaaacaggtgctacctttctaagccgtgctaccacggcccgatttgtatggtttcctactaacaaaagttgctaagtttaggacacacaggttgagatggaatctctctctcaggctgagcaaccctgaagtgtccatccaggtccatccaggttacagttgggcttagagatccctggagggtacggaagaagattctggaagtttccatgccactgtcattggcatggaaggatgtggggtccacagtctctctttccctccctctgcttggacagcccctccagactcctgccccacagctgccgtgctgtggtctaagcgtctctctgctcctaccagggaaggaagccatgctgaagcaccgggactacgagacggccacactatcggacatcaaagccctcattcgcaagcacgaggccttcgagagcgacctggctgcgcaccaggaccgcgtggagcagatcgccgccattgcccaggagctcaagtacgtgcgggctcaggacactatcatcacctggctctcaccacagcctgcccagactggtggcggcagcacgccgaggcccagcctgcctcaaggcctggaatagggtccccagtgccccaactgcacctccttccagaagccagggaagggccttatgggatgaggccttttgcccatcctgtctcag

SEQ ID NO: 15371 - DNA, 82407 bp, Homo sapiens
gcggcggaatggtggactaccacgcggcgaaccagtcgtaccagtacggccccagcagcgcgggcaatggcgctggcggcgggggcagcatgggcgactacatggcccaggaggacgactgggaccgggacctgctgctggacccggcctgggagaagcagcagcgcaaggtgcgcggcccgcgggccggacgggctggaggggcttttctgagggggcccggggaggggtgggaggtcctgaaaggtaactggagcgtctgtgatgggaacgggggggtcccgagaaggaattggcgggtccgggaagggaattggagtcctgaggaggaatcgccgagctagaggaaggaattgggaatctgaaaagagaattggcggctgggtggggaatatgggagtcaaataaaaggaatcgggaaggctgatgaaggatttggagggtctgggcgtgccattaggggaaaccgaggagatgactgggcaggctgaaatggaactgggatccgaggcgggcttgaagggtcggagcatgggttgggggtgctgggaggagaatcaggggaggctgagaagggaatttctgggtctgggaagtgtgaggaggagcttgagtgtggaggggttggttatttggagagcagaaagatctgaaggagattggaattgggggagcctcaggttgggggagttataaaggggatgaagaatcaagtgtgaggatggagtggagattgtggggtctgaagacgggtgggaagactagggaggctgggaagatgaaaacaggggctaagggtagaattgagcatgaaaagacatgggcttagggtgtgaggagggtagaggtgccaggactgggggtctgaggagggtggggtgcggaaggaagaagttaaggggcccgtgaatcagacgtttttgaagggggtgagatttatttgtggtgccctgttccaaaggggagaagattaagagataggaggaataataagaggaattgatgagggatggagaagccgaagtagaggggatacggagagtggggataatttggggagggatttctaaagaattgatgggaagctgaaaagctaaagcgttggagagaatgaggaagtgtagagggagaaggtgagatcggtgggagggagggtgagctggaatggtggataatgggagagaggttcgtttaggaaaatgaaagtctcattagaaagggaatgcgtaatggatagactgagaaaggaatttgaggagggggtgctggctcctggaggtgcagtcccgggactggagagcgtgtgtgtgtcgtgcaggcagaatgagtttggggaggaagcgttgagagtgtccaggaagaattgtgtcttttttggagagaccggaggtaggtgaagggatcctgaagcagagactgtgttcaggtggcactgtttttttggggggcggggggggcaacttggtagggccccacagcagtgaaaaggtgatcagaagtggagtgggatccccgagcgaggtgtcagtgtctgtgggggggggataaatccagtgtggttgaggggggagctctgagtgtgtgcaggaagagctaaagaaaggagcgtggtgagtgggtgtgtgtggggggaaggggttgttcagaagttttgtgcgtgaaatgggtgggaggtacttgaagttggaagcatttcgtgggatctggagatctggattttctttccagatttgttactgattcgctctgtggccttggacaagacccttgaactctccgggcagttttgttatctgcaaaatgcaaagggatccgagggttccctgcggtgattctgttaataaagagggatgtgtgtagagttgggactttggacagggctctgaaggtttgggagagtgagtttggtggagatttttcaggaacaggctacagggctttgagtggtgacctggcagagtggggagtgactggaagcctctcgagggcgcgagttggtggccaggagcttggcacaggcagcctagcccaggctggaggggaaagggtgggaagggtggaaggagcagctgttccaaggcagcctgaggtggggccgggcataaccttgggtccattaccagcgttgcttgaatttcctcatccgtagtaactgaggggcatggcagtggcttggtgggaggggtgtccttatccgtggccccacctactgcaggatggacaggttgcgatagttggcataaattcactttttgaggggaaggtgagatctgttctggagtctcaacaataatttattgcctgaggcagtgccaggttggaaaaggttgccaagagacctggaaagttgggagggagcaggggccacagtggtggttttgagaatgtctaggctttgtcttctgcagctgaaggtgctggagaaaataaacccctcccccttttttctcaggtgataagggtggggggaccttccttttctctcccttcctgtcttctgccactcctcaagtgactccttttgcgagccgggtttcactccctcccgagagttagggtgtgggctttgttcgtggttatagtgtcccttgcctacagggtgaggctggggcaccattcaggccctgggtggaaaccaggactccccagaacctccaggccttgctgccatgtgtcattctcttacctcccagctcccttcctctggggccgggcaggtttgagggaaaagggtggctcacagagtccgctaataccatctgctttcgtgtctcagccagagccagattctagtacctcctgctttacacctcctccagcaaatatttacccttagctgctctgtgggggaaactactgcttcacctctgtgccctttcctgttatggggtagggattctttttgaaatgggggaaggagtaatggaaaggaatacaccaatctgtgtggctctctaccttcctactaagaaacatccctgcactcccaggctggctgggttgtttgtttgtttgtttgtttgtttttggagacggagttttgctcttgttgcccgggcgtgatcttggctcaccgcaacctccgtctcccgggttcaagcgattctcctgcctcagcctcccgagtagctgggaatacgggcatgcgccaccacgcctggctttttgtatttttagtagagacggggtttctccatgttggtcgggctggtctcaaactcccgaccccaggagatccgcccgcctcggtctcccaaagtgctgggattacaggagtgagccactgcacccagactggctgggttttttctacattgcagtgttgctttagtgaatgacagattgcccttcttgcctctccaaggctgagccactgggcacgggaagaatgacagtcctgggggttctgtacatgcatactccaaaaaaatatgcatccagaacagctgtaggccctcaaagtgggtagaattgaattcttctaggaattaagcaagagttggcccaaatcagaggggacgtgtgtctcacttctgcttggaagccctttgctctgacttctagggacccctgtaacccgtaagtaggttatgcaacggtttttacatgagagggccatgagtgttctcctggcgggatggagaagcattgttctggtctttgagcaaattcttgagcaattacagttctgggccacagttccctctcccaatttctaaaagtggcctgggtaacctcatcaccctctgttgtcctggaagggtgagatctcttgaaggttatgccaaatctcattacagcaagaagaaatgactcacttgctaagttttcgtgttcattgaaacatcactatttcaggggcctcaatgtttcaaccctgaccgttggctttttttttggagacggagttttgctcttgttgcccatgtggctgtattaggtatgagttaactatttgaaagtttttgtttgttttttgtatttgttttttttgttttgttttgttttgttttttttgagacagagcctcactctgtcaccaggctggagtgcagtggtgtgatcttggctcaccacaacctcttccaggttcaaggaattctcctgcctcagcctcctgagtagctgggactacaggcgtgtgctaccgtgcctggctaatttttgtgtttttagtagagacagagagtttcaccatgttggccaggctggtctgaaactcctgaccccaagtgatccgcctgcctcggcctcccaaagtgctgggattacaggcgtgagccactgtgccctgccttgtttttcttgaagtagatctttttttctttttaaaggctgataatggaggccccaaagtagccatctgttactttgttccattactctaattgcttgcctcttaggatctggctaggactaacagttttcaaaattgagtaacacacttgacaaaaaaaaaggaaccaaactcaaactcaactgttatctagaaaaaagactgtgtaaatatgtgtgagaggcaagtatactctgtttgccctcttgtaagagggataggggaggccactcagctgctagcactctgttctctcccctcatcctctccagaatgtattttagaacttgactcttctaatgactgaagaaaaggtggggtatgggaagatggcctgggactgcagggtcacttacactcacctggctaagagttgagatctggctggtgccctggagtggcacctgccactcacctaatcctaaacaatccagggtgtgggcccaggattgccctctgccttttgaaacaccctccctggttccggcttctaagaccaacagggaggctactttggtggcagggagctgactcaccctccagttggaactggtgctaaaagcctccatttaacggcagccgactgcttggccccaagtgggctgccttgtgggggggaaagttcagtggaaagtgttggaggaagcagggtggtgtgtgaatatccaagtagtgctggtgctattaagctctgacacagtcagggaggtcagttaaaatgtggtcttatggccgggcgcagtggctcgcgcctgtaatcccagcactttgggaggctgaggtgggcagatcacctgaggtcaggagttcgagaccagcctggccaacatggtgaaaccccgtctctaccaataatacaaaaattaactgggcatggtggcaggtgcctgtaatcccagctacttgggaggctgaggcaggagaatcgcttgaacctgagaggtggaggttgcagtgagccaagatcgcgctactgcactccagcctgagtgacagaacaagactccatctcaaaaaaaaaaaaaaaaatcagatgacagaggggagcggggacaagttttaagtctaagcctcctgggtggggagttctgctgtttcaacatatgctccagtcatggcagactttggccagacagcgccctttttcagagtgaactgagtgtagcacaagttatctgccagtgctagttagcaaacagaatggagccaaaaaagaattgatttgggaaggcccaaggaatttgaaaccgttgagatgaacactttccgtttttgctacactgatttatgttgtgctgggaattgtacaagcctttgaccagaccttagggttgttctttaaaaaaaaaaaaaaaagattcccttgctgctgcttttacttttttgaagggcagaagggaagggcaaatataattagtgaacagctgtttgctctagtatcacttgctcgttcaggttttctgaatagctgaaatatcaacatgtttatctcttcccttgccttagtatatcctagagcagtgttttccccggctttatctttattccttcatttaatgaactccgtgttttcatcactcacattttgttcccttccctcagtttccttcctttgccttcatttatgtatttagtttacagaataacaaaagcactcgtgttacttttaaacaaggtaaaacttaaacagttttttcctccgtttctttttttatggaaataagaggcaagtgatagcaagtgggtaattcaatggcagtggtaactgaagcactgacctgttacaagagagacggaagcttctacttgagcagatacaaatactgtcatccgtggagatttgaaagaagtctttctatcactgggtagtttgagagctcattagtcttctttagaatgggtttaaacttggaaacatcaaagcaagttacaaggaaacttagttttacagtgttggcagcctaggcgccagaatttgttataaagtgtctgaaagtggcccaggtatcacttaacttttcttcaagaaggtctatgagttacattttactcggtatcccaggcatcaaggagtgtaactttcaatgaatcaaagagaaacagaatcattttaaattccagcctctgtttaaagaaggatcttatgaaggggagaaattaaccacctgacccagggaaggatcccgcctcctccagaaagtgaaatcgccgggtgtggtggctcacgcctgtaatcccagcactttgggaggtcgaggtaggtggatcacgtgaggtcaggacttcaagaccagcctggcgaacatggtgaaaccccatctctactaaaatgcaaaaaattagccgggcacggtggtgcacccctgtaatcccagctactggggaggctgaggcaggataatcactcaaacctggaaggtggaggttgcagtcagctgagatcacgccactgcactccagcctggacgacagagtaaggctccgtctcaaaaaaaaaaaaaaaagaaaaagaaaaggagttaaatctttgcatatatttaactggcaagagcatccttacatcagtgcatgggaagttttatccaagtagcagtttccctgggattataaaaatccccgaggcatttgtcttggtgttgtgcctttttttggttgtgttttttcacgtccctcccctcccctttctccataaacaagagaggcattaacttggaatgtccgtggaaagtcttagaagctgattggtgtaatttgcctgccttccctttagtttgaacagcgtttactctggaagaggtcagtggcctttttcttggttgtgatttatgcaagtgttatctgaaggcgagtggagtgagtttacgtgggatttgctgtttgccacctgttgttgtgctggctccttccttcctgggatgagttccattctctccccctcccccaggagtgaggctccccagccagagcagtccccctgtgcttatccccttccttcgtaaactgcagccatttgtgattttccataaccacttttatagacacataataatttcctttgaatcagtttgcattttaaattaagttttgaaaggaaaactgacaagagtatggcaactggaaaacccagctcccctggccataaatataatagaaggaaactgcaaaaataaacacattgaaaacaaaacagtgttgtttccaggtggttaccactcgggctgaaggccccccaggcttgaggcctgctccctttgttagaaagggattggcaagtgttggtgaggtgttaaagacccaccagcaccaagcagagactttctctttgaagtcatcaggtttacaagagaatcaaaggaaataactttctcaatgtgattcagggtgtaatgtaaggtgtagataacccttaaaattttccatgtgtgtatgtcacacttgggaaaaaaacttgatctcatctggtcgaggtgggcagggcagcaccttgtccaggagcacacagcccctcttggctctgtgtgtcatccggccatactagactcgaacatatggctcatgactggatgatgcttgattcatcttcagtttcaagtgttagtgcttttgaggttttgtaagaaaccaggacacattgaaaatacagtcatttctcagtatctgtgggggattggttccaggaacccccttatataccaaaatccacagatgctcaagttccttatgtaagataaaacgatgtgtaatttgcattttaactatgcacatcctcctgaatactttaaatcatctctagattacttataacctaatgctaaatgctacgtaaatggttgttacactgtgctgtttaggaaataatgacaaaaatatgtacatgttcagtgcagatgcaaccattcattttttttcttccagtattttcgatccattgttggttgaattcacagatagagaacccatggatacagagggctagctgtaagaaatgtgggtttatcatttgttcctcacacaacttttttctttcttcgtttttcttgcctttgttccttttttttgagacagggtgtcactctttttaccaaggctggagtgcagtggaacaatcttggctcactgaagctttgacctcgggctcaagccatccccccacctcagcttcccaagtagctgggactagaggtgcacaccaccacgcctgactgatttttgtgtttttgtagagatggggttttgctgtgttgcccagtctggtctcagcctcccaaagtcttgggattacaggtgtgagtcaccacgcccagccaactttttctcttaaggctccagttttcttcttagagttgggcccctcccacgaagaaagcacactgccaccccttcatcggatttgaaccctacattttgaaaggaaagcagtgccctcctgctgagttaacaaggcttatttaaatgtttttcttccaaatatcagagcagaacagattctttgtcttccagtggaactatccacatggggcagaagtagttggaagcggcagttactaccctgcagaacacaatgaagtcatcttgggaaatatcgtggatggtgttgcaatgattgaatgggatgctagaacaccagcaatacaatagcatttgtgtcttcagcttcaggcaggaataaagaagactttgtggtttgttttatgttttttaaagtttcccccccaaaggtgtggggctgagtgatgtctgtcactagctttctagtgggtttttcttttcatcttttcccctccctgatgtcttttgagagtgggtggaagccacagtctaggtggatcagaggaagcacagaaggcaggcagtataccccactttgtgttttccatgtctgaagggaacacatttggtttttgttctgttttgattttttagagacagggtttcactgtcacccaggctggagtgcagtggcctaatcataactcactgcagccttgaactcttgggctcaagggatctttcagcctcagcctccctagtagctgggattatgtgtgcaccaccatggccagctaattttaattttttttttttttgagatggagtctcactctgtcacccaggctggagtgcagtagcacgatctcagctcactgcaacctctgcctccccggttcaagtgattctcctgcctcagcttcccaagtagctgggattacaggcgcgcgccacgacgcccagctaatttttgtatttttagtagagacagggtttcaccatgttggccaggctggtcttgagctcctgaccttaagcgatccacccaccttggcccaacaaagtgctggggttacaggcatgagccactgtgcccgaactaatttttaaattttttgtaaagactgggtctcactatgttgcccaggcttttaatctgcaaaaagcccaagataaagagttttaatatcttacctcctgagtagtaatgactgattccagttctaataatgtcttaattacagctatacagattgaggggactgcaggaagtgaaatagatgcatttcttttttctttctttcttttccttttttaaatacacacttcgtttcggtggtgaaggccagtttgaggttaggagaggcatcttggaaggaagctcgcaggtggttcggcatctggacatgctgggaagttgcctgagggggacgtcacaataagaggactgtgggtctacagcctgccttagcaaaatgacaggccttcttttaccaaggccaagggcagtggtggaagctgacttcagttggtgtcatcaaggcctcagtatgtgtaacggttaacaaattactattctatgatcaatctccatctgggtgtgagtaaaaggtatttagttgctatcaccatggaaaccaagttgcttacttactgttttggggagtgccctcataccagaggcagtgctaatggtggagtgttaggccccgggcagaaaaaaagatcctgccacttggtatcacaggaaaatacctacaggcacagcagccttgccaggtaggggatgaaggccctctgtcctcggggcaggagttgggccagttgattgtgttgatgaggagtgtgcatttgtgcatgagagagggagaagaaaaaggagagcactccatgaaatccgctgctggctttgtagcctagaagagtgctttttttctctaggagtttggaactggaatctcagctatgtgacttcttaataataggacaaaatatgcctgtatcttttgcctacttccacaaacactgataaattaaaaagaactctaaatttcccacaaatcccaagcacaagtaactttttttttaaatccacatcctccctaatccaaatctaacagcaaatccttttctctctgtcactccctgcttttctttaagaaaatgagtaccttgccttaaactatatattggatgaaaatattaaacactttcacaaagtgcttctttggctgttactggtatgccttgcatttggaagggtcagagatttgaagacttctgtgatcttccagttctggcctatgaaatacagtcagtttcaaaattcaaaatgtctggaagagccaacttgccaggccggttcaagggcagtcagatgaatcgacccttcttacaggctgtctacgaaccagtcatgattcagatattcaagtcctggaaggtatccagacggtaaacatcaccaggattgtgaggcagttacttttttttttggatcgtttgagctacactgccaagactgtggtaggacttgtctgtgtaaaacagaaagggctgtctctaaatgtctttttcaagaatgtcggctataatcacccgacactgtgtctcatggtggggtgagatgaaatacctagaccggttaggggagggccttcttggccattttttgaactaattttccctttccctttgtaacttttttttcttcttttcttttctttttttttttttgagacggagtcttactctgtcacccaggctggagtgtagtggtgcaatctcggctcattgcaacctccgcatcctgggttcaagtgattctcctgccttaggctcccgagtagctgggactacaggcatgcattccacgcccagctagttttggtattttttaggagagacggagtttcaccatgttggccaggctggtcttgaacccttgacctcgtaatgcccacctaggcctcccaaagtgctgggattacaggtatgagccaccgcgcccagcccctttgtaactttcattaacactgatgaggcacaagccataggatagaattgaatccattgagagctgtgagccaattgagggatgattggttaatagattgtggcttgaagctgtggaaggtaaggggtgacacttgactcctattagccttgtagaaacacctcagagattcacaggaagcaaactttgaccataaaaatataagactcacagcgcaccgagttctcttagcagctaccttagagttgagaaagttttgggcctctttaataaacaagcacaaagcagttcttgccaaatacggcctgctctggggccacagggttagcttaggagacaactttcttgcctaaaaataaatgcatgttcctatcagacattccaagcatagtttaaacatgagacttctgagcagcagctcaagctctgtgggttcaattatgtcagagtatgggcagtgagggtctttggggagtgtgcccccttatttgggattggttgtggctaccaaggaaatcagatgatcaaatgcaaaacttcctccatcttatttctatatgatcttttttttttttttttgagttggagtcttgctctgttgcccaggctggagtgcagtggcaggatctcagctcactgcagcctctgtctcccagattcaagctattattctcctgcctcagccttccaaatagctgggactacaggcgtggccatcatgtccggctaatttttgtatttttagtagagacagggttttgccatgttggccaggctggtctccaactcctgacctcaggtcatccacccgctttggcctcccagagtgctgggattacaggcatgggccaccgcccccagccttatttctacacgttcttgatctatcacaggctggtgggggagacagcatgcatatagataatgaacaaggtaacttcagataggattatgtgcaataaattaaataacagctagcattttaccttgtgctagacactattctaagtgcttcccatggactgactggtttttgtttttttttctttcctttgagactgagtttcgctcttgttgcccaggctggagtgcaatggcgtgttcttggctcactgcaacctccgtctcctgggttcaagcaattctcctgcctcagcctcccgagtagctgggattacaggcacgtgccaccatgcctggctaatttttgtatttttagtagagacggggtttctccttgttggtcaggctggccttgaactcccaacctcaggtgacccacccgcctcagccaccccaagtgctgggattacaggcgcgagccaccatgcccgacccatggactcacttgtataatcttgtgaagcaggtgttgttacccttacatgcagaaatggatccatgggcctttaagccacttgcccctgtgacagtgccaggatttgaatgtagaagttgaggctttcaagtttatgctgttatttctacactacactgaagtctagtgattgggaatggctttgcgagcgggtggtgaggggaggagtgtgcagtgcaggtacttcagatggagaggaaggtctcaaagaggtggcatttcagctgttccttaacggatgagaaagagagaaccaagagagcaccagaggaacgcgcttccaacagagaaaaccaagcaagggggcccccgaggagcagaaaggcccgagtggtcagagcggagcccgtggaagagatgggcacagccagattgcttagagctgtgttgttagaagtgctgatgagtctacattcaacttgcgcctgcaaactcagtccctcttagatgccagtaggtcaggaacctcatgcttccaggactctggcgctcctaccctttcctcccaggcctcctggacaggccaaaccagaactgacttctaaagtgggaaccccaagacggcagaacatgaatcagccaaacaaaagctgcagttatctctgtgatgatttcggcagtcggcacgtgtatttgattaaagcgttggtaactttgaatctggagttttatggcactgtgtactactcataatggctttgtagtgtggctctcttagggagcttaacttttacaacatgaacaagttccagcctcctttggtcccatcaagaggccatttctacctggtgggatgccacttgctttacaaagcatcttttgtaaaatgttgagtctccttctttgaagttggaagccaggaagcctgattttttttccaataagtattgtagaagatggcagcctgatttatttttatttatttatttattttgagacggagtctcactctgttgcccaggctggagtgcagtggcacaatctcggctcactgcaagctccacctcccaggttcacgccattctcctgcctcagcctcccgagtagctgggactacaggcgcccgccaccatgcccggctaattttttgtattttttgtagagacggggtttcaccgtgttaaccaggatggtcttgatctcctgacctcgttatccgcccgcctcggcttcccaaagtgctgggattacaggcgtgagccaccgcgcccggcctggcagcctgatttttaaactggcttttctcctaggtcctttccttctctataaatccctctttcacttagtatttcctccttgtttcctttggtcagttggagtgagggtggttctagttcagagaaagagacaggcatacaggctgattcagtctgaggtgcttagctttctgtacctcactggaaaccagtccaggaatatgacaggtttcagtaggtttcattggacccacaactccccatttgaaggcagagcttgtcaaacgagttatgtggcttttactcaaggagggaggaacagcaacagggagctctgggctattgatagacactcctgcctctgaacacacagcacccagcaagaagttaccttcatgggttgtctagagtgaacatgggctgggattctctcagccttagcactgatgatttgacaacaaaaatcgccccgtgggtagagtataacggagcaaatgattatggtggcctgtgatggtgcagccagcccagctgcttcagctggaaagaagatggcgaggtttccattctcctggcagcatagccatgtgaacttgttaaatcttttaagtagctgtataggaggggagataagtgtgtgtgtgtttattcttatccccttaaatacaaaaacaaaacttccactttataaaatcaattcagagtgggaagaggtgcatggcacatggaaaatgtgtcggattaggttgagtcctaccccacgtttgggacacagctgtaagtttccatggtgggtggcttattatgcatttatgctgagctgaacctgctccaagctgctgcagataggaaagtctgtcttggagggggagctgcctctttctatcacactataaagacataaaaggtcctttgaaagactccagcagtcaccacttgggtaacagaattaggggctgctgagcaaagtgggtctgtttttttttttttttaaagacagagtttccctcttgttgttcaggagtggagtgcaatgtcacaatcttggctcactgcaacttccgcctcctgggttcaagtgattcttctgcttcagcctcccaagtagctgggattacaggtgccggccaccacgcctagctagttttttgtatttttagtagagacggggtttcatcatgttggccgggctggttgtgaactgctgacctcaggtgatccacccgcctcagcctcccaaagtgctgggattacgggtgtgagccactgcgcccggccacattttatagccaaccggcttcttgtgtaacatgagttggggcttcttgggccccagagtccagcactcaggtagaaatatgaccgccatggccagacagcagccctcgctgggcccctcttcagagcagagctctgtgccgagcctttaggggtatgagagaaaccggagacctggtccgtgctctcaaagagctcgcggtgtagctggggagagagcaaggccacatgagacctcagaaggacactaaacggcacaccgacaagctcacagcactctagctgtgtcccgggagaggaaaggggtgaatcagggcaggtggggtcagtcatggaaactttcataaaggaggtgagtgtgcaggaggggcgggcctttgcccccgctgcgggcaggttgccgagggcaagtattagggggtccggcgtgcaatcgaacatttcttagctgcctctttggagtagcgctaccagttcctgtccccatgagcatcgtcttcggggagctgctggtttgaaggatgaggtaccatgctcatcttggccatgtcttagaacctgtgatagccagacctgtcgttctgggtccgtatccattcatgcgtcctgtcactgtcacagatatcgtgagtgggccagactcttctccccaggtgggagggggtgccttctgaggcatatgttttcagcctgctgatggcctcttcagaattagcacaggtttcgacaaaaagaatggagagactcccttctcatgtccaagggtctccccaagccctgtgtctcagcccctcagggcgtgtggtgctgcacactgccgcccagatgaccacgcgcagccggaacggccgccctgtattgagaagtgggatcggctcccagtctgctggcgaggctgggttgccacagctcctctgttgccctgcaacgcgggtggcctaggagtgtgctgccttcagtttattcctgcctgccaagctacgcttccaggtgctattcttttctttaaataactgccttagtgctgcttgtggaacttagcgttcccatcccaggaaatactccagtgttgtgtttttttttttaaactcattcagatgctcatggccaaatgtgtgacttaaataccgcagtgtccttgatattgccttccccacaccgacaaaccgagttgcattctggtcccactgtgggataaggttagggtagcggcgcttgcctctttgtgtggtttcagatgtgtttctccccacttcagataacacatgacagctgtaatatagctcagttcgtgcaagtaaggtaggggcagaaatcatccaggagaactccagcctccatcctaaaggattagactgcctagcatcagtaggtttaccatagaaggattcagtggagatagcgagggtggtgagtgttgctggattgagcccgtccctgcagcctgggcacgggagcactgcagtgccatgaaggagagggctgggggatattagcacagccggttcctatttccttttccacctggttaagacttccggggaggccctgcccagcagtccttatgagatgctgccttcctcttttttgaaaggcatagatgataaggaggtggacatgttttgagaagagaacctagagctcattacttgtatttgaggcatgtattgcttcactcccactttgggagagttttttctggggaagttaaaggctattcaggatcagagagtttcctgcatggtcccaggggctgggaggagccacctgctcagctggtggttagctgatagcacccagcctacccaccaagataggaggcagctcagatgtcactgggattcgcagtaccacaggctgtccctgggcccaagcagttagctagctgcaccccgggagggggtgttgagagcactgaagctcctgtgggagagtgcctttgacatcccccactccccactgcccagaactaggaggtagtgaaaggtgtcagtggcaagaaggctgggccagagcatggagggaggccgacctgggctccacacccacctcctccaccaccggctggctgtgcgaccctgggcaggtggcgggggttaagcctcagtgtccttctttgaaaaggggcatcatcctatcctcagtttgaggattagacgtgatagtgcgcaggaagcactctggtgcctggtacattgtaagtgctcaataaatgcagcttcccaaaatgatttcaatggcacatggtcctgcatccaggtgggatctgctacttgagtctccccctcaaaggggcctgctgaaatacgcagctcagtgggaaaccaaaacatacacccctttcctccagtgctccccaggaagcgccaagtcctgagcccagccagcaacttcgaagaagtgccctccaacaagtggcagtgggcacttgagcaagtgacttaacgcagccctctccccagcccctgcatccatctgggcctcattatctgggaggtggcttcttgtttcagagttacaggccctgaacaattttgtgttgggatgtgccataggcagtgccaggaaggttctttcatgagtaatttaacttgttactaagtttgctatcagccggggggctctttccccgggttcccttctttccctgggtccccttccccgcaaagcaaagtccaactcaagttagaaacatcccacagcctggagtcaggctgccctctcttcagttggtgtgtgatgtagaagcaggaagggcttcccactgataaccctaaaaataactgcccagaaatgctgtcagatggggccaagaggtgcacaggagcctgtgcccagctgccgacctggaacgtgggactttctagagggcttggaggagccctgccccttccaggcctcttcccaacagtgcttctcacgcctgctgctccattcccttttcctccttcctcccgcgcccccccctttcctggggtcacttcctgatgccattcttcaacttcgcccctgtcccccccaaaagcaatcaaatccacaacctaataaggcaaaagaatgaggagaatgtccgcctcccagcctctcccctaacagggtgcaggcctgaagcaaatttggaaaatgttacaacggagtgacaaccgatgggggctgggggtggggcggtgcagccttgttcaggagctgcccattgttggcctgaggcaggaccctaagggaaggccacccggtttgcgctttcctgatcaggctgttgacacccttctagcacaagaaaatgtatggaaagtaactgcctgagtcagctgcatctccagttgtgggatccacgtgccaggagaacacgaagtacacacaggtccgcagtgggagcccgctcggagacacctccccgccatcacggctgggactgtgcatatccaaacacttcttgcctctgagatgagcagttttcttccccttgactgtgccagggttcaattagcctgggcattaattaaaacttgtcaacacttagagtggggcccccagaaatctgtcacccctcctagatcattatcccaggctaatcaaccctctctaaggcagtttccattcttgacttagtgggagggaggaacaagcccctcggtgctggggagctctgggggaggtagggactgactgggcccaacccactttgttttggaaggtcaagcttagtaattaacctgaatgcttgggggagggggtgaaggagaaagaactgagtctagggatgtgccaggtctttcaaattgctaattatcagcgagcatgaggtcatccgtaaatatatctaattctttagcttgtaattaaggtgctcattaaaagtgcagggaagtcttgttttcctaaaaggggaaaaaaacaacaacacaaaaagtctttgttttgacctgacacgatggctcagaacagggggaggactcaaggcacaggactagtttcctgccttaaagagcctttacaggaaattgactgcaaacagtattggtgaccctgccaaggaggcaaacctagggtgatgtcattgttcgaagctgtcaccgccaagcctctggccttggggcgaggagagttggtgggattaaaaaatgagtgtgtgtatgtgtgtgtgtgtttagcagtctctaaagaggcgagtcaagggaaaatcctagcgggagaaaaatcacaaggggtggggggtgtctcagaaatattcttagctgggttcaactttcctcgtttttctaagtttaaaaaatcctctcttactatttttgctcatcaaaatgctgctgctttttcagagacagccttttttgagccattccctatttagtgttttgggtaattggctgttacagtatggaatttgtggcccaaaggcagcgtggtaagttagacactaggtgcacggtgccccattgttatgaagtgtggaaactgagacgctggactagtctgatgtatctgtttcttccaccaaaaaaaaaaaaaaaccattttggagaactacccaatgccagtgacttggcatctctgagtcgctaatcttcccatgtgcctccaggaaccgtctggagcgtccctgaaaaaaggacaaggtttgtatcttgtcatttttcctctggctggaagtctaagaggtataaacacagtcttaaaatgaaagcaacaaaaataaactcaaagcagccctgcgtgaaggcattaatgcaaaatatgcaagctggcttcctatttatacggcggaaggcagtcagaagagccaggcctggttaaggaaggagttatgtctctggaggtgcctgttccttagaattacaaataaaccctgggtgattactcagatgaggttgtaatgtggtgtctcatttcatgctttgcacagtccagtttcttgatggaaccaacggcctctgaaatgctaatgcaggatcaggatacagttagagtgccccccttcctgtgcccctcctaacatcctaacagctttagaaggaagtttgaagattaaacaggagagccatgtaagtttcctgtgatcctagatcctgtgatttgttaatattctttctcttcaatccacctgacatttacccagataccatattaggcttggagatacaacaagaaagaaaaccaacccaaccctgtccttaaagaaaagatggacgatgaagggccaggcgcagtggctcactcctgtaatcccagcactttgggaggccaaggcgcacagatcacgaggtcgggagtttgagaccatcctggccaacatggtgataccccgtctctactaaaatacaaaacattagctgggcatggtggtgcgcgcctgtagtcccagctactcaggaggctgaggcaggggaattgcttgaacctgagaggcggaggttgcagtgagccgaggtcgtgccactgcactccagcctggcaagagagtgagactccatcgcaaaaaaagaaaaaagaaaaaaagaaaagatggacaatgaattgcatgatggaagtgaacagtgttagggcgatatgcagatgtaaatgtggtcttgttttactgctcactgacttactgaagtaaacccattgacttcgccttcatgggtttgaaaagggtttttccaatgtgctctgtgtgtctcggagctcaggtgttcagagctgcctcccttataaatcgacctccaggagagttgtgtgtttggttcttggtgtatggtttcgtaggctccccagggctgaggagtcaccttgggatccagctttttttcttttttcgagacagtctctccctgtcgcccaggctgaaatgcagtggtatgcacttggctcactgcaacctctgtctcctgggttcaagcgattctcctacctcagcctcccaactagctgggattacagacgcctgccaccgtgcccagctaatttttgtatttttagtagagacggggtttcaccatgttggccagattggtctcgaattcctgacctcaggtgatccactgccttggcctcccaaagtgctgggattacaggcgtgagtcaccgcgcccagccaaaatccagctttttcttagttcctggcttggggcatgttgctggaaaggaatgacagattgaggcaagaaggaggcaagaaggatgcatctcctggccaaggaaactagagtttggaggtgtcccctgtcaatggcatctgaagaatttctacattggaaaggcataggtgacccagtctggtttggagtagatgggactgggtaggggactagtcttgaagctgcaagcatgctgtttttacttagagcacaggtagctggggaggagatcactgtggtgtgggtggcagaagccatccctagccatcacctaggaagatggtggcccttgggttgcccgagctgctgcttgttttagtagctgcatttggtgccacatttttgtggtaactgccaggaagcggagcccagcgtggcctcaggaagttggtgaggtttgcaccactttttaacaggctggtaacagtgccggagctgacaccctcatggttgcagccctgggattttgttatttggggacactttggaatatgtcactcagaatgctggctcactagctccacaagcaaaagactccttgggtagctggaagcaagcgttgggggaaggagggagaggcaattgcagtccagccaagaatctcaaggctcagtcttcaatgtatggaaacttcagtccttttctgatctttagtggaaatagctgttcactcttagcgccaattggaaagtgttggcagctgaagggggtcgttcctcaggggtccccagagccagtgtatctggtatttctaacattttcctagccacccctttctcctccatatgcccctcccagccccaccattcagatagggtggctggaaagaacatctcctaggtcctctaggaaacttggtgtttccactcaagggagttggggatcacgtaacaccctccacttccacctgggatttcaggccatctgtgggagtgcaagagcatggtggggtggaggtcacaggaaggtggaagcaaagccagggcagctccacatgcagccccctttcaggaacagcaaggataggccggcctgtatcttgttgctcagagcaggtgatcctgtcatttggacccttgtgaggagaatggatgtgagtgtgcacctggttctcttctcctggggctgagggactgtggtcttggattatcacatggtaggtgaggtgacaaaatggagggaagtagcctgggtggggactggggtggccactgcagagctctagctgatggtggccaggtgggaatggggacctgggacttcacgaagctggaaatggagagttttatggggcatttcattcaacttaaaaacctggccgggtacagtggctcacgcctgtaatcccagcactttgggaggctgaggagggtggatcacgaggtcaggagattgagaccatcctggccaacatggtgaaaccccatctctactaaaaatacaaaaattagctgagcgtggtggcttgtgcttgtaatcccagctactcgggaggctgaggcaggagaatcccttgaaccagggcgtcggaggttgcagtgagctgagatgtcgccattgcactccagcctggtgacagagcaatactccaacttaaaaaaaaaaaaaaaaacctgcaggccatacaaaatagggcctattgggtgtgaagagctacccatttgtgacccctaaccttgcatggtcttgaccctgtctctgcctctcctctagtctcccctttcctcttgtctgaattgctgctgcttaatcctctcactaggagcgagaaaattgtactttgccccttagtgacagctctgataaaaggtggttgaagtggatggtagtaaaaagggtttgctttagctgtggttttccagcctccggactcctccccctttcccatcaccatagataattaagagttgactcctcaaaattcctcccaccatattgcatatttttaggcttcaggtttttgtgaaccaaaatagtggaaagtttttttgtttgtttgttttgggtagcccaaagcaacacttttctacagaggcagccattctgcacgcacaataacctggtgaacaatgccagctttctattaataaatgaactgccagttcagaatttgtacccatgtggcagatggacagaaatagtttctttaggattgatctcttaaatttgactttgggaagatactggcagtccaggttttgtgacagagatccatcctgagatctttgtaaatggaaaagcctgaatgcagcgtttcttattgataggagagttgatggatttcaggaaaatgggatatagtagatgtgcaatgaatttgttgacttggaaacaaatttggacacttatccctgaaaacttcaggccattttttcctaaactctaattgagtccctgtgattggagtactagccccacagtccttatcaaacttcgcatttggagcaggcagtctgtctgggaaaagccaggaagctcgccatgaaggcatcgccctctgcttttaacttttttaggctctgttacctctgcactggcttgagtatttcctggctcaattgtttctcaggctggccttgagtccttagatgttatttgtgtgcctagaaatagctggaagaaaaatggttgtaatgctttgcattgctcactgctctccatggatggaaattctgtgagggaaagagggctttccacccagaaaaagagctgggcagcgtagacttcattgtcctgctggcctgtcatgttattctgctatactacagcgattaggatgagagagtttctcgctctccctgggtgtgccacctaaggtacattagggtagggacgaacatggcgggagttctcatagtgggctttcctgccagacgtatggcccacacagcagtatttcttacatgtggttcttttttttttttttttttttgagacggagtctttctctgtcgcctaggctggagtacagtggcgtgatatcggcttactgcaacctccacctcccaggttcaagcaattctcctgcctcagcctcctgagtagctgggaccacagatgcatgccaccacacctggctaatttttgtatttttagtagagacgtggtttctccatgttggccaggctggtcttgaactcctgacctcaagtgacccactcgccttggcttcccaaagtgttgggattacaggtgtgagctaccacaccctgccaaggttctattatttgatctatgttctttgtttgtttgtttgtttgttttgagatggagtttcgctcttgttgcccaggctggagtgtaatggcacgatctcggctcaccgcaacctctgtctcccgggttcaagcaattctcctgcctcagcctcctgagtagctgggataacaggcatgtgccaccacacccggctaattttgtatttttagtagagacggggtttctccatgttggtcaggctggtctcaaactcctgaactcaagtgatccacctgccttggcctcccaaagtgttgggattacaggcgtgagccaccatgcccggcccctgtaaccatttttaagtgattgatcatctcagcatgattgatggagatgatggggttggccatccattcttttttttttttttttttggagacagtctcactctgtctccaaggctggagtgcagtggcacaatcttggctcactacaacctctgcctcctgggttcaagcgattcttctgcctcagcttcccaattagctgagattacatgcatgcaccaccatgcctggccagtttttgtgtttttaatagagacagggttttatcatgttggccaggctggtctcaagcccctgacctcaggtgatccccccacctcagcctcccaaagtgctaggattacaggcatgagccaccacacccggcctattcatcatttattgagcatttatttatacccactatgtgccgtaaacaaggtgctgagtaatgagatgtgaacagaatagtccttcttcttgtcctcatggagcacacagcctagtcggggacaataggcattaaaaaataccaacaatgaaaacccaagacatacatagagtgttccaaattgtggttttattttttatatatatatattcatatatatttatatatatttatatatatattcatatatatttatatatatgaatatatatttatatatattcatatatacttatatatatttatatatacttatatatatttatatatattcatatatatttatatatattcatatatattcatttatatttatatatattcatatatatttatatatatttatatatttatatatattatatatatttatatatttatatatattatatatatttatatatttatatatttatatatacttatatatatttatatatttatatatatttttatatatatatatttatatatgtataattttttttttttttttttttgtgatggagtctctatcacccaggctggagtgcagtagcgtgatctcagctcactgcaacctctgcctcccaggttcaagcaattctctgcctcagcctcctgagtagctgggattacaggtgcctgccaccacgtccggctaatttttgtatttttagtagagatgggatttcaccatcttggccaggctggtcttgaactcctgaccttgtgatctacccgcctcggcctcccaaagtgctgggattacaggcgtgagccactgcgcccggtgtgattatttttatgaaggaaaagaccagagtcctttaagaggggacagtgggggacttgcaatagattgtgtgggagctgtcaggggagactttccaagatgatgacagtgaagtgaggcctggagggagagttagagccaacctcagagaagggaacactgttctaggcaggaggacccagggttgtgggaagagagaaataaaatgagaccaagacagtggggagagcagtgtgagttgaagtcagaggggtgacagcagccagaatgtgccggtagcgaggatcttggattttattctagctgcaatgagagctttgattctacaaatatttattgcgtgctagtcactgttttaggtactgggtgtacaacagtgaaaaaagaacttcccagccgagtggaatgccgtggagcatatctgtttcgatgctgggacagatccctaacacagctcattaaagcagatagcaccattccgtctctttcttcagcttcactttacgtcagtcccagcatttttatccctacccttacagatgagagaactaaagttcagagaggtgacgtgacttgccccaggcccctcagtcagtaaaagacagaactgagaatccaaccagactcttccctttttaggttatttctctaacattagggccgagtatcgattctctttacctctgacttcgtgtccctggtattaagactcagggcccacagtgcctcttggaattcaggcatatggtgacatcagtgtgcctaccattcaggtcttggagaatagggtatggcgaaaggagagaactcgtgatatcgctgattcagtagcccagagttgtacgagtccttgggtgtttcaccttcatccaggcatctgagattggagacaagcatgtggctgaatgacgtatctgggggaagctgtctaaacagccgtgtggagttggagagttgaattagctctgtggccaaacctctgggctcagtctgcctatatatggcttgatctcaaagaacaggtgatagcagtaggagttgttttctgtgttgctggtgggagatgcccaggcacattcctttgtagacaagcacaaactagatatttttgaaatcggaggtctgaaaccagccgaagaattaatcctggcctggaaagcatatgggagagtacagccaacctggcttgggtgttgctttcttggttttgttgcatttttgaggcagggtcttgctctgtcacccaagtgggatcacagtggtacaatcatggctcattgcagccttaacctcctgggctcaagtgattctcctgccttattttttgattttttttgtagaggtgaggtctcaccatgttgcccaggctggtcttgagctcctgggctcaagtgatcctccaccttggtctcccaaagtgttaggattacaggcgtgagccgctgcccctggtgactttgttgctttttaataagcccagaaatttctttcaagagggaggatctttgtgaacatcttgagccgcgttcttgatcgctggctgtggaagcctccacctatcaggctcaagtccatgttgctatcatgtgcactttggctggtgaggtgctgagcagaggtttcagcctctaccacaaggtttcctgatgaaaggtcagctgggtgggcccagcttctccttacccaactgagaggcctcatagagcacaaggcctgggtacggaggttcctggggctcctgccatacccagccaggccaagcagagggccccagtgtgttgttgggtgctgagaggctgcccgcagctctcgcctgtgttggaaggctgtagacttggcttctcccaaacgtaagctgtgaagccatggactcagattctcagcctggccctgctacttactgtgggaccttgggcaaggaagtctccattttctcttttacaaaatggggccaataatctgactaccacagggctgtcaggatgcagcgggatggagcctttatagggtcttgttctgtgggatctggagtcccatatgggagttattagttgagggacgaggcatctgggaatctttattcaactaggaaacttcagccaaagaactaatgccatagagatgtcttatggtgtctgcatttgaagccagcggttctttgaaaatttatcctgagttccagaaagccaactgctagataagtaagcattgagcatttaaggggtcctggaagtaagattcctggaaagaagcagcaatctcttactcatccccgattatctcagacacagagtggtggatggaacctttgtggtttaggggctgactcttggtattgctggataaggaatatgagccagtagagacgagtgtgttgtatagcagtgtcctgcgactgggctggagacgtggctgagggaggccagggggcctcagagtgcacgggaggaggcttacagaggtcttttgcatcctgcagaacaccacatgtgtccttccctctgggaaacctcccacccgggcagggcctctggggccggatgtggaaggtaaacaggctgcctttctgctctctaccacagacaggcccggaaaggcctgagtaggagcttttcatctcaggaagccctgaggtcccacagcttctcctgaagcagcctcattgtccctttgtaagagcatgaccaggtgctctagctcctggagcaccagtggagaactagagtggcccaggtgctgatgccaagttcgagcaacagctcctggcgggtttccctgcatccccccactcactcccatctattcttcacataggggccaaagaacatcctgcttgacatcttgatcagtgtcccttgccctcaggatcaaacctgcaagtccccaaggccctgcaggatctgttttctcctctctgtgctccgggcgcatgccagctgcctctctgctccatgctcattcctgcctcctgagggacttcacacggggcccttgcctctgcccctttcgcctcagctcgccacctacctcctcctcattcttcagatggcagtttatgcttcactatttgtagggccgtcgcacctgacacctccagcctaggttaggagcatgtccatcacctctacttctccttttaactccaaccatccttggctctccctctcgagggtcacgagagcagagagagaatctattttgttcaccactgtgtccctaccatgtgggacattgtcaaggcaaatgtaagtgtgcactaaataaatatgtattgaatgaatagatagccaaacagacagaatggatctgccacaacacaaacaggatgcttttcaagtgggcagaagatggagacatcacttgtcgagacactcaaacaagtggctggatggatgagtggcagatccattctgtctttctgcttggctttaggagtagagggatcacccatggtccatcctctgaggacaagggtatcatgaccgcccaggccccactcacccctgccaggctcattgcatcccatctaaaagtgtgctctggaaggtcataagaagtcctcacctgggacacttctaggcccagtgttcagccagctgtcctgagttctgcatcagtccctgctagatatgaaacacaaacaggatgcgatgcttttcttttttttctttttcttttttgagacggagtctcgctgtgttgcccaggctggagtgcagtgggtgcaacccctacctcccgggttgaagtgattctcctgcctcagcctcccaagtagctgggattacaggtgcacaccaccatacccggctaatttttgtatttttggtagagacaatgtttcaccatgttggccaggctggtctcaaactcctggcctcaagtcatctgcctgtctcagcctcccaaagtgctgggattacaggtgtgagccaccgcgcctggccaaacaggatgctttgcaagtaggcagaagagggagacatcactgtcccatggagaggtgggaaaatcatcgttagcacaggataattcatcctattttgtgctcatgtttactgagctaggattgacctgtgtccgggcagcagggacacagaggtgagtaagacaaagagaaggcccttgcccttaaaaatgatacgtgtggctaaaacgctgtagacctttttgttttttcctttttgagacttcctttttatacagaaattgctacctgcaggtaaaattaacttacatcgtgaaagcgacagtaaagtgtttctagggatagctaaagacctaagaacacagccctgtggtttgactggctggccaccttcctgcagctgggtttactatggtgctgtgttctgggacagcccactcgtctccatttattgggctgagcctcgagacctgcaataccagggaaggaagggaagtctaggctgtctttggtggccattgttatttatggggcatcggcagagaagtcagtaccatggaaaatctagagaaagatagaggatacgcagtgtggttgagcagaatctgatagctccctggctctctccgggccatgggacccagggcgacacagccaccctttttctctctgctgtctggcttgggcttgggctttgtctcctgtgtccctccacaccttcttcgctgtcagtggtgaccaatcccgtggaatcagccactgtgtgttaccccaagtccttgcccctgggacctcgctctgttcggagacaaaacccgggactgtttctccttttaaatgcaaccttgttccacaggagaggagaaaagcaagaaagaggtggcttgtttatctgatggtagtggggtgtgctctgatatgcctttgaaaggggcccagctttgctttgcccagcggcctttgcaggataatgagagaaggaaaacacagggaacttagtgggaatttgaaactggagtgtgggagtgggaaagttcagcttttaccttggagcaatccagtctttctcctgtaggaaaacagaatggtgctgtatggcctccaagctgggttacatcctgggaaaaagacacgtgcttggctattggcctgggcgcagtttatgtgtaagcctttccttgtggattccattttcttatttcccgaatacttctcagccccacaagtccactgagtcttctgtctccagagactgcctggtttccatccccgagggcatctgcgcatcacttaccatggtgtaccatgcacctccagtgtgcccggcactgtgtcaggagctggggatacaggtgctggtccccacctcactcccctcaacctctgcaatatatgatacataacccacacacacagaccatatgcaaaagtggtgggactcctttgtacctgtcacctgcatcagtgattatcagcattttgccagacttgtttcatcagtgtctcccaacacactccccccagacattacccatacgtgctcaaatagatttgggtgtgcgtgtgtgtgtgtgtgtgtgtgtgtgtgtgtgtatttttttagagacagggtctcgccctgtcacccaggctggagtacagtggtgagatcatagctcactgcggcctctgaactcctgggcttgctttgttgcccaggctggtctcagaactcctggcctcaagcgattctgccaccttagcctcccaaaatgctgggattacaagtgtgagccaccgcacccggccaatgtatgtatttttaaacataaccacatactgttatatttaatgcttctgaccatgtcttaagaaaaaaacaaaaactccctttggcttccttgacatcacagtctctctgtttctctgactcttcttcctcatctcctatggctaaattctctccctctgtccactgcttacacatgggcatttcacaatgtcctttttccctgaaggaacttaccccctcccctcagccttaagtaccccatctgtggggatgatgcccatgcctgtagtcctgactcactcaccacgctctatcgcagttatttactgatgcatctctctcccctatcagacgctgaggtctttgatggagcaaccttgtatttgtccgtgtatccccagcaccacacctgtccatagctggagctcaggaagtttttttttttttttttttttttttttttttttaaagtcagagtctcactcagtcgcccaggctagagtgcagtggcacaatcttggctcactgcaacctccacctcctgggttcaagcaagcacgtctgggtaatttttgtatttttagtagagatggggtttcaccatttggccaggctggtctcgaagtcctgactgcaagtgatctggccgcctttggctcccagattgctgggattacagacaggcatgagccactgcgcccggcctcaggaagtagttgaatgagtgactgaatgaatgcccacgtgagcaaatgacctgtttgctgaactttagactgacgttgcctgatgcccactgcttgtgcagtacgtacttcagtctcagcgtgtctgagaccaaactcattttcaagtcccacttcttgggcttggcattgcccatttgtcagccatccgagtcagaaaccttggagtcagcttttgacttctcatcctgtaacaggcaccaagtttgatttctttcccttgaatatctcttagaaccctcaccttcctccttctctttattcctaccattgtccttactcaggaccatatagtgagggtttaaaagtgcagagtcttggccgggtgcggtggctcacacctgtaatcccagcactttgggaggccaaggcgggtagatcacctgaggtcaggagttcgagaccagcctggccaacatggtgaaaccccgtctctactaaaaatacaaaacttagctggatgtggtggtatgtgcctgtaatcccagctactcaggaggctgaggcaggagaattacttgaacccgggaggtggaggttgcagtgagctgagattgcgccactgtactctagcctgggtgacagagtgagactccaatctctagaaaaaaaaaaaaaaaaaaaaaaaagcagattctaaactcacagtgctgctgctggctgcctgagcttgtgtggctttggacagatgacttaaccactctgtgaagatggtatctgatgcacaggaaatgctccaacgttggctcttgtcgtcatctgtgcccatgtctccctcagcagcctcctgactggccttctccagtctcctggtttggattgaggctccctagaccctacctttctgagactggtatctagtcaggttactctgggagatctccaccccccactgcccagagagcaggttctgagctcttcagtctctccaccttctggccccggctgacaccatccctgccacttctcctggggtccccaaacatctgtggtacttttgtctttcttgcccttggtgttcccactctgcagaacaaccttctctccaggtcaccactgatcgcaatcgcgctctcctttcaaggcccagatcaggtgtcacctgacctttgctgtcctcagatcacacctccctgtagcgactggctcgccagtgtccctctctgaccgagctgtgcactcctccagggcagcactgtcagggtctcccccagacccttggttgtgattctctctccttgtcctgaatctcagttttcctgatacatgggatgctacctgaaggcaggtttcaactttcaatctttttttttgttttttgggtgagatggagtcttgctctgttggtcaggctggagtgcagtagcgccatctcggcttactgcagcctccgcctcctgggttcaagggattctcgtgcttcagcctcctgagtagctgggaccacaggggcctaccaccacacctggctaatttttgtatttttagtagagacggggttttgccatgttgaccaggctggtatcaagctcctggcctcaagtgatccacccacctcagcctcccaaagtgttgggattacaggcgtgagccaccgctcctggcctggaggatttcagatttaaagcaaagaggatattttccaacaaagcaactgcttttcttttttctttttaaattttgtttatttatttttaataaagatgggatcttgcatcttgcccaggctggtctcaaacttctggcctcaagtgatctgcctgcctcagcctcccgaagtgctgggattacgggtgtgagctaccatgccctgtctctttttttgtttgttttttttccaaattgaaacagggtctcactatgttgcccaggctggattgaactcctggcctcaagcagtcctctcgccttggcctcccaaagtgttgagattagaggtgtgagccaccatacctggccctgtagaggggaggcattgatgaaggtcaagaagtcctgttagctctgccttcagaatctaccccaggtccttttagttctctccagcctcactgctggaaccctcacccaagccaccaccttgcagtccacacacggccactgggattggggcggcgttctccgcgcgaaatctggctgtgctcctcccccatgaggccctccaaaggcttcctcttcttaggatgaaacccacactgccagccgaagctcctcaggctcccaccctctacaagctccttctgctccagccacactcaccaggcccgagttcccacctagcaccttccctgggaatgatctccccctggttggctctttctacttattcagcctcaaatgtcatctccactgagaggcctttcctgacctgctgagcttgattccctcccctccccagtcacattactccgtgttatggtacccatccctgtctccttagcttgtttttgtctgtattggctcttccactagactgtaagttgcatgagggcagggatgtctgtttaatcccagtgctcaggatagtgtatggctcgtgatagatgcctagtacattttaaaatgagaacgaatgaagtttgggagaggctcagagcagtgagtctcccccttgttgggggactggggagtgcctgggaggggctatctggtgccagcggtttggagtggctgggatgactctggaatcctgtgaggcccagtcagtttctttggttctcatgcagtgcagtgccctcagacctaaccattttgttccgtgctggcttgaaagggtctgcctccctcccagtgcagcccctgcctctcctctttctcgccccccgccctcctccagagaaagcaggtggtgagggctctctaacccagacaggacttgctgttcagccccagcttgaaattgatttcctccagccctccttgagccaggccccgtgaacagaggaggggtctgagccaggcctcctaggccattggtgggagggagaatgagacagccatttggcccacaggccaccaacttttcccccccttctctaaaagacacacaatggcagttgggctgcacctttgtgagtcaccggtgatagcccatcataaattgttatttcctatatttccagagcagctttatcgggcgttgcctgtgcagtccgggaaccgatttggtatggggtcagttaacatgctgtcttgttgaaatctgtcatcatgcccatataaggcaaactccttggattactttttaccttggcagaatcacaggaatgtcaaggtaaccaggccacctcagcatagctctgattctcacccggtcacctgacttgcccgccctcccccatgactcacccagtggctcagcatggggcctgctgcactgtggctgctggaatctgccaaggacctcctgggactgcccttggttttgtgtcttccttagagtagatcaaatgagaggaaccatgtgaagtagctcacacagggcctaacagagcaaacacaagacgtggaaagcagacttggtgaggcttgagtttagtttgggggttgcgggggtcccagctctgctgcttaacagccctgtggccatgggtatatcccccagcattcagagccttatctgtaaaattagagcacgcagaacaaaccctggtacacactaagtgctcaataaatgtgagtcatttgtgtaattatagtagggtaggccttatgccccacccagtcataaaaatgcctcttgctgttgttggttcaggctcagccccttagtggctttcatggggcaggttgacatggtacccagagtcctcctcggtcctcttcccatggtgtagtgagagcactcaggaccacctaggcctttcctagaaaactgaacccacaccttcccagtgctgccccaccctggtcccccaccccctgcaggacaaaccactcctcccttgttttggggccaggagtcagatctgcccctgagagcagcaggggcccctttgtcctttgacgtcatacccacaccgctcctggagacagccaccccttcatgccagccccaggaaggcttgtaggtggggcgagccagggtgagagtgtagccctgttcctcggccagggcagatgtttcaccatttttaatggagcaattatgagtcagaggtttcagtctctactggttcctcccgatcctataattactctttggctatagaatcctattttgatctcttcttttcttttctcttctttctctctctgtggtcatggtcaggtttttctttttttaaatcctcccaagacactgctaatgttgtctgtctcatgcatccaaggaatctgagatggactgaatattgtcaagggaaaaaaaaagagacccccaaatccagagtgatttcttaacccacccaaatggctttttgtttgtttgtttgtttgtttgagacggaatctcgctctttagccagggtggaaggcagtggcgtgatctcagctcactgcaacctctgcctcctgggttcaagcgattctcctgcctcagactcccaagtagctgtgattacaggcacatgccaccaagcccagctaatttttgtatttttagtagagatagggtttcaccatgttgaccgggatggtctcgaactcctgacctcgtgatccacccaccttggcctcccaaagtgctaggattacaggtgtgagccaccgtgcttggccaacccacccaaattgtgtaccctacaccatcctagtgcttgggagccaacacccactcacaggaggctaagggcaagtttaggtaactcttaacaccacgaattagttgcctgctggcaaacttcaaactccaagcctgaaatttctggttggagtcacctcccagatggactcagggattcattcaccccctcatccagtgctcacggagcctctgtgaggtgcaggcctggagaggagccctgtggcctcagcaaagggcaggcaggctggtgagcacccaacctctggatcgaggggactcaattatgcggataaaggcccctaatcctctcagtgctccaaactcactctgcttctgaaagggatcttcgtaccctgggttcagagagtaggaagcccgcagggaccgagtatgcatgaaacaagcccaagtctgtgggggctgtacatggtcaagatcacagatttccagaccaagccagctccaccctagctgggatgcccaccctgagacacccctctctgctttcactggaataggatggccctgacttggccgggtggactgttgaatcagagcctctcaaaacaggaaaaaggaaaaggatcaccaagcaggagtttcagttgtcaaagacaaaacccttaccacgattaaagattactccagggcctcgcatattcacccttccaccagcagggcccagtttacggatcatttgaatactagcaaaaaaacaagccatctgctggagagattgaacagagggagaaacaggagtgtttgccctgcttccagacacccctttcctgtggcagttcctgcacctggcaagatctactggggaattcccggggtcccactagctcaggacgggtgtgtagcacttgcctaaataacaatcccatcagtgccctgtctgaccttttctccccaaatgccaaaggcctcttgtctggatgaacaaatccctgggcggatttgtccagactaaaacgttaattctaaagactgggccccttaggcactcgctaagattccaggccacactgtctcaaggccagaattggcttacttggctatctttttgaaagatcaaagtttaaaccagatgatctgtagtcccccacccccaccctgaaacctgagcttagctgtaagcattgaaagtaaatggggtgtttgtagctcaccctccctgttctccaggtgaagggccccgtgtgcctgatcatttcatagcaaaatgctagatggggccagaggaggccccagcctctgctgctgccctaattttaaaactgccttttgggagtgtaagtttcctctgttaaaggtagttatttcaaggtaggcctcaccatctcctcctcctggtgagaagctctgcctggagggctgagcactgcctcccgctctgtgggccccacctgccttgggttgagacctatctcttcctggactctgtgtggggagtgcaggctcttccccttggggagaacccagttctttgacgtataatctgagtggtttgggttggttggttggttggttggttggtttcccatgtgtgggatggctccggaagtctgtttgagaacagaggcaggctcagatgggagcagctcctaccccgggccgcctatccccctttaccctggggtttcttttagctccaagcatccattccagtctaacaaatctggtggcagagtctcttttttttttttttttgagacagagtctcactctgttgcccaggctggagtacagtggcacaatctcggctcactgcagcctccgcctcctgggctcaagcgattctcttgcctcagcctcctgagtatctgggattacaggcgtgtgccaccacgtctggctaatttttctgtattattagtagagacggctggtctctactaatagttcaagacggctggtcttgaactcctgacctcaaatgatccacctgcctcagcccccccaaagtgctgggattacaggcgtgagcccctgcacccagcccctctggttctactgagacctcagatctttcatttatggaacaagggggttggattagattgttcgctctcagccctcacttcatgttagactcactaggtggactttgtcaaatgtcattgcccagggcccaccttgagggaatctgtctcattttgcctgtggtgaaattcaggtatttttaaaaagctcccaggtcccatacatctattgtcaattgattttcaacaagggtgcaggaccattcaatgggggaaagaatagtgttttcaacaaatagtgcaggaacaactattaatagatacccatctgcaaagaatgaagttgaacctttacctcacaccatatacaaaaattaactccaaacggatcagatacctaaatgtaagagctaaaactgtaaaactcttagaagaaaacacaagtgtaaatctcatgaccttgggttaggcaatggttattagatatgacagcagaaacacaaccgaagaaaaatagataaatcagactgtttcaaaactggaaactttttgcttcaaaggacactattaaagtaaaaggacaacccgcagaatatttacaaattgtatatctgataagggtctactgtccaaaatgtataaaggactcttaaattcaacagtaaaaagacacaccagttaaaaatgggcaaaggattcaaatagacacttctccaaagaagatctacaaatggtcaataagcacatgaaaaggtgttcgatgtcattactaattagggcaaatcaaaaccataaccactacaaatggtcaataagcacatgaaaaggtgttcaatgtcattactaattagggcaaatcaaaaccataacgtggttgggcctggtggctcatgtccataattccaacatttttggaggtagaagtgggaggatggcttggggccacgaattggagaccagcctgggcatcatagtgagaccctgcctctacagagaattaaaataaaaaattaggccgggtatggtggctcatgcctgtaatcctagcactttgggaggccgaggcgagtggatcacctgaggtcaggagtttgagaccagcctggcaaacatggtgaatgaaaccttgtctctaccaaaaaaaaaaaaaaaaaaaaacccacaaaaattagctggacatggtggtgggcgcctgttgtcccagctagtggggaggctgaggtgggagaatcgcttgaacctgggtgggagaggttgcattgagccgagatcacgccattgcactccagcctgggcaacagggtgagaccctgtctctaaataataataaaaatgagaaattggccaggtgtagtagcatattcctgggaggctgaggtgggcagattgcttgagcccaggagttcaaggctgcagtgagctatgatgacaccactgtactccagcctgggcaacagagtaagaccccaaccctaaaacaaaaaaaaacagaaaaccacaatgagataccactgcacacccaccatgatggctataatcagaaagtcagataataagtattgactaggatgggagaaatcagaaccctcacattgctggtcaaagtgtaatgtggtgcagcttcttgggaaaacagtctggcagttcctcaaaatttaaacatgttttgtatttttagtagagacggggtttcaccatgtcacccaggctggtcttgtctcagcctcccaaagtgttggaattacaggcatgagccaccacgcccagccaagttcctcaaatttttaaatataagaggtatcatatgactcagcaattttactcctaggtatatgcccaaggcagttgaaaacatgtccacataaaacttgtacatgaatattcacggtggtgctaatatccaaaagatagaagcaacacaaataatgcccatcagccaatgaattgataaataaaatgtggtatatccatacaatggaatgttattcagacaggaacgaagtactggtacatgctacaacatggctgaaccttgaaaacatgctaaggagaagccaaactcaaagatcatataccatatggttccacttatatgaaatgcccagaataggtaaattgcaagagacgaaagaaaggtaggttagtggttgccaggggctgggggctgggtaggagggaagtggggttggagagtaactgtaccagttttgcggtggtagacatgttccttgtatttttggttttttgttttgttttgttgttttgagataaggtctcactgtcgcccaggctagagtgcagtggcgctgtcatagctcactgtagcctcgaattcccaggcttaagtgttcctcccacctcagccttctgagtagctgggactacaggcaagagtcaccatacccagttaatttttaattttttttttctttttctttgagatggagtctcgctctgttgcccaggctggagtgcagtggcgcgatcttggctcattgcaacctttgcctcccgggttcaagcgattctcctgcctcagtctcctgagtagctggaactacaggcgtgcgccaccatgcccggctactttttgtattattagttagagacgaggtttcaccatgttggccatgagagacaggactagctggatttcctaggccgactaagaattgctaagcctagctggggaaggtgatcgcacccacctttaaacaccgggcttgtaactcagctcacacctgaccaatcaggcagtaaagagggctcattaaaataccaattaggttaaaagcaggaggtaaagaaatagtcaaatcatctatcatctgagagcacaggaggagggacaatgattgggatataaaccccaggcatttgaggcgggagtgggccaccccctttggttcccctcccactgtatggaagctctgttttcactctattaaatcttgcaactgcacactcttctggtccacgtttgttttggcttgagctgagctttcgctcaccatccttcactgctgttcaccgccatcacagacccactgttgacttccacccctccggatccagcagggtgtctgctgcatttctgatccagcgaggcgcccattgctgctcattcgggctagaggctcgccattgttcctgtgcggctcagtgctcgagtttgtcctaatcgagctaaacactagtcgctgggttccatggttctcttccatgacccacggcttctaatagagctataacactcactgcatggcccaaggttcaattccttggaatccgtgaggccaagaatgttaggtcagagaacaaaaggcttgctgccatcttgggagcagccactaccaacttgggagctctaagaacaaagacccaccggtaacagccaggctggtcttgaactcctgacctcgtgatctgcccgccttggcctcccaaagtgctgggattacaggcgtgagccaccttgcctagccttgttctggaattagtggtgattgttgcacgatcttgtgaatatactaaaactccctgaattttatgtaaaagggtgaattttttggtatgttatgtgaattacatttcaatttttaaaaattgattctccaaattatgtacatatttaaagagtacatgaaagagagggagagaaagaaaagctggatgcgagatgccgcaacctgattccactcactcctagatttgttgagtacctgctatgtgaaaggtaccagtccaggcagtgggttcccacagcaaacagaaccctcctctggggagcttatgctgcacttgggagggagactggttatgaacaaagaacatagtttttgatgatgaaaagtgcagtgagtaaaacaatgcagtgtgaggccgggtgtgttggctcacgcctgtaattccagcactttgggaggccgaggtgggcggatcacctgaggttgggagttcgagactagcctgaccaacatggagaaactccgtctctactaaaaataaaaaattagccaggcctgtaatcccagctactcgggaggctgaggccagagaatagcttgaactcaggaggcagaagttgcgttgagctgagatcatgccattgcactccagcctgggcaacaaaagtgaaactccgtctcaaaaaaaaaaaaacaaaaaaaacaaaaaaaaaaacccaacaacgcagagtggagtgatagcctaggggagatgacagagtccaggaaggcctcctgggttgctgacatttgaggcaagtcctgagtgatgagacaaaaccagctctataaagagctagacgaaagtcttagaccagtatttctcatgaggaggagacagcactccaaaatccatcctttggcctggcgcggtggctcacgcctgtaatcccagcactttgggaggctgaggcgggtggattacctgagatcaggagttcgagaccagcctggccaacatggcagaaacccgtctctactgaaaatataaaaattagccgggtgtgatggtgggtgcctgtaatgccagctactcgggaggctgaggcaggagaatcacttgaacccgggaggtggaggctgcagtgagccgagatcatgccaccgcactccaacctggcgacacagcgagactctgtctcaaaacaaacaaacaaacaaaatccgtcctttgcagcagcaacacgcacgctttctggcacctcaaaggggattgtccaagactggaacactggctgcagggagggggccgggtgcaaagagctggtttctgggtggacacgcaggacctttggaatgctcgctaccccactcagcagtatttatacctcttctccaactgcgaagtcagagctttttcatgcaggctgagaaaactccgaataaggcaacttcaggccaggacataagacgcattccatatttcactgtaattgctttcaaattaggttatgtcgtcatgtaacaggcacacacagtgcacttgctttgcccctggctggggttgggtcctggacaggctgccccgtgtgtcgctgaactgccgcagtgctagccctgattgcctgggcagtagggctgtctgcgtcccacgttgctgcacccatctaatttgtggctgtgttattgtgacctgctcgttttctgttctttcaacctgcttcctggcttttatctccttcagaatctggtggcagtggatcttcaaaaagtgctcaggtgtgcagtctcacaggccagaggctccacgggcccccttgccagggcgagcatctctgcctgtgccgctggtaacccagattccagaaggcttagccgtctggccctgaaagcgcctttatagttggtgatgaagcccatgggctggggagccgtttctgctttcaggaactgaaaagatgccccagtggggctaggccttgcctgaggtctggcaatagcctgccagatgggtgataagaaggcctacccaggtgataagcctacccaggaataaatagctgtacctcccctgtgtccaagccctggacacccttccctaggacccatggaagcaggaaccatgggcagcgtcagaggccacagcaggcaaggtggaagttcaggaggtgggacggcgccctccccctcaaagcaactgatgccccagcggagcgacaaaccctacacggtatttcagagccaaggtttgaaaactcccagggtgctagggagctccgtctggcctccgggtacctggggttggggctggctgtggccagttgcagtcaaccctgagcctgggcaaaatgcatgcaggctggtcctcctgggtgatatcctgctaggcgggtgggcagtgtacacggcagaagagggttgcggcatgaggcagcaaacgtttttttctaaaatcttgtcaagcgtggggtccgtggaatccacatgtgagcatcagcctggtgggtggggagagtgaagcctgcgatccagtctggatcatgtgctacacagtgcagagccggcatgctcacccctcctgagggatcgctcgagcctatttctaggcccaaagcgactttgcaagagactccctttattctgggcttagtggaattccagcttccaacagccatttccctccacccccttcagttctgagaacatgttttgtaacaggaaggcaggaagaaaagagaaggcgagtttgttcagctgggtcagccgcatcccaccaaggccctttcttccctccagctcaccatcgctctgcccactggaaccactcggttgccctgtgtctgccgaatgtttgtttcttaatcagcgccccagagtagagagggctttgcctcttcgggttgagggagggaatcattgatgaatggctcattaaagcccactgctgccacattcctgggtgcttaggtcacctcctgaacaatatccatcattcattcacctaccgccccacatcctggcggctgggaggggtccctgtgacgcaggaaggactttatgaccagagatgctaggtctccgtctccctcctgcagcccacagtgacaaagcagaaactgctcttggggccccctgaagcccgccttagctgggtcaccatgggccttggcacacggaggggtgacagtggatcccaactcaactgacaagcttgcctttctctgttcttccaccccccttccccgcactcacaccctgtgctattttagcaaccagagaagcctctttaataggctgcccgtgtgcaggggcaagctctgaagcctcctctctgtggtttggttcacatgtgttctcaaagacagatgagtccacatccttccttcctccctagataggtcaagggctgggtgcaggctgccttcacaggagggccagggacaggctgggaggagcggggccaccttttgcgaagcgggtgatctgctggggcgttgctctgcctgcctgccttgttctctgagtttacctctagcttggggaccaagggtgggctggggccttctttttttttttttgaaaccgagtcttactctgtctcccaggctggagtgcagtggcgcgatcttggctcactgcaacctctacctcccaggttcaagcgattctcctgtctcagcttcccgagtagctgggtttataggagcccgccaccacgcccaggtaatttttgtatttttagtagagacgaggtttcaccatgttggccaggctggtcttgaactcctgacctcaagtgatccgcccgcctcggcctcccaaagtgctgggattacaggtgcgagccactgcgcccggccctggctgggggcttcttgacctgactctgctgtctctccctcactggccagcacctcccattctactcagacatcgtggaatgaatgcccaccccgtgtttgtatgtatcatctgtgtctgtgtgacattaagcaagtcactgaacctctccctgcctcagtttcctcatcaaatggagatatatcgcatgtgatcatggggttggaggttttaaagagttgctaatgtgtaaatagtaagaactagcaattagccgttatagcataattacctttaatatgtcatgccccccgcacccccgtgctgaatgtaattttgcgggggggcgggttgagacagggtctggctctgtcaccgaggctggagtgcactaacacaatctcagcttactgcaacctctgcctctcaggcacaagctgtcttcccacctcagcctctcgagtagctgggactacaggcgctcagtaccacgcctggctaatttttgtagtttttgtagagatggggttttgccatgttgcctaggctgatctcaaactcctgtgctaaagcaatcctcccgcctcggcctcctaaagtgctgggattacatggtgtgtgccaccatgcctggctggccagaatgtaaatgataactgttttgcttcctcctgtgtccagtacataatagggctccaagtcagtatttgtgaggcaggtgcatgcctcttagttgcggtcctgagggcatggccactgccacgttctggacagtcagagtcgctgctgcccctggaagatgaccgcgatcatgaagcccaggagagctcgatgctttttgcctttccctcctcccacagagggctggcagctctggttcctcccaaatgaaatagaaaccttgagtttgcatttcttctttggcgtgccggcagggcacctctgccttcctcttcctgccagggggaggaagtttctctcaggggctcttcaccctgctttattcctggccatcacacattgacccttgtccccttcggctctttccctgcatggcagggacagcatgaccgtttaatggctttgtgaggccagcatgccagcctcacttctttactcccttccttctcggagtgggctctgtcccttctgcaggagggctttggcacatgctcttcccagtatctggaaggtctccctcatttttatcttattaactcctcatccttcagctcagagtttgagaatgacttcttcaaggacacctttctgtgtctgcctcaccagtcgcttggtgcccccccaccccgccaccatgctgaccgcactcttcagctcccatcccaggggaggtgacacaaactcggccccaggagcccagcacctggctttaaacccagctctgtaactttctaggtgtgtgactgatgggagcaagccacttcacctctcaggccctccgtttcctcatctgcaaaatggaggcagtactagcacctccctccagagatgattacgagggtgacagaattagtaagtgaccaagtgcctcgagcagtgcccgcccctagtagactctatggaagtgtctgctgcagttattgctgttattattaccacttttcctaagggcgttatttctggagtggactgatcgcttgattaatgagatcagacctggagcctcatgagagtgtctgcttttgctcactgttatggattcagcacagggcctggccctctgctgacccccagcatatgcttgtccagagaatgaatatgtacggacccatggtggcctggggcatcatgaggtcggctgcccacattctgagaattttgcatggtggagggcggcgtggtgggcgcatagggcccccatctatagaaaccacctctccacaccatccaccccacgcagcgtagtctaaaccgggtagggagaggaaggatggaagcagagtgttatttttgtaaccaagtagaagaagcgatgaatttttaatgtcccattcgaactccagctcctactcaccagtctctccgcatggagaagtggccgtcatggtcgacctgttcccaagggtggccttgtgagtgcaggctctcctcaccagagctgagggctttgtgaacctctgatgtcaatagatgcccctcatcttccaggaggacaaaacagggcaaagcaagacatggggtgagaacaggagtgcatcagtggggttccccaagcctgtgtcaggtccggatctgggtgggagttcccttctgcgtcatccaggccaggcgagtgggcatcctccctgagcacctgtgcttggggctttgcctgtgtcagtcaggaagacagagtacacggaagagttaccattgctttcagagcaaaccttcctttgacatgcatttaacacagcacggagtgattgacatgtgtccttgtgtttaatccctatcttaacctctcggttactgtcctgtttatcagtgaggaaactgaggcttattgcttgcctgaggcctcagtggcagaagcaagatgtgaatccgcacctgtgtgatgcccaagccagagctcttgtttactacccagagaagatgagcacaggtgggatgtacgtatggagggcgggtagggcagcagcccctctgaggacaggtggccagaacccaagcggcgaggtttgttcacagcctccacagggtggggtggggccatccgcagagggtctcctgccatcccattttccctgcataccagtgggtggtctgagagcctttgcagagaagagactggatctcagcacgtgcttatgtgcgtgtgtacatgcacacacatgcgtgtgattcatctggctcttactttatgccaaggagcctgtcacatgctttaaatgtattttccctagtttaattcttagagcacactgcaggaggtagattctgataaatccatcttacagggaaggaaacagacttaagtaggtaaagtcacttggttgaaaacatggaatgagtaagccaaggggcaggtattcaaacccaaacccaggtctgtgcccctgcagagcctgcaggagcagcccacacaggccaaggctgtgaggggtgctgtttgcacgcgtgcgtggccctccctgcagcccaggtgcctaggtctgggcctggcaacaccagagcacggggccttgccctcggggaacagccctcttttgtcctcaggctgtgggatgtgtcttggctactttgctgcccagcagtgcctgctctcaggcacatgtgagagtagaggcctagcatccgtggccacttccttcccagcccatttgctgctgccctttgctctgcagggctgctgggctcctgggctccacgcctgcttgctgcctgccatcaaggctggcagtgctctggggctgtaaaggtgcaggcgccgtacttcccaacccctggagctcgcacatggtaggagagaaagctcatgtgcatgcaacatccaataagactaaaagtgactgggggttgctacgggagaggtgctgagggtgggccggggacagagcaggcacactgtggagggggtgggcaggactcctgagaccagggcagggagggaggagatgctgggaggcacagggccatccagagagctgccacttcctgagcattgccatgcacgctgcaggcatggccatcttgagtcctcacactgcccgtggcctaggtggggtcttcatccccacgttgcagaggaggaaatggaagttaggaaggttaggtgacgtgcccacatgagtggtgtaagcatggttcccgccctgggctctctgaattcagtattgtatgggggaggctgggaaggtgagttagtactctccgcagtgagaacctgccttggctcccctcccctcaaggagttcatagccgtgggagggagggagacaagaactgttggagacaagaactgttagagaccagagagcaagggcgtgatgtggtctgcagggaggaggctgtctgaggcagaaccgggtcagggaggccatggtgcgggtaccctccaggcacggcatttggcctgacttttgaggggtgcccagggttggctacatggcggggcggaggtatctttagtgggggaacagcgttgtgccaccaggaggggtctctgtctcccaggtagaggaattctccatggtgagaggtggtggtgggggatggtctagctgtccactcttgccccctttcggatttggaaggaagccccatgctgggtccacactggtatggcgtattaattaggcagctgctttgtctgggagggggctttgtgtcgagtctccctgaatgagcagggctggcgacagttgtcaaaacacatggtgcttggtcagagcccccgtagaagccccttgtcctccgcatggcctccgcctgcacccggggcgtggaatgtgctcttgtgtgtccctggctgtctgcttgcttctacactggcccctgcagatggagggggtggggtacaggggttcctataagaagcagacacttggggtttttcccaggtcctgttgcaggagggtgcgtgggctggtttccctgaaggcgcctgggcgtgttggtgttaactgatctgagatcttctgtggccctgatgtctatgagcatgccccagcttgcagggggctgagtagccgggcaccaccaggaggctgcgtgccctgtgcttgggtgtacccatgccctgtcagcatcgttggtctgttagggtcagggacttcggcttcttgtttagtaccctccatcccttccagttgatcatcagaaacattctccttagatgcggctgcctgaccccggtgagggggcctgcctcccacttgccttccagcctcctctaagctgcactgagtcttaaaaataggaaggatagggctgggtgtggtggctcacgcctgtaatcccagcagtttgggagaccgaggcgggtagatcacttgaggccaggagttcaagaccagcctggccaacatggtaaaaccccatctctactaaaaagacaaaaattagatgggcatgttggcatacacccgtagtcccagctactcaggaggctgaggcatgagaatcgcttgaacccaggaggtagagattgcagtgagctgagattgcgccacagcactccagcctgggtgacagagcgagactccttctcaaaaaaaaaaaaaggaaaaaaaagaataggaaggatagggcatggcatgttctccaggagacagagggacgggggcatcttgcttgcaggaagccaggcgacacaggcgtgtgtgcagggctcagagggtctgtgttcctggcctttcctgggagggcttgctcttgggctgcccaaagctcaaagagagactcgaggaaatcctgcatttatgggagcttttcttttcctgccactttcctgttctgggttgtatctgtgcacgtgattggaacgtagcagcctgagctcctgcctgaggagagcagccacgggtcacggaagccagggtccagctggggcctttgggtctagctggcagatgaagggctggccttcatcaagaaaacaagccccatgagggcaggagcccgacctgttcattccacaccaccgagcctggtgctcagtcatgtttgtgtgactgagtgagccggcggcgggctgaggcgcttttgtctggtgtgcgtactggtctcccttgaggcagcttgggggtgtggaaaaagcacatgttgccaaaattgacagacctgggttcaaatccaagctctgccacttaccgcctggatggtcttgtgatgggtcattaaccaccccgagcctcagtttcctcacatctgcctcccggggtcactgtaaggatcagaaacaatgtgtgtatcggccatgtacggtgtgtgtcggcgagtgctccgtggcagctgcggttctcctgaggtcagagctgcggccctgcaggtgtgtggagagagccccgacagccaggctgactctgcgcactgtcctttgttctgcttccccagaccttcacggcatggtgcaactcccacctgcggaaggcaggcacacagatcgagaacattgatgaggacttccgagacgggctcaagctcatgctgctcctggaggtcatatcaggtgagactcccagccacgcagtgcggccgagccctggcacaggtgctctgccacagcggtccccagagaccctgcccacccagctgtcccattgctcctggggaggagagggcaccccttaatagctgcacggtggtctgatgggtggggccagagtggcctggtgggccagcagaggaacctgcttttggagaacagaggagactctaaagcctctctccctctcgccctctctccctttctctctctctgtctcgccccctcttttctctttgtgcacttctcaggggagcggttacctaagccggagcgggggaagatgagagtgcacaaaatcaacaatgtgaacaaagcgctggactttattgccagcaaaggcgtcaagctggtctccatcggggcagaaggtgagctggaggtggggcagcgagggtcctgctcggtttctgacctttaggctctgaagcacaacatctgcatcctgaagagaagttttgttggtggcagggcgcttggggcactcagagccccagtacatactcagcagtgatcacaacaactgctcttgatatgatgctgggcccacaagctcccccaaacccttggaaaaatccggtgggcgcagtccaaatctaggaagtgcaacccacccaaccacgggggcgacggcttctgcagggggaggaatggttttgactcggactcaggtcgccctcactggttctccttgtgccaggctcagcagacagtgacaaacatgtgccatggcctctctctgtaccaggaacacctttctcattatgccctgcccggtatcagagaaggactggaggccccatgtcaggcattgggacagggagtgcacggccaaaggtcagtgcctagactttgccctgtgtgcatgggcttggagaattttgcctctgaccaccccaggatcctcctgggccccacgtagataaccaggaccacagtccactacctgcaggccctcactagagcagcaggctctcagcaggggcccctgggttgagctcccaggcgcttttagagacaggcgaggcctgatggagccccagcagcatgagctcgcagtccactcattagtcagagtaagatttcttcaccctgacatccatgttgtcccagcttctagaaaaacaaagtaaactaattgccgttaatgacagggctctgagagtttggccaagactccgggccagaatgtgtgtgctgagttccaaggctctgccccggcccaggacctctgcgatgaggggtgccaagccttgcatgccacagtcgaggtggttggtgtttgtttaaaaaaatcacaacccaaaaattcagtcaggccctgagattttctgtccttgcatgggtctttcctccaggctctgttccagccttctgcttctcacagctgcatttattttgctcaaatgctagtctgtaaatacagaaggggttagaggagagacccatgtcagtcatcagttttcatttggagaaaaacttggtctaaaaatgttctctgttcatgcccaaattggttcactcccaatccctgtgactgtggggccttggaacaaagcctaatggaggcgttcctggggctcaaggcacctgagaaccccgccccaccctgtccccctgtccttccacatgattgggcattcgcgggagcattggcttcccgtgggggtgatgagaggggccggaggcacagctgcaggtcagagaagcagctggtggatgtgtcatgagaaacgccatcctcctctcctcaccggaactccataagccctccgttaccagctgcacctgtacttgctgagccggggagctgcggccttgcccagctctgcaggcccggccctcaggaggtgcacagaatagatttcctgaggctcgagctgcctcgctgcactaaggggcaggtggtgctgctcagtttctgggtctggggctctgaaccctaggacagggtggacactgggtccctcccctgtctctgggcagcagaatgagcatatttcctcctctcaaaacccgaaagctgtggctcatggacacccccttcctctgggtgtgtccccgggggaaggtgagccccatcttctctgtgacctctccacctgcttccaagcaagcctgccctggagtattctgctcagaggtcagtgagcagggtctcctgtggtgtcctgggcctccagctctgcagttagctttggaactcacccctgtgcccagcccttccccgagagtgcttgcagcagtggcgcccctctgtcttctttggaagccactccatcatgccccttgcatatggcgtgttgacaagttgggaggactgccctaggcacggctggctgatggactctgggatgaggcactgccttctctcacccagccgcagacacacagctgtcctgggccttgcagagatgatttttctcttaagttactgaggctgaagaaggtgtggtccaagcccttcttttgagaagtttcagcaatttttttttttttttttttgagatggaatctcactcttgtcacctaggctggagtgcaatggtgcaatctcagctcactgcaacctctgcctcccgggctcaagcaattctcctgcctcagcctccagagtagctgggattacaagcacccgccaccacgccaggctaattttgtgtttttagtagagacggggcttcaccatcttggccgggctggtctcgaactcctgacctcaggcgatccacacctgcctcagcctcccaaattgctgggactaaacaggcgtgagccaccacagccggccgcaaatgtttgtttttaggttagttcagaaagcgtgcagtctggcctcaggcccgtgctctccccttcctgacaacacagcagccatgcttgttcctcactggccttccaggcactggatccagtggtggtcagagcagccccgccctcacgagggcaggcagacagtgaacaagtaaacagcccgaccaacatgtgatttcactagtgatgccttggggcagcacaggggccagggagaggaactgggtggcgggttggggagctccttgggacgggcagtcagggaagccaccacgagaggtgacacaagcagaagcttacacgatgagaaggaccagccagttgagggtcgcaggctaggggcgtgctttgtgagtggacagagcgtatcaaagcaagaaagagcctggcttgcccagaggatgcagctagagaattccagcaggatggcagggcctgggccttcagggcaagccctttccctgtgggccaggcatggtggctcacacctgcaatcccagcactttgggaggccaaggcaggaagatcacttgagcaggagtttgagaccagcttgggtaacataataagacccagcctctacaaaaagtttaaaaactagcaagatgttgtggcatgcgtctgtggtcccagctactcgggagactgaggcagaaggattgcttgagcccaggcagtcaaggctgcagtgagctatgactacaccattgcactccagccagccagaccctgtctcaaaagaaggaaaccaaccatgctcgctgctgtgtcgatgtggattatgggcgggaagggtacataggaggcagccgcattgagctctggagatgacagtggcttggtggagagtgtcggcagtaggattggaaggaagtggacagattcacaataaacaataatgtagtgcacatttgctgactgcgagatgaaaaagaccacctttgccctgagagtgggggcccggggtgcccccctgtagtcaggaggtacgcagattacggcagaaatgtacagagcactgagagttgagagaggtgtgaacagaggccacacgcctgggaccagcctcttggaggagcggttttttgagttgggtcaggagaaggagctggctgcggggccagggacccttgtggccagaagcctgcaggcgctcagcagcaggaggctctgggacagtgctgcctagagactgttccctgcattttctcctgagggaggtggaggaggacaggcctgggagatgcaaccagggggtggtttggagcctttctctagatggggctggaaggccaccttcaggttgggcggaggagcctcactctggttttaacgaccttctgccctctgcccccttccctgtgtgcagagattgtggacggcaacgcaaagatgaccctgggaatgatctggaccatcatccttaggttcgccatccaggacatctccgtggaaggtgacagccacctgtactgcccccgcttcccacctgagtcagggcgggttagaggagagctgaagtgtgatcttcatgcttcaagcctcttcctgtttccttggggtcactcacagggcctggcccttgcaggggtagtcagtgggtggcaggtgaagggaggctcctcccagctgcctgcctcttggctccagtgccttccgagtgcctttgctctcacagcctcatctcagtggaccctcacgccaccctcatgagatgggctaggatggctgggcccgttttacagtccaggaacccaagtcccagaacagactagtgagagagttgggcctgggcctggttctctgtctgcttgacatccccatccttgaaacttggcccccatggacccgttatgagctcaggccgtccaggaatggacaatttcgcttccctgcaagcacctgtgtgcacacaggatgggcagagccacctgggctagcgtgcaggggctcccaggtgccaggtcgcagtgatgactgggagagatgtgcttcctgccctcgaagggctcccggtctgtgaggacagccgagctatccacggggaacagaagggccccctaggcctctctacagctggtatttcaccttgttcaaaagaggccaaggccggtatcaagggcctgtctgcagtgtgttctggtggtgaaaggcacaggcttggtggccaggcacatggcacagattcaggccctgacaccaccacctcctggggcagccctggtcaagcgactctcctcggggccgtgaggattaagcagggccgtgtgtcctggcagttgggcctggcagcatccgtctgcatccggaatgggagtggctgtcccgctgctatcactgctgctgttgttaggacagatatcctctccccttgggtttcgtttgaccccaggcctgagccgaaagtcccatccaacttgggctgagttctgagggtttatttttgagccagtgctcactgtctttgtgtgttttgcagagacctcggccaaggaagggctccttctctggtgccagagaaagacagccccgtataagaacgtcaatgtgcagaacttccacatcaggtaagcgccagtcctggtcatcctctcctttcctctaggaacctgagatccttcctcccacctgccctgtttgctgtgtttttgtcgtggtctgtgagatgccagccctcagtcagcccctccctggccacgggccctacaagcccatgggaaggtcacctggtcctctctgaggaagaggaggcagtttcccagccatcctggctgaaggcagtaaggtcagccctctcgccggcctaatagaacgttcttcgtccccaggcaaggtgactctcagaagcaacaataaagcttttcatttttgagacagggtcttgtgctgtcacccagactggagggcagtggtgtgatcactcatccctgctgccttggcctaggctcaagtgatcctcctgtctcagcctcccaagtagctgggactgcaggtgcatgcagccacacctggctaatttttaatttttatttttagtaggaacagggtctccctatgttgcccaggctggacttgaactcctgagctcaagcagtcctcctaccccggcctcccaaagtgctgggactacagatgtgagccactgcctgcctctggcctcttcctttattttgacagctcaggagtgaattgtttttagaattgctagtaaatttagtgttggggaaaaatgtactctgtggctgctaagatgaacaagcctcagctccaccatgaacctgcttccctcagggtgagcgggagatgagacatgtccaccatccccgtagctgaggcgagcatgggcactgccgcatgaggtccagggggcggcaagaggcaggcctgcctggtggttgggagcactggctctgggggcggtcctgaggtcagatccggtttgccttgtggctccaccctctgagtctcctggatggcccgcacaggaatgaagagcagggcctcatggggtttgcagcggcctcaggctctctgggacccttgctgggtacagagggcttttcccatcgtgctcaccctgatagcatgtggtccctcccttggtcactcttctctgtgtgtcttcttttttttcctgccactaactgactgaatctttctatagtttccattcattttcttcaactagtaagtatctagcatgcccgctgcatgccgttagtggagatacagtggcacccaaacaaagttcccatttgtgggaagtttacaccacagcgcggggaccagctgttagcacagcggccagtaatcctgcagcataacttcagtgagaagtgctgcacaaagacagggaagtcagatgaagaaagttccctgggtggcctttctgaggaggtgacatcgagcttgacctcagagggaaccaacccttagagggtctcagggaggagaatgtgacccatatagcttgtaactgaccaacttgtggccttggggaaggtctctttcctccagagaccagcatgccaagtgaaatcctggcatttagccagcccacggactggccttcctgtaagtcaggtccgccagggtgtggaggccacacagcacaaacaccagcatcctgcagtggccacctcccccgaagcggcctgtctggttcagggcggcctcccatggaaggtgctagcagttataaagcagttgtcaggagtcaggcactgatccaagcatttactcatttaatccgcacaacagccctatgtagcaggtatgtcactatccccatcatacagatgtggaaaccgagatagcctggcttacccgaggtcacactgtcagtaggcagaagagtcaggatttgatcacagactgcctggccccagaggtcatgcttgcagcctctctgccacactgtctccatgcagtgcctggcacaggccagactgcagtgaatgggaattagtcactgctgtgggtgcacagggccatacggcactctcatgacagtgagcgggccctcctataacctttgcctttccttccccagctggaaggatggtcttgccttcaatgccctgatccaccggcacagaccagagctgattgagtatgacaagctgaggaaggtgagtgtctccagctccccttgatggcccacagacgtgccctgtctgaccccctaactccgggtcaccatccccatgcccttccatcgccagcctccagatctgggttctgcacgcagatgggcagcctgggagagccttgtgcaggctctccgcaacccctggctcggtggctgactctcacctcccttattcccctcgtggactgtccagtctccctccatggcactgcaaccaacccggggttatttaagggcctggccagccatgctttataactccccttcctcaatcttctggattctagaacctcctctgcccaaaggggcagagggcaaggaattccaaaccatcaccacaagcccatgttgcccatgcagggtcctgctgtcatttgcctgtacaaagcctgtatggatccaggccctggccaccagaagctgccagcctcgtgggggaaggcaggacaaaaattgtgtccaaagcaaagcaccacaccaggccgtgtacatgtgctcaggctgaatggggtggcagggcatggggtcagatcagtgctgcggaggaggctagtgtaccccgagcgagcaggagccaggaaaggtcccggaagaagaggcagcttagagccagaggagggcttcctgggggaggcaccagatggcacccagcccgttccagccacagtgagcaagagagctgggccccggccagggagagttggagtgcagtgggctttagtcctgtaagcagtggggagcctgtgagggggctgggggacactttagggtggttgggacctgggacctctcggtttgctccccttacccagtccccagtgctctctcaggcctggcccacatcttccagtcaatgtgaaaaccaggttttagggcaaggggcttaagctagggtctgtgggtggctggaaattgtatgaaaagagtacacctgcatttttctggagaaaaagccctggtttgccccacaaagatttcacgaggcactcctgtgagtgggaattgaatttatccaggcggtgccctcccgctcacacatcacacgtggctgagaactgcctgaagaaacccccaaccctcgccctcccgggtctctccctctgggccagccctgcctccctcctgctcctgcaccctgccctgacggagttcttgttgtccccacttgcctccttctaggacgaccctgtcaccaacctgaacaatgccttcgaagtggctgagaaatacctcgacatccccaagatgctggatgcagagggtaagtcatctcttctgttcagccaccactgtgcttcctgatggccttttctgtccagggctggcctcgggcaaggggctgtgggcacatcagagctttgggtcaccttggggagctggcagagccagcaagaagggctgaatgattctgggtgaactggggacagccatgtcgccctgggagacagagcaagggtagcctgggctggccagatgccttcagggatgaagaagcgtatggggagggggagctgaaggatcaactctcctgagggtgcatctcctcagggcccaggaagggcaaggtggctgaggaggggtgcttcaggcttcctgcgagcaaccctggcctctccctccctacctgcagcaggcatggagtatggagcccgacaaagtggagtgttttgttttttccttttccggctttgctccatttcccagccatgcactgccccatttcctagccatgcactgccccagctgggacctgtgtctctggcctctggtggcccttggagttgactgtcctgctgctccttgaggccattctcagagagaggaagtggcctcattttaatccgcttcccacagccttgtcctttccagacccatgggagagggaggggctgagggtgtggctgagcccacccaagtcacgcgtcactctgcaggtccctctcccccaaggccgtggccttgggagcccgtggatcccagtgagtgacgcctccaccccccgccctactcgggcagtttaacccttgttgttcacttgcagacatcgtgaacacggcccggcccgacgagaaggccataatgacctatgtgtccagcttctaccatgccttttcaggagcgcagaaggtaccgagcagggccaggcaggccctcctcgccgccaccgcgcaatgccgccgctgcctctcgcctcccgtgctcacctcatttctcttgcagacggcagtggcctctctccaactggaagccacccccagctccctggcgttgctgccccctcagccttagctcacacacctattgggtacctcatctgtgccaggcttttccaggcattgaggatgccctggtgactgagtcagacaaggtccctgttctcagggcacttccatgctagtgggagaaacatacagcaggcctgtcacaggagtggaatagagaaaatggggccagatgggggacagagatggctggggtgaccttcagctggtgctgtcaatgtggaggggtgaagtgagcaggtacttgcagcaggagctgctagatgcaggctggggcacaggtgttccaggcagagggtgaagcactacgaaggccctgagacaggaagaagcttggcgtattcagggaccagctagagaggagtgagtgacacgcagtgatgggtcaggcccaacaagacccttgtggtgtgggataagaaattcatgttccactctgagggccatgggagccccttagggtcttactccgtggtgggagctgctcactcacattttcagacagatcatttagcaactgactcctccaacccaaaacaaagctgcctttatagggcccacagctagtctgtctccagcccaggccggttagaaaaggaatgcaccctattcggactccacaaaaccccgcaaggcatgtccacgcaggcctggggctggcttccagtccagagcaagtgctcttcctcctgcatgagcctcaggccggcccggccgccctccctgcgtctttcactctctcctgcctctctctctctttctctctctctctgtgcagatattgtgggcactctgaggccagatgagaaggccatcatgacttacgtgtcctgcttctaccacgctttctcgggggctcagaaggtgagctgggccaggcacacctcgctgctggggctgcagacctgccttcaccaccgcccttgcatcaccgctggccatctgtggttggagccctggccaggccgtgggccgccacaccacacagactgaccctgccggcctctgactcggaaggtcccctggggcaggtttcccgcctggccggtgctgggcctgtgctgaggagtcacagacctctgtttgaacacagcccaccctgggaggtgggtggtggcatcctaggctctcaggcggggaaactgaagccctgcattacagtcaatggcagagctgggatttgactgcccggcgttcccactcgccctgtccatcatctgcaccagggctgcctgcctgcccctgccaagcccttcgtggggagcactgggctttacccgttttgcagctccttcctgccaggaaaggctcagcatgtgcagcccaacctgcactcacggtcccagccctccagaggccaggcagagcccacagagcttgcgtggcagtggccgccctcctgggcccagctgacctcatgctgcctcacagctcctgccgggccctcagcgttcacgcagaggcccaagcactgctccccccgcttgccttgtggtctctgaagtatctcaggcagcattcccgatgcctgctttgaagtgtcagcagttggcacaggttcagaggaggaggcagaatcgattcttgtttactgaacatgtactacacgctaggcaccctccaaggccttcacatgcacaggcttccagagggtccctgtgcacacccccaggagggctaggcgcagttagccccatttgagagaggaggaattgaagtttagggaaacagctattcctaaaactagaaggggggggccgtaccttctgtggacccctgctttgagcctcccaactagcaggtgcattacctaccgtcagtctggcctggccccactctgccacctcttggtactgtgaccttgggtgggtcacttgacctcagcttccccacctgtgaaatgggcatcgctgtagttcggtctcacaggattgttctgggcgtgaaacgagctcctgcaggcaaagggcttagcacagtgcctggcacggcagctgccatttaggcagctgccagggagccacagtggtggggagtgtggttcttcccagcctcgggccagaaaggcctcttcacctcctcagcatgcgattggagcttgtgtttggagtgttctgctagagggcacgggccaggagggtggagggaggacccctgacccacactcccgcgggagggtgggcagggaccagcagcaatggacgattcgtcaccacagaccccaactaacagcatgtttgccattggactcacccctacgggccccgaaccagccccctgcccaccacatggcctcaccagattgcttttctttctacccacactgctcccctgtgcttagggctgaactccagtctggaggctctgagggattttgggggagcagggactggcaggcaagcccaggacagtatgggtgggtgctgaggcactgggcctggaggcttgtcactggcccctctctgagggggtagtggaggcccggctgcagggcgctggctggtcagaaaggaaagtgctgggtccctgtgtgctcctcaggacagccccgtggtgctgctcctgctgcctcgtttccccagagacccagtccaagctcttgcaagagtgctctctggggttcatgttttataaacgcagagtgaaccccaggtctagcgccagtgtgcccattctgtcctgagatcatttatttctagtcaccgaagcgttcccgcctcgttcctttattcactcactcattcagcaaccctgaacaccgccagtgcactgagccccaagctggatgcgggaactcagcggtgaaacatgattcccttgccttgcggcagccccgtgctcacagagaggacttgagtttcgggtgccagttgtctctgccaagttaggagtcagggactgacctctgtgacccccacaagctgcagccctggctgtgttttccacactggcctggggcccatgttcattggctgaggaacctcttggacctcatctctgaggagcaccgcctggggccctgggtgtgtgtcccgcagcatggcgcggggtgtgcacgtgcgtgtgtgcgctcacacgagcaccggctgccgcctccccgcctgtctccaggtgccatgtgtggaggggagaggctgggcgtcgctgcctgcagcactggctctgagccgttggccaagcctctccattttccttccccatcactctgtagaccctcctcactctttctgttcctgttctgttgccgtttcaactcctcctcttggaccctttctgtgcttcctgaaaggtacctggtctctctctccccgtgtgcaccccctgcctcctctacactgttcactgccccctagcaggacagggcaggacgctctcctgtagttcaggcccagggactatgtccaccactctcaccctccaaagccccagcacttttctgccccacggatggtgacttctgtcctctggagctcctattaacattgcctccaaggcaggagagtggacaggcctgagtgtgctcctgtgcacggaccactaggctcctccgggacccgggcgcccctgctctgttgcccccagctctccagctctcggcttcccatcctttcaccttcccaccgggagagactcctccgcagtcttaggtccaacgcagccgacccgtccagcctcaccctcctctgtgtggggcactagagggtttgcgagcagcagtgggagggctccccaaccctcctcggtgcctccagggtctgggctttctggacccaggggcattttgcagtcagcagtgaggatgccaacaaggcctattgggacagggcaccatctcactggagctgtgcttcctctccttcccctctgtgaggagttccgtgggccatggaccagctgctttcaagggacgtgcccgtcaggagggagggtggccagcccccaggcagccctgactgtgtgctcccctccaggctgaaactgccgccaaccggatctgtaaggtgctggctgtcaaccaagagaacgagcacctgatggaggactacgagaagctggccagcgacgtgagtgttcccccagtgaaagtcagggccacctcattatcctcagccagaggtcactgtgactcttgcagggggaaagcaggtgtggcagcgagatgacctagaaaaggctgcgtggtcacagaccatggcatttagccagctggtgtgtacacgacctctccgtttgcttccacaaggctaagggtcagaccggcagccaccttgccagccagcccctgggctcccgagcttgggttcctacagagatgctcagggacagtgtttcctgggcacctcagtgctttagaatcacctggggagctttgtgaaagcccctcttcccgtgccctggccctggagagagtgattcagaaggatggagaggggcctgggaaccaataggatagcaggccctgtgcaggtgcttaacgagcagcccagcaagacgggaactcggattatcctcctttccaagtgaggaaactgaggcccagggagggtcaggcacgtgcctgctgttacatgactagtgggacagagagctgggcttcacccaggcagccctgctctagagtccaaacccaatgcttcagttggaaataagggtggttagtacaactcttctggaggctcttcatttttgaaatctccatatttaaaaaataaacgtaggctgggcgcagtggctcacacctgtaatcgcagcattttgggaggccaaggcaggtggatcacttgaggtctggagttcaaaaccagcctggccaacatggtgaaaccttgtctctactgaaaatacaaaaattagccgggtgttgtggcacacacctgtagtcccagctacttgggaggctgaggcaggaggatcgcttgagcctgggaggcagaggttgcagtgagccaagattgcgccactgtactctagcctagcgacagagcaagactccattaaaataaaaataaaataaaataaaatttcccaaagagcagtggtttgactgctcatctagaaccagtggttcccagattttgcaatctcatagaccaggaaaatttgaaaaactattggatgtccaacctaagagggccagctttttattttgccaagttacggatgttttaaaaagaaacactaccatctgttaccaccagcacttctaacaccaagataaggtaaaaaggttattcttagaaccccagccattgccaagaaagggcagctggcagcacgcctcacaatgtatccacacagaggtatttctgtctttgaatttctcactttgccagaagttggcatttgggaaccacttctccagcttgtccgtgctggcagataactgattttgtacttctagaattgttttattatttttttgagatggagtttcactcttgtcacccaggctggagtgcaatggcacgaccttggctcactgcaacctctgcctcccaggttcaagcagttctcctgcctcagcctcccaagtagctgggattacaggcgcgcaccaccacgcccagctaatttttgtattttttttagtagagatggggtttcaccatgttggtcaggctgatcttgaactcctgacctcaggtgatccactcacctcagcctcccaaagtgctgggattacaggtgtgaaccagcgtgcctggcctagaattgttttagaatgtccaactgtttgttaccctttctcactccattaaagatctgagtagttcctaaaagaatatgtttgtttctttttcaattttattttctaatttatgtcccaggcccagtgcacatactggcctagccagactgagccaggtgggcttgtcggccttgcccttgaggcacttagtgagcccagaagcagtcaggctctcagcatggagctcagtgaagacagcggcagtggggcatgtgacagcatggaaagggacctttttggcgggggcatgggagtggaggtttcccctcttagacctgagggaaaagactaagagcaaaggcatgggccaggcatggtggctcacccctgtcatcccaccactttgggaggctaaagtgggattgcttgaagttcaggagctcaagaccagcctgggcagtatactgagacccccttctctataaaaacttaaaataaaaatcagccaggctcggaggtaggcacctgtagtcccaactacttgggagactgaggtggaaggatggcttcagcccgggaggttgctatgatcatgccacttcactccagcctgggtgacaaagcgtgaacctgtctttaaaaagaaaagcacaggcaggaacaggaagtaacaagagaacagtacagtgatgcagggacagggagggagcccacgctcccagagttccaggttgggggttctagcaggaatcgtggagaagttgggctggggagcaggggtaaccccctaaggtggggccctcaaagatccagatcccatgtgcccataagctggggggcagcccgtcagcactctgagggtcccccacaaaggccacgctggcttctgtggcccacagctcctggagtggatccggcgcaccatcccctggctggaggaccgtgtgccccaaaagactatccaggagatgcagcagaagctggaggacttccgcgactaccggcgtgtgcacaagccgcccaaggtgcaggagaagtgccagctggagatcaacttcaacacgctgcagaccaagctgcgcctcagcaaccggcccgccttcatgccctccgagggcaagatggtctcggtgagcaccaggattcacatgggagcagctgtgaggggcagaggcagccctagaactgcctgtgggcagtttggccagcgtaatctttcctaagttgttgatgtcctgtgggacatggcatggcctttcggatgcagtggtcggggaggggtgcacttcactcggcattgtgctcccctttggccctcactcactgtattttacacccagggttttatacgcatcccaaatccttgccacgggttgtgtgggtgtggagtggtgtgaatttggagccgtggtctgccatgatggcatgaccgccatgtgcttgaggcccttcatcagcggaggggcagtgcgccctggacggtaccacctccccatctatggtattcatccattcattcatgcactcacccgttcacgcattcattttgttaatccagaattgattgtacctgctgagtgctggggggccctgtgtaggcatccaggtataatagcaaagcatgacacagacatgaccccagccaagttctgccaccttcccatcagcatcccttggagacatccccctgggtgcctccacttccttgtgatagccctgcctgctcctgccctgccccaggacatcaacaatggctggcagcacttggagcaggctgagaagggctacgaggagtggctgctgaatgagatccgcaggctggagcggctcgaccacctggcagagaagttccggcagaaggcctccatccacgaggcctggactgacggtacggcccagctctgccccactctgcccagccccgctcccgtgctcccctcctgtctctcaggcatgcatgggtgtgcacacacagccccctgccacgttgggtctgtttctcaggtgccctttcttgctgcttgggagcatgtgtgtgtgtcagaaatgctgctttagagccaggttcagtggctcacacctgtaatcccagcactttggcaggccaaggcaggaggatcacttgagcccaagagtttgagaccagcctgggcaacatagcgagaccctgcctatacaaaaaaattttagaataataaaattagccaggcatagtggtgcacacctgtggtcccagctactttggaggctgaggtgggaggattgattgagccagggaggtcaaggctgcagtgagccgtgattgtaccactgcactccagcctgggtgacagagcaagaccctgtctcaaaaaaaaaggaaagaaatgctgctttggattccttcagccccagaaagcagggaccattcaggggccaggtcctctttgttgcccagtctgccctcgcctcagaggtgggaccctgtcagtcatccaggaacacagccaagccccctccagcacttcagggaagtgaccttacacccatctgtttgtcccctctgcgtgtcttccccatccagggcgagtgtgtggggcaggcctcttccatcccccgcaccctgtgttcagagtcggcttccctctcccacacctctgtgagcgtggacggaaggctggggagcccatgttcactggcacgtccctcaggctagaggagggcctgcctcctgggcctgctgccggaccacagccagtgctcaccctcagacagtgctcacccactgccttcggcccacccttcagcatggcccacctgtgagctcctcccacctcccatcccttcccagagcctccttcccgggcctggctccccctgcaggagcgccactgtgctttctgttctcggcagccctgcagctgcctggccgttggctccagatgtgggatttcatcacgtccctggccctcttttgggtcatgccaaggttgagatttcagatcccaggggtctggaagccttcagaaagctgccagtgcctgggagagccacaagagccactcacaggactcctctcccactctggccaccaccttcccaacacagtctccctggccctccggccgccactccgcccagctgagcccttccttgcattcctgagtgcattttctcacccctccccaccctggcccgcatgcgagtgtgcagctccacacggcctgcagccctggccacggcccagcttgtgccctcctcacatgagctcagctcgccattcccgcggcagctgccagcctcagagcagcccagcccctttgctaccaggaaagagtgcgagtgagagagtggatagtgagggaggaagggcctggccaggccgggtgccgcacttccctcttgcctggcagaaaggcacccatgtgaggagagcgtgttagcaccgatgccatcttgtgtggttggtggcctccatccattcccggattcactcattcgttcaacagacagctcaggtggctccagccgtccttatccatggaggcctgggcgtcgccctgtggctgaaccttctgggggtctttctgcccacccatcagctcttcagtccctctacagggctccatgaggccctgcagatggtttcctgaggccaaggggctgggtgtggtggccccactggcattcctcccctgggaagggctctggggcagccttcacctgaggtgtttagaagccagctcagtctccggccagggcccagctggttcagcggcctccacacgtccctgccccacccctacctgactgggcatccacgcgggtctgcccatggcgtctgccagagcccccaggcaggctggcctactaattcccaagactcagagcctctgtcctctcaagtagcagttacgtgaaacaggacaggcaggccctccacaccccagggtctggtcgtagcggcctcctccgccctggggtgggtgggccaccttcactccacacccctcaccatcccccacagcccgcagcgggagggtcgtcgtggatgcttctctgagggacttgatttcctgggaatacgaccaaccccgaacgaccccttgtccccactccagttgtcccttggcctggatcccagatagctgtggcaatggtccgctgcccacatcctctcggtgcacccttgccaggactctgcggaggcagagggagatgtcacctgctgtttctggttcctgcccctgggagaaagcagttggagaagggaattgcaaggccgccttgtggctgagcctcctgccccagggctgcgcagcagggccggtggagccagagtctcccaggcctcccacttcttggccatcagtgccagagccgatcctgtggggagtctggtaggtgcctgacagttgagactgggagaggctgaggtgaggctggtactggctccatgcctgctgtgctcgaacaccacctcactgaaacttgagaatagttccatgccacacaggtactggggctggccccattttacagatgaaggcacaggcccagagaggcctcggtggctgcactgggcgggcagctgtcaggtgctgggacagagctgaggggatctccgctaccacttgggggaagcccaaggtggtgtgcctgaggcagggcccctgtaggagctggggtgcagccaccttcccaggctggcattttccctgcggttccctaaagaccttcacttgcttgcagggcttccttgagctttggttctgggatgtgtaattagccaggatcagggactaataacagcgttcctcctttcctttaaagggcctgatggtgggcccgccccaatgcacacaggacaccttaggacagcgtggggcacttagacgtggagaggaccaccacctgtgcgggtgcagggtcagggtcctagaagaagctggctctgatgcttccccttccccaagcctgctgggacatgggctttgaccccgggtgcttctccggatcaaagccctccagaaacaggtgctacctttctaagccgtgctaccacggcccgatttgtatggtttcctactaacaaaagttgctaagtttaggacacacaggttgagatggaatctctctctcaggctgagcaaccctgaagtgtccatccaggtccatccaggttacagttgggcttagagatccctggagggtacggaagaagattctggaagtttccatgccactgtcattggcatggaaggatgtggggtccacagtctctctttccctccctctgcttggacagcccctccagactcctgccccacagctgccgtgctgtggtctaagcgtctctctgctcctaccagggaaggaagccatgctgaagcaccgggactacgagacggccacactatcggacatcaaagccctcattcgcaagcacgaggccttcgagagcgacctggctgcgcaccaggaccgcgtggagcagatcgccgccattgcccaggagctcaagtacgtgcgggctcaggacactatcatcacctggctctcaccacagcctgcccagactggtggcggcagcacgccgaggcccagcctgcctcaaggcctggaatagggtccccagtgccccaactgcacctccttccagaagccagggaagggccttatgggatgaggccttttgcccatcctgtctcagccccaggtgggacacctgaaggatttggattctctagcaggagggaggtgtctggccccttgtcttgattcttcaggctttaggggtccctgggggtgtcacctctcctggccaccccaagtaggccctggtcccctgatgggatgggccccagcctccgttgctcccagccataggtccctgagggaaccaggctgcacagtgagcctattgttctgctcggccccttccctttcttgctcagaatacacttattgtaagagcttccaggcagccgggctccttcccctccccacccagtcagataaacttgtgtacacaattagtacgctgagggtcgcgctggtgaatggggccttattccaccagtgcagcggccagcagcagggcgggcccaggcagcaggaggcccaggccattacttcatggaaaatccacaggccctcgaggggcagcagggctcccaaaatagccatctgctcaaaaataggatccttggctataactgctctttccaccgacacccccaccccaccacagtcacccccaaaggtctgcttattcctatgagtccaaggcccgtttattcctgagtccaaggcccagccctgatgccccagtggagccccatgctgggcagagctggtttcctccccgactcactacccactactgtccgggtgctttgagggttccccattggctcagccagaggcaagagtcccgtggggccatcacagcatttggcacagttggggcactccaggggtcctgccaccaccacgtccaggccaaggagagcaaggtcacagatgcagcaccctcgggggtgtgggggtgggacacaggcagcttccccagtgacggaagagcccctggaagctggtaggaaacagacttgaaataaaccctaggcttgcccccttctcaggccctgggcaaagctatgtgaaacccattactctgctcaggaacaggcggtccccgaagcagctctctggacggtagccctgaaggaacggaagggagggctgtccgggtcctgtcttttctgctgagggggaattacagaggcctgtggaccgtccaggatgagccggatgggcagccctgctgagcactgattaatggcgatagcaaaaactcactgagctctcagggctttatgtgtaccagctcatttaatccccacagcaactgtgtaactgagggaaccgaggcacagagaggccaagaggtttgcccagggtcacacagcaagggagtggttgagatgggaatggagcccaggcccccagccctactgtggagcacagcctcagcccctgtccgctgtctgtggctggctcgcctgctccccatgtcctgttcctccccagagtcgttccctgccccctacccctcctcaggccccaaggcctggttgaagggccacactcttagctgatagtggcagaatgagtcagggatgggtgagcaggaggaagccgcttcccttctcacccctggttatcacctgttaaccagctctgttatcaccccttcccttctaccctgggggtcccatgggccagaaccaagctgtgatttgattgaccaattagtgattggttgctgatatcctggaatgttgactgccccaacaccctggcctgggaaccttgggggtagatgggtccaatccatctagccacttgcccttgccgagtctcattgctctctgcccggcccgcagcgagctggattactacgactcccacaatgtcaacacccggtgccagaagatctgtgaccagtgggacgccctcggctctctgacacatagtcgcagggaagccctggaggtgaggagggggtgacatcacccacggagctctgtgcccctgctgccccggggctggtggtgtggatagtgtccagacctgtgagctccccccacctcccacggagaggatgttctctgactcctcagggccctctggacccctccccacccctcctgctcacatactgacctgccttccctctgtccctgcccccttccctcccacacactagaaaacagagaagcagctggaggccatcgaccagctgcacctggaatacgccaagcgcgcggcccccttcaacaactggatggagagcgccatggaggacctccaggacatgttcatcgtccataccatcgaggagattgaggttcgcaccccccggccccccatcttcccaagagcctctgtggggctgggccgccccctcactccagctcctcccctagggcctgatctcagcccatgaccagttcaagtccaccctgccggacgccgatagggagcgcgaggccatcctggccatccacaaggaggcccagaggatcgctgagagcaaccacatcaagctgtcgggcagcaacccctacaccaccgtcaccccgcaaatcatcaactccaagtgggagaaggtgggccggggccatccgtaggggctggggcaggacggcggggctgggggccacctccctgaccgctcccacaccgcgtctcctctgccaggtgcagcagctggtgccaaaacgggaccatgccctcctggaggagcagagcaagcagcagtccaacgagcacctgcgccgccagttcgccagccaggccaatgttgtggggccctggatccagaccaagatggaggtgaggcacggctgagccccacagagctgagaaggttccaagagagctcccgtagtgagggggtccccggccagcccagggcctgcagactgaggcgcctggcagagcaggtcccaattctcaccacccaggggccgtgatcaccctgcggggttaggagagtccacagagcttgcgcctggaatcccggcacctggggaggctgaggcgggcggatcgcttgagcccaggagttcgagaccagcctgggcaacatagtgagaccccaactctacaaaaaatacaaaaattagctgggcatgatggtgcgcagcccaaggaggtcgaggctgccgtgagctacgatcatgccactgcacttcagcctgacagcgagaccctgtggtctctagtgggctacctatgggaggtgggtttgatccctgaatgccctggtctgatgattgtgagactcaggcactattgaacctctgatcctgtcctcccagctctaaaatggggatgaaaacagttaccttattacttcaacaaatgctttttgcaccaactaaccagccacatgagtgctgtcattcttacagcagttctgaccaccactcactgagcactcactacataccaggcaaccaggctggcagcaggcaacctcgtttaaacccagcaagcctgagagggggtccgggtgccaggcaggtcagccctgaggttcatgccagccacgcagcatgtggacttgtgggtgccgagacatggagtgcccgaggtcaggagctgcagccaggccagggttcagatcccaactctgcctctaacagcactgagctgtcctccgtgagcctcggtttctacctctgcagtcagggcctgccacagccctggcctcacagagaggtcaagggtaaaatgaagttgggcacagggagcgcttggcagagaaaacctccctgtcattgtcatagctgctttaacatgagagggcaggaccggaggggacagttgtgagcagtgggccttccctcccagggacccatgggccaaggccccaggccaaaggggccccggggaagatgcaggccagcagcgcgagtgggctcctccaggtggtcagtgggggcaggcccaccagcctcaccccaccgcctgcacccacccccgtaggagatcgggcgcatctccattgagatgaacgggaccctggaggaccagctgagccacctgaagcagtatgaacgcagcatcgtggactacaagcccaacctggacctgctggagcagcagcaccagctcatccaggaggccctcatcttcgacaacaagcacaccaactataccatggaggtgcgcggctgccccgcccgctggcctttccaccagcatggccggcttcctcactggaaatggttcgggccagtgagaagatagctgtctgctgtctgttgtttttcactctgtttaaaaattattgaagagaccagcactttgggaggccaagtgggaggatggcttgagcccaggagttcaagaccagcctgggcaacatagcaagaccctgtctctacaaaaaatgaaaatattagccaggcatggtggtgcatgcctatagtcccagctccccaggaggttgaggtgggcagattgcttgagccagggaggcagaggttgaggtgagccgaggtcatgccaccacacttcggtctgggtgacagagccagactctgtctcaaaaaaaaaaaaaaaaaagattgaaaagactagatcaaaatgtttagacatttttaaaaattacactttccctagcactgctctcatcaccatgacaatgcccctcacaggacaagctgttctaggggcccacagagggcaccgtttgccctgtggccttagcagtatcagccttgctcagggccagagccagccagcgggtgccgggtcagggcagcagctcccactggctaacactccggggacattacaagctggtcgccgtcatattggtagcttgagaaaccaaaagactggacactcttgatccaacccatacaggtccacagatgcttcaaaccagagttggcttttttgtttttttcccctgagagccagtggtgagacactgaccagagtttgtccaaacagtctccacagggatcccggcacaagattcatgggtccttgcccttctgctgcccctgtagctgggaaacacacttactgtggagacagacattggcagaggcagcagggaggcaccatggcccgtgtcccctgtgaggtgtacaggagagcaggggctttccccagggcgggaggacagttcacagtcctccacgtgtgaaccacggtgaggacagttcacagcacccggcccacgatcacgcccccgtctttccgcagcacatccgcgtgggctgggagcagctgctcaccaccattgcccgcaccatcaacgaggtggagaaccagatcctcacccgcgacgccaagggcatcagccaggagcagatgcaggagttccgggcgtccttcaaccacttcgacaaggtgagcagcctgccacctcctcggcctctcccctcccgccgttgccgtaccagcccacaccttcgtctctgcatctgttcgtccattcccatcacagttgctgagcgtcggccgccactcccagggccagcagggccctgccactgtcagggtgtaggtgtgcggcaccaagaccccagcctgggccacttcacacgcacaggcagggggccggaggtcccaagtcctgccttctggggtggcatcctcaccacccccagggcagatgaagtctcagcacacccaggctttgcgacccggtctgtgaacctggacacagacaccccgcacagtgcttttagaattcagatttggtccggcagcctcatcagaggggccctgagcgccagagtttgctgccatccccagcccacccctgccgggctgacggactgagaagtgtgcagcctcagctctgcacctggcgcccccaggacaggatacagtcccctctgtcccactccaaatcccaaaggcaaggagaaccccccccccgaccctccaccagtcctgggacttgtcctcagttctgtagcatccagctgccacccctgctgtgggcagagaggtcggggaggcctctgccttcctttgagcttccgaggttggggaaaggatgaaaggggcccgtgccgcccccgaccccacgtgtccctggccatctccttgtccatgttgcctctaactctgtgtttccctcccctacgtgtcccttccccctgccctctgcatgtgaccccgatccctcatcctggtctccacgccgcccctcccgcacacctgccttcggatggccccggcaggatcatggcggggcgctggggcccgaggagttcaaggcctgcctcatcagcctgggctacgacgtggagaacgaccggcaggtactgcaccctgggccccagcggaccatggcattaactgctctctctctctctctccttctctctttctcccctcgccatcccacccctgccatcctgtgtgccatctcatggctctcttgcctccctgcccacatctccctggaccccttcccttttacctggtctcttggggccgctgtctccctgctccccgccactgtcctgtctgcctgctgtgcacatggggcggcccctcttgcctactctgggcccggcctcctctgctatgcctgcgtcctcggagcagaagcagacaggcagcatggactccgatgacttcagggctctgcttatctccacaggatacagcctggtatgcagctctgtctccccagccacccgctcctcctcctcctcctcctcctcctcctcctcctcctcccccccacctctccccctcaccgcctccagagcttcctcgtcctcggggacactcctccgcccgagcagcgcagccgtgcctgcctcttcctctgctgcatctgccggggtggggtccctccgatgacttcccgagccccccttcttccctagaagtctccagaaagagggggcagctctcccactctctcccctttttctttctctttctctctttcttccccatcctccagagcttactcgtgagcctgggctgagggcagtagaccccagttccctgctgtgggagaccacgagaggggagggtgcagagaggccctgcttcccggcctggggcactgggggcttggaggcctgggtcagctggagcagtggcaggctctgcccggggccaaggctgctggagcaggcggggaacagggcgcacgcacacgtgggttgggccctactctctcggctgtttccctggagaccccaccagtgtgggcctggctgcccctgccccactaaatgtcgggtgtcccccaccccaccctctccttgcagggtgaggccgagttcaaccgcatcatgagcctggtcgaccccaaccatagcggccttgtgaccttccaagccttcatcgacttcatgtcgcgggagaccaccgacacggacacggctgaccaggtcatcgcttccttcaaggtcttagcaggggacaaggtgagcgagacccctacgaggtgcatgggggctggcgagaggggtccctgcagtgggaggggctgagggggccagtgtgtgggtggggatggctcagagtcccatcctgcctgccccagaacttcatcacagctgaggagctgcggagagagctgccccccgaccaggccgagtactgcatcgcccgcatggcgccataccagggccctgacgccgtgcccggtgccctcgactacaagtccttctccacggccttgtatggcgagagcgacctgtgaggccccagagacctgacccaacacccccgacggcctccaggaggggcctgggcagccccacagtcccattcctccactctgtatctatgcaaagcactctctgcagtcctccggggtgggtgggtgggcagggaggggctggggcaggctctctcctctctctctttgtgggttggccaggaggttcccccgaccaggttggggagacttggggccagcgcttctggtctggtaaatatgtatgatgtgttgtgcttttttaaccaaggaggggccagtggattcccacagcacaaccggtcccttccatgccctgggatgcctcaccacacccaggtctcttcctttgctctgaggtcccttcaaggcctccccaatccaggccaaagccccatgtgccttgtccaggaactgcctgggccatgcgaggggccagcagagggcgccaccaccacctgacggctggggacccacccagcccctctcccctctctgctccagactcacttgccattgccaggagatggccccaacaagcaccccgcttttgcagcagaggagctgagttggcagaccgggcccccctgaaccgcaccccatcccaccagccccggccttgctttgtctggcctcacgtgtctcagattttctaagaaccaaaaaaaaaaaaggaaaaaaaacacaaaacaacaaaaaccaaaaaaaaaaaaaa

SEQ ID NO: 15372 - DNA, 67345 bp, Homo sapiens
agcggcggccggaagctggctgagccggcctttggtaacgccacctgcacttctgggggcgtcgagcctggcggtagaatcttcccagtaggcggcgcgggagggaaaagaggattgaggggctaggccgggcggatcccgtcctcccccgatgtgagcagttttccgaaaccccgtcaggcgaaggctgcccagagaggtggagtcggtagcggggccgggaacatgaggcagtctctcctattcctgaccagcgtggttcctttcgtgctggcgccgcgacctccggatgacccgggcttcggcccccaccagagactcggtaaagacccaggggagttggcttaggccggcgcctggagcgctcgtttgagggaagagcaggggagctgggtctatcaggtgtttgggggcggggtattggcgatggtggcgcgtccctaagttttcagtgtagaagggggtgtggctctcggagtttggggaaagaataaaggagatgggcctgtctctgagtgggaaagggctactggacgggctccatgtagtgactgagcgcctgagaggggtttgctccctagctttgtgttcggggagggtgttgggaaagcggtaaggagtagggtggctggatcttgtttggagagggagatgtggtcagggttcttgccttagtagggaacaaatctagtgttgtgtgttcctaccagagccagaaaggaagggcccaaagctccagaattcttcctggtcctcgaaggagggaactagaatttctgctgtaggaggtacttatgcagtaatctcgttgggaggcggagactggagttggagtcttaagagttgtgtttttgcgaacatcctaagcacgttcttggttatttcaattgtagcttattggaggtgcttgggagatggggggaggcggaaacctggtaagccaactcgtgatgctgccactatgaatgctttccttgcacttttaaacaaagaaattatcaagagtgacgagtttgatgaatttagaggctagaaagtagagggttcctatttcattagattttccagagagattggattttaaggatggagatgcattaagggatctgaactttggtggaagtaagtttgcgtgaacttttagtgtattttaaaatccttttatctttcaaaaattgacgtgtaagatactttaattagtaataaagtgtgaaataatgttttcccagtgtgtgaaattgtaggcttgcatggttgtactggttcccaaatttcaccatgataccatgtgtagtattttttttctttatatttagtggacagaaattgtaatggattggtatggatactaaaggtgttgagagtgttatcacttgaacagctgtcttatgattctttccgattgaaatggattacaagtgactaatgaaaggcaagggatcttgttaggaagtgctgagaagtggtaagtcagtacaaattgaaggacattttgaggtaggattgtggttaggatggagggatagggtaagggtcttcattttaaggataaatgttagtaaaaagaataaatatgtattttgagatattaaaattatatttgcaccaccctgacacaactgtttcacttatgttattaatctgttgttcgtaggtaaaaataagcatgagtcccaaggaagcatacagtttaaagagaaacattactttctagatcaattcataacatttgcagatcgtaaggttttttagaccattttttttttccaagacagagtcttgctctgttgcccaggctggagtgcagtggcgcgatctcagctcactgcaacctccgcctcccggggttcaagcagttcacctgccttagcctcctgagtagctgggattacaggcatgtgccaccacgcccagctaatttttgtattcctagtagagacggggtttcaccatgttggccaggctggtctagaactcttgacctcgtgatccgcccacctgggcctccctaagtgctgggattacaggcatgaaccaccgctcctggcccatgtgtttgttttttatttgcaaaatgcagaccacctgtgccagaagaatgcatagacttttcttttttcttttcttttctttttctttctttttttttttttttgaggcagtgttttgctcttgttgcccaggctggagtgcaatggcgtcatctcagctcaccacaacctccgcctcccgggttcaagcaattctcctgcctcagcctcccaagtagctgggattacaggcatgtgccaccacgtccggctaattttttgtatttttagtagagatggggtttctccatgttattcaggctggtctcgaactcctgacctcaggtgatcagcacacctcggcctcccaaagtgctgggattaaaggcttgagccaccaggcccggcctctttttttttttttaaacgaaatatttgaaggacacacaagtattatacgtggcattggaaatacaaagatcagacgatatccatcttcaaatggttatagcatagggaaatagacattcatttaggacacttctaaaacagcatagaggagagtgctagagtacgttatagcaagtgttatcaccaaatgaatcttagagatcaagtctagttttcaaataaaggaggaggaaaatgagtctcaggaagatgctgtcagttgtcaatgatgaacataggccttgtgggtatttttcttttgaagaatgactttttttttcagtttgtttgacagcttacaatataatttgttacttaaccttaccattagattgagttggtcaagactagcaaatagtttcatagttgaaaaacatgctttattatttattttttatgtttattgtcctacaaatactactatattgcagtactcaatatcgattaggcatatgacaacatttttctgaaaggcaaaaaatacctaataaaatgaagcctggtttttagagtcctctatgggtcaccaaaaatgatttcaattgaactgttatgaattgcataatttaggaaagttatgagtcatatgagcttagtcatgatgatatcttgttgaagttgcagctggggtgtataagtctcactttgatttcaaaatcgttttccctttgtgttacttttaataaaagaggatgtagtgggtgggaggaaaaaatataggtcacagatgagggatgagaaagtttgtatctgaaacatgtattttcaaatttaccttgaggttattggcatggggattctccatattgcagtgctgatttcattattgacagcaccattttactcagtattttgacatctggctttctcttttgatgttaattttgcttactggctgcattcctttgaaacctaaatgcttaactgccctaactgctccaagggagatttaatgtaactctgctttatattagtctaagagataaaccatatttcaagagtagaatggagaggaattaagcagataattgtgatggggaaactggagagatccttttgactttcacaggatttcctagaacattaaatataggtttcctccaaggccaattgtggttgatttttggatccttcaccattttctatttgtgagataataagtgtatacagctggaagtgtaatgtgaagaaagtctgaaaaagattgataggaaaggaggacaggaatgggcttcattgaggtaacggaagtgaaatgaaaggcttttcatatatgggttgagcatccctaatctgaaatgctccaaaatttgaaactttttgaatgctggcatgacagcacacattacccctaacacacgattttttcactgttagtggtatattttttactgtgtagtacttatgtgtgaataggtataacaaaacgattacttattgtagcatgtaaaatcagtcaggaatgatggtgatgccagacaaccacagattatttatgtgggtggccgagacagtgacacctttgctttcgaatgcttcgttgtacacaaactttttttcatgcaaaaaaagttacttaaaaatattgtttaggccaggcgcggtggctcatgcctgtaatcccagcactttgggaggccgagctgggtggatcacgaggtcaggagatcgagaccatcctggctaacatggtgaaaccctgtctgtactaaaaatacaaaaaattagccaggtgtggtagcaggcgcctgtagtcccagctactcgggaggctgaggcaggagaatggtgtgaacctgggaggtggagcttgcagtgagccgagatcgcgccactgcactccagcctgggcgacagagcaagactccatctcaaagtaagtgaataaatgaaacataaatgaattttatatttagacttgggtcccatccccaagatacctcattatgtatatgcaaatatttcaaaatttaaaaaattctgatgaatgaaacacttctggtctcaagcattttggataagggatgctcaatctgtatctctttatttactcctaaaatcagccaaggaaatgggcatctctccgttcccccccttccttttttttttttctttgttgttacatgagttgtactggtttcacttcatttgacagtgttctgctaatgactagacgtgtatctctgacctggacttgttctctggagttcatattcagctgcccatttggcacttcaaatataacatgtccaaaattagttaccttttttttttttttgagacagagtctcactgtcacccaggctggagcgcagtggcgcaatcttggcttactgcaacctccacttcccaggttcaagtgattctcgtgcctcagcctcacgaatagctgggattacaggtgtcccccaccacgcctggctaattttttttttttttttttttttgtatttttagtagagatggggtttcatcatattggacaggcctgtgttgaactcctgacctctggtgatccacctgcctcagcctcccaaagtgctgggattacagacgtgaaccactgccccagccagttacctattcttttgattacaagaatgagtagctggacacagtggcttacacctatagtcccagcactttgggaggctgaggccggcggatgacttgaggccaggagttcaagaccagcttgaccaacatggtgaaacctgtctctactaaaaatacaaaaattagccaggcgtggtggtgcgtgcctgtaatcccagctactggggagactgaggcaggagaattgcttgaacccgggaggcagaggttgcagtgtgccaaggttgagccactgcagtgcagcctgggcagcagagtgagactccatctcaaaaaaaaaaaaaaaaaaaaaaaagaatgagtatcggatacaggtttagcctaggactaggcagggctgctggtaattgtggaagtagtctcattgcctaacctgaaacttgcatcctggttactggtcttgctggagagtcttggctcaggttacgtcccaggtctgttgaggagctcttgatagggaattagttgaagcagctcatactctatcctcctttactggtataaatccataaaattgtttagttcccaggctctggggtccctggcctagcagagagcactgctccctttttctcattccttagtcccaacaacccgcacctgacacttactacacgtggcctgcttccctgtcctgtgtgttttggggggtgctgaagaggaaggctcctgtgtcttcagcacaaacacaataaacacttcacagcagtactggctttatgttttccatttctgatatcagaagtaggagcatgacattgatagtgtcattttgggggaacttttcgtacttcatgcagcagagcagtgaagagtgagctgagtgccttggggttctgcagtacactctcaagtagtattttaggaaaatgcaatttgctgaaaaaataaaagaaattaatgtaaaaaatccacaagctgggcgcggtggctcacgactgtcatctcagcattttggaaagctaagggggaaggatcacttgagcccaggagtttgagaccaggctgggcaacatggcaagaccttgtctctacaaaaaaatagaaacaaaaattagccaggtgcggtggcatgtgcctgtggtcccagccacccggaggattgctcatgcccaggaggttgaggctgcagtgagtggtgattgtgccctgcactctagcctgagcaacagagcgagaccctgtctcaaaaacaaaacaaaacaaaaacccacacgtttccagaaccttctcatataacactttatttacattgttcttaaatacgtgtgggacggttatatacataccactatacttatgtgtatatatgttgatatacacacaaaattatatacataatttttgtttgtttgtttttgagatggagtctcactctatcacctaggctggagtgcagtggcgtgatctcagctcactcactgcaacctctgccacccgggttcaagcgattctcctgcctcaggcttctgagtagctgggattacaggtgcctgccaccgcgcctggctaatttttgtatttttagtagagactgggttttaccatgttggccaggctggtcttgaactcccacccttgtgatccacccacctcggcctcccaaagtgctgggattacaggtgtgagccactgtgacctgccatatacataattttttaaagtttcacgattagttttagcttaaaaatgtcagctctgggcttaatgaagaaaatatggatatactttatgtcaatgcattaaagtgaatggccataaaagcttatcccagagacaaaacaattcagatataagagaagtgggagagtggaaggtttatctaatcttctgtaggcaactccacagctacaaccagaaggccattttgttacaggcctgaaagccccgttttctttttattcttctttgaaacctttagaaggaacaaagtattggctactttttaccgctgatgtcagtgttaagaatcttgtgataacatagatttactctccctgctgaaaatcactatgtggctcatcagtaacacaactagacatgatgacttaatgcaaaggaagtcctatgtaaatgagcaatgaaattgcaactgtgtataaggaacaaaatagaatatgaaactccagaatcttttgttttcatttctgtttctcccaaggctctatcattcaaaactccagaatctttcagcatgcaattgtctcctgatatcagcccctctcttgttttgttttcttttttttttttttaatcacagtgagccacaacctaggagtcttttagtggtttctacttggtttgctctgcagcctaccagcagatttcctacattccggtcttgttcccctctagcccattctccacactgcagtcataatgaaatttctttcttttttgggggggatggagtctcactctgtcacccaggttggagtgcagtggcatgatctcggctcactgccacctttgcctcctgggttcaagcgattctcatgcctcagcctcccaagtagctgagattatacgcacctgctaccacgcccagctaatcttgtatttttagcagagacagggttttgccacgttggccaggctggtctctaactcctgacctcaagtgatcgcccaccttggctttctctctctttttttttttttggattttgagacaggatctggcctcgttgcctaggctggagtgcagtggcacgatatcagctcactgcaacctctgcctcctgagctcaagccatcctcccacctcagcctcctgagcagctgggactgcaggtgtacaccaccacgcctggctaatttttgtattttattttatttatttttttggtagagacggggttttgctgtgttgcccaagcttgtcttgaactcctggggctcaagcgatctacccatcttggcctcccaaggtgctgggatgacaggcatgagccaccacagctggcctataatgaaatttccaacttacagctattgccattatccaaagcccagaatccctgatttccttccatagcccttcatggcctgaccagtgcctgactctccagcctcacacttcatattctctctgtactgctctgcactgtagcctcattgagttgctttcacgtctttaagtgttgtgttctattttttgtggaattcagcatatgttatgcccttgacctaaggcctctcctttcttttccttctctggggtgctgcctcatccttctggtcttcaaaaccgtttccctgggaaaacatctttgactcagcaggcagggatcatgcccctgctgtgtctgtgcataactttctgtggctacttctgtcttggtctgtgatgtactttataataattttggtctttcctccagtgtcacaatactggaagtctgtttctttttctctgtgttgtatccttagtgcctgaaaggtaggaggttctcaataaatatttgttaaataatcaagtaaatggagtctggtggaaaagagaaaaaataagtgtagaatgtgtgtgcaagaaaggaggggtagggggatgaaaaagataacaaaagcacataacaaaacaacaaaaagcaaaaacaacaaaaaatgcagatgacaaaaaagataacaaaatgatgactgctgtggcaacttgtagaaagtaaggaaggtgctctcattctagagagaagtaggcagccattgtagttttttaaagagagaatatgggctgggctctgtggcccacgcctgtaatcccagcactttgggaggccgaagtgggtggatcacgaggtcaagagatcaagaccatcctggccaacacagtgaaaccccttctctactaaaaatacaaaaattagctggataggtggtgtgcacctgtagtcccagctacttgggaggctgagacaggagaatcgcttgaacccaggaggcggaggttgcagtgagctgagatcacgccactgcattccagcctggcgacagagtgagactccatttcaaaaaaaaaaaaagaatatggccagacactgagctgagatagacagtgcggcagtgtctggtattaactgtaataaactctactgtcagaagcaggtggtttatacttaagtttattgagagaattggatatggataagagataaactcttgggaaatggggagaaatataaattctgttgtaaagcctgtaaaaaattgagattactagtggttagaattttggaagtgaagtgcagtgaaatattgagtacctgagaggttacttgttagtgaaaacacaatagcagtagtacgtagctacagtttggctccaaaggaagaactgtttttactatagtttgtaatggcttcagaatcttcaatttgagatatccagttattaaaagagaatcaattgcagttgaaatgcattagttaagtattttaaagtgctttagcaagctacatttaaaaagtgcttattatagaaaatatacccaaaataaccaatgatgttactgtcttgtgcttattttttctagacctatttttatacatagttaagattatacaatatgaatatttctgaaatctatatttaacattataacatatgtatttttccatgttctttctttttttttttttttgagactgggtctcatcctgtcacccaggctggagtgcagtggtgctatcttggcttactgcagccttgacctcctgggctcaagtgatcctcccgcctgaaccttctgagtagctgagactacaagcacatgccaccatgcctggctaattttatttttactttttggagagatgagggtctcactattttgcccaggctggtctcgaactccttgggtcaagcaattctctcaccttgacctcccaaagtgctgggattacaggagcgagccaccgccctcagccccatgttcttaaaaaccttttgtgaacgacatttaaaatagttgcagattttttcccctgtctttggaagtgttacaacatccaaccatttcacagttactaatttaccatcattctggtttttgtccttgaaaataaggcaaggctgaataatgaacatctttgtggctaaagtttttttctttactttgagttgttaccttcctttagcttagttcagtggttttttctttttcttttttgagatggagtcttgccttgttgcccaggctggagagtagtggtgtgatctcggctcactgcaacctccgcctcccaggttcaagcagttctcttgcctcagcctaccgagtagctgggattataggcgtctgctgccatgcccagctaattttttgtatttttagtagagacagggttttgccatgttggccaggctggtcttgaactcctgacctcaggtgatccacccgcctctgcctctccaagtgctgggattacaagtgtgagccaccatgcccagccagttcagtgattttcatatttgagtgtgtcagccttgcctggaagccttgttaaacacagactattggatcccactgggcggatttctgtttgagcaggtctgaggggagacctgagcatttgcatttttaacaaattcccagttgatgatgatgctgctggtttgggaactacactttgagaactactgggctatattattgacaatgaaactataatgttgaggttaagttcctaagtcagtaggagtgattatgatcttgaatgaaactgagttcatgtaccaacctgtatcagggaaattgaagaactaaaggaccatattgcatttcagcactgagaattcgtgcagtttgtgaacatgtgagtgctgatatgtgcaaggtttttgctgagtattgtgaggcaaggatgttgtaatgaataaaaaatagccctttttggctttttttttcttcttttgagatggagtcttgctctgtcgccaggctggagtgcagtgatgtgatctcagctcactgcaacttccgcctcccaggttcaagcgattcttctgcctcagcctcatgagtagctgggactacaggtgcccgccaccacgcctggctaattttttgtattttggtagagactgggtttcaccatgtttgccaggatggtctccatctcctgaccttgtgatccccctgccttggcctcccaaagtgctgggattacaggcgtgagccaccgtgcccagcccggccttttttcccccgcctagagatggagtcttgctctgtcgcccaggctagagtgtagtggtgcaatctcagctccctgcaacatctgcctcctgggttcaagcgattctcctgcctcaaactagctgggattacaggcatgcaccaccatgcccggctaattttgtatttttagtagagacagggtttcaccatgttaatcaggctggtctggaactcctggcttcaggtgatccttggcctcccaaagtgctgggattacaggtgtgagccaccatgcatggcctcatttgggaaacttttgatatcagaatcttaggtttttcattagagattgtcagatttccatattcctctggaaggtaaaggcctaattgctagcattctggaagccagttagggtaggagggtaggagggtagggtattgggtagaggataaagaaggggtttgggaaaggtggggggtgtctcttggcagttgtatggttaaattgagtttttgttttatttagtgatatgtgttttttgggtacatgtgatattttgatacctgtgtataatatgtagtgatcaaatcagggtgattgggatacccatcatttgaaacatcttttctgtgttaggaatattacaagtcttctagctgttttgaagtatacaataaattgttaactataatttctgtactgtactatcaaatattagaacttactaatcaaactgtatttttgtaacactaaccactttctgttcatctccaccactcccacttcccttctcagcctctggtaaccaccattctgctgtctacctccacgagatccacttttttagcttccacacatgagtaagagtctttcttttaaaactggttttgtgagcatatttaacatcagtagcaataaacttgtattttaagctcctgttgctgtattttgaggaccttctaagtccattggaaggattttgaataccatagtgtctgcagtgatagttgttgaaagaaagggaaggcatcagtgcaaatatttttagacagtttttaaagagactcaagtcacccaatttgtcttctaaaaatcctgattttggaagaggcagtggagtttctgttgataaaaaatgatttatagtttgtgcttggcacttcctaatggattacatcaggaaagatttattgtctggcactctcattttaacgatactacaattgattattaggtttagatgctaataccttttttacctttatttcagagaagcttgattctttgctctcagactacgatattctctctttatctaatatccagcagcattcggtaagaaaaagagatctacagacttcaacacatgtagaaacactactaactttttcagctttgaaaaggtaatttgaattattcatggaataatgttggggcactgggggcttggtttggcaaaaacaaaaaagtaagggtatctactgaaatcttgggaaattacattttaaagatttgtaattaatttccagtataatgcttattctaaaattcatactggggctgggtgcagtggctcacgcctataatccgagcactttggggggccaagacatgtggattgcttgagctcaggagtttgcccaagctcagcctgggcaacatggcaaaaccccgtctctactaaaagtacaaaaattaggcatggtgacacgtgcctgtaatcccagctacttgggaggctgaggcaggagaatcacttgaaccagggaggtggaggctgcactagccgagatggtgccactgcactccagactgggcaacagagtgagactctgtctcaaaaaataaataaataaaataaataaagttcatactgatgagtatttttaaaaaagtaaatagatattgcagaggtgttaatgatggtaacgatgtttagaaaattctaacataatttaaattaattgaatgcttataaaaccttttgtttttggtgctactttataaccatcaatcatgtgctaaatattatctttatatatgaagagataaagattttgttcaggaccccacagcctggtggtgagctgggtctagattttactgttctatttatttatttagctaactagttacttagtttccaggattctttaacctgcttcatatttatttatttttaaaaacagggtcttgccatgttgccaaggctgatcttgaacttctgggctcaggtggtctttccatcttggcctcccaaagtgctgggattacaggtgtgagccaccatgcctggcccaaatttaatattctttctacattgagttcctcttacttcttagcataaattgatggatatgttctatttcagtagtaattttaataccacgtattgttttgcacattgaaatgttaaataattgcaggcctctttttaaagtctttaggaagctttattcagtatcaaaaaacagacacatggagaattgactgaattattctttatttatttatttttttgagagtcttgctctgtcgtccaggctggagtgcagttgtgtgatcttggctcactgcaacctctgcctcctgggttcaagcgattcttgtgcctcagcctctcaagtagctgggactacaggtgcacagcaccacgcctgggtgatttttgttatttttagtagagacagagtttcaccatgttggccaggctggtcttgaactcctcacctcaagtgatccacgatctcggcctcccaaagtgctgggattacagacaggggccactgcatctggccatctttattctttatataggacaagccttctcaactatgttaaaaaataaaaggaatatgtgcgtctggtttaaaaaacaagccatggaggatatgcaaagtttttacttctaactcagttagacttctcagacccagagaggtttcctttgtaaacttccaattttttgttttgttttgttttttgttttttgagacagagtttttgctcttgtcgcccagactggagtgcaatggcacgatcttagctcactgaagcctccacctctcgggttcaagcagttctcctgcctcagcttcccgagtagctgggattacaggagcccactgccatgctcagctaatttttgtatttttagtagagatgaggtttcaccatgttggccaggatggtcttgaactcctgacctcaggtgatccacctgcctcaggctcccaatgtgatgggattacaggtgtgagccaccgtgcccgacccaaaatattttaatgcatgttttttgcctataggtctctgtgtgtgtataggtgatatagatagcatatttacctcattttaaacagctgcataaatattcctattgcatagaattgtaacaacatactgactaatacactacagatggatattgtttaaccaaagtgatttttttaatacaacaaacagtgctctagtgagtatctttgtaaatgtgtaccttgatgaggtgtttttataggatatattcctggaaggagaattactgggtcaaggatatgtatactatgtttattgatattgctctttcctcccaaagagatttgacaaatttattcttccagcagcaatatatgagtttacctgtttcctgttatctttgccaatagtaggtttatcagcctttaactgtcacccctctaaagggcatggcattttatagttgttttgattttcattttgtgtgacattgagcatctttttatatatttgtaagtaatttgttttatatttctgtaaactgcctttttatctcttttgactatttttctattgaatttgtctttctaactactgaattgtagcagtgcttagtatattaaggagattggttcattgtcatgtggttattttaggcaaatttttaatgcaaattaatttttcctagctattgcaattatccttaggttattttttaatgacttctttttattcgattttatgtcagaatattatagtattggttattagctttcaacttacaccaaatttgagcagattggtaatattaatagctacagttaatcaggtacttattttctgtaatttactggcattttacataagttatctctaaaagtgattccttttttgaaggaacaaaaaaaaaaaaattaaggcttagacagcttagtaacttgcccaagattactcagctagtaaatgacagatacaagatttgaacaaaggttggactccaaaacttgtgttatttctgctatactggtggagagtttggtgaagaagtggatatagtagcaagaaataagtaggagcgaaggaagagtgaggaaactataaaatgaaaagaactcaaagtttagctttttgggtttctttggatttgaagtggcctgtagaatccgtattctagaggcaaaaacttccatagccttacatatttctctttcaagtttcgtagatgacattgattccctaagaaaatattaaatcgtagccacttgttatcttttctctgtgtaagaaagcagggaagtatgtaatttattttacaaagtttccatactaaatatttaatgggaaatttatctaacagtctatggaattttataccaggtgttttaaaataggttatttcctttaatccccaaaaccgttcagttattaggtgatattatttccatttgtagataaatacttaggattcaaagattgaggccaaggtcggacagtgagtaaatgaaagtaggacttaagccaagtttgtcagactccaaagcccataccctttcttttctatcatattgcgtcattaaagtttaaaacaagaacaaaaacaaagatagctgaagtaatcagtttgtatcagggctgaattaactctatgaaacccctcattacttgatggtaaatgagaagattccgtttttcgatagcagtggaaggcaaagtaatttaaaccaagatcattgcattaaatttggatgtaactattagaggttgaaaaagcatagaaacactgagaggttgtatgaagagttgaagtaacttaagaaaaaaagaaacttgtttaaaatttgccttacaagtttcatttcctttttgttataaatcaagaaattatcagctaggcgtggtgactcacacatgtaatcccagcactttgggaggccgagctggatggatcatgaggtcatgaggtcaggagatcgagaccatcctggctaacacggtgaaaccccgtctctactaaaaatacaaaaaattagccaggcgtggtagcaggcgcctgtagtcccagctatttgggaggctgaggcaggggaatggcgtgaacccaggaggtggagcttgcagttagccgagattgcgccactgcactccagcctgggcgacagagtgagactccgtctcaaaaaaaaaaaaaaatcaagaaattatcttatttttaaataacgaaaaagctgcggagtatatactgttttgatacttttttgatgttgcctgaatttttttggaaaaagttaaatgtttctcctaaaagtgaaatatatcagattacttgagaaggtctagaactgataaagaaatgaaagtgatatacctgactaaatggaccattaaaaatggttagggtaataatgttaattcaaactggttagctggtctttagttactgtaaattcttaagtcaaaagtcagaaagataaaacgttaaagaaatctgtaagaaaatgacttcacataattttgggaggataaagtaaaagaaattttgacattctgttggacgttttataactcaaaagctaatattggaaaatcaaaaaacatgaattttataatcgcttggtctttatctttagaaaagattcttaatgtagcaaatgaaaaatgcaattccactgatttctttctgaaaagaacattaagtaatgttgcaactcttagctttaaaacaaaataataagacatttataataagtatgcttttgaaagttctcagcataactggagggaaaaatcataactgagaatgtgtgggaagatatgttttaggatagcagaagaaaatgttccaaggatttacgaaataatgttctattgtcttttccctttgaccattaaaaaaccacaagcaaactaaaattaccttgttatgctcaaaaagttaaaaatatttgttgccatggagatagtcccagtctagatttctttccggtagtttaaagacttttgcaatcccatggggaagtaatatattttcagtacaacagctgacaaaatttgtttctgtgggtgagatgaataatatacctttctttgtctttggtgttcatggacacattgaaagactataaataatacttgagaaagtcttgctcaccactcctagttttcatgtaaggatggaaagtcatagaaaacaaaaagaatagtaagccaattaaagaactggactgaaactcaacaaaaagaatagtaagcccactaaagaactgaagtgtataccccctcccctctcctcccctcccttcccctcccctcccttcccctcccttccccttcccttcccctctcttccccctccccttcccctctcctccccctctcctcccctctcctccccctctcctcccctcccctcccctcccctcccctcttttcctgtcttctggtgccaatggagtctatattctaatgtctgtcttagataccttgtatttattttcctaactgtaattgtgggttacttttttgcaagatatgttgttttgaggaggaaaaaaagcacgagtactttttttttttcttattttgagcgggagtctcgcgctgtcaaccaggctggcgatctcggctcacagcaggctccgcctcccgggttcactccattctcctgcctcagcctcccaagtagctgggactataggcacccgccaccatgcctggctaatttttgtatttttagtagagatggggtttcgctgtgttagccaggatggtctcgatctcctgacctcgtgatccgcccagctcaacctcccaaagtgctgggattacaggcgtgagccactacgcacggccgcatgagtacttttaaatatagaaagcagcatttattaattttgcacagcaataagaattttctcatagtccacccagcttgatagagacagcatagtacagggttttgaaataaaccaggtttatttcccagtttcaccatttactagctgtgtaactttgagtaggttgattagcttccaagcctcaatttgtacttgtgtgaagtggggataatagatgcatagtacctaacaccaagtaggtgttcaataaatggtatataataggattagtttttgataataatttttttagataatcaggattccaacttaactacgcagtcatgtgtgtttccttattcttcagtgttttccaggagagatgaatgtataagttctttgaatatctttaccctagtgtgagtttattgtgatctgctgtttttatagctaaataaattagttcatttgtcgttacaggagatatattgctctaagtacctaataagactttagttgtaacttgcatagtgttttattaatgtcaatgcttctggctttttaagaaagtttaattatgtgaaaatgagacttaaaatttgtgtgcttagagtaaaatatgaatgcatttttcttcaggcattttaaattatacctgacatcaagtactgaacgtttttcacaaaatttcaaggtcgtggtggtggatggtaaaaacgaaagcgagtacactgtaaaatggcaggacttcttcactggacacgtggttggttagtatggagcttgttggtttgcccctgtgtctggtgtattaggtctccaaatctaacttgattgcatattcttttctggtgcaggatagtggggacggggtgtcatagaagtgctattctttgacttttctttgaggtatataagtttagaggcaggaacattctaatagaaggaaatgagtattatctaaatgtcatactagctggctggtttaatgattaaaattaaattcttcttaagtgataggaatttaacctttcttttcctcagtgactgtaagctttctttatgatattttaaacagggaagcttggagataaaatacttggtgatcctattacgtatgtatttgagaaaatttatcaaacaagcaattgcagtttactttttgacctttttctgcaatgagaaaaaaaaatgtcattgaaatccacaaatagtatagttcctaggcctgtacattctaaatcatgctttctgtctctcttagttcttcctttacctagaagtagataaaattattccagaagaaaatcttagcagttttgtttgttttgggaaagggataggtttcaagtgactaaacttgaggctaccccttaggagttgagattatctagcttctttctggagcctttgtttcttgttttgcagagctctcacagtactaggcaaattccaccctgaaggatttaatttttattgagagtaatgcatagtttcttatttgatgtaagtatttttaaataataattttttttttctcttaaggtgagcctgactctagggttctagcccacataagagatgatgatgttataatcagaatcaacacagatggggccgaatataacatagaggtaaatttatatgtgaattttttttcagtagcttatatctctgattttcaaaaagctgctcagttctgcaaaggtgaaaagtaattatacttatttctttcctcttcgtatttgaagttttttactaggaaagtagactttttaaaaaaggataatctctaagaagctgtgttatgatacaccctgtatttctaagtaccataattgagagagttacatgtgggatggataataggaagagaaaactttctttccctcctgactcattttttaattctttctcaaataataaatgtaaacatcctcagaaatgaaaagtgaagtattatttttcaatttctctgtttttctgctagacacactggaaatgctagatcaatgaaaggtggtagttcatagtctgagaagttaaagaggaagctaggaaagtcaggctgtggtcactcttccattgaaagagtagcaatagaaatcaagaccacagtggctgcattggttaagacacatatctatctgtcagatattagtctacaaaacaaaacgtttcctcataattgtgaattgaagttgattctgtgtttcctgaaaaatgagaagactctgggtggtggtggtgatatcactaaaatagatcacctgtgggaaaactgagtaagattggtcaaaatgaaatgttcaggtgtatttgagtgcttaataggggtaaaacagtctgctggagctatatatactatatgttttaattatatccaatctacatgactgttagtcctttgactgtccattattgtgaaaaagaaacctatggccttgcagtatgttatagtttgttaatgtttaagctatttaatgtcaatgttttgaggagtctggcctaccagaaagagtcagaaatttagtagaaagtaaaggaactaatattataaatgcattcattctagaataggcaaagcatcactggaatgtcttaaatttgcctgttctttcaaatcaatttattttttaagaatacctttattttaaaatatatgctcattgcaaaattcggaaaatagattatctgtacttggacagataactactattgacattttgacagacatccttccaaatttttttttctatgtgtaaatacacaaataaatatagttatacccactattttttcctgcaaaactaggaccatacaatatgtacagtttgtcttcacacatttttcgtttaacaatatgattatgaaccttttcgtgttaatatagatctaaattagggttttgtttgtttgtttgtttgttttttgagacggagtcttgctctgtcacccaggctagagtgcaatggcgtgatcttggctcactataacctctgcctccccggttcaggcgattctcctgccttagcctcccaagtagctgggactgcaggtgtgcgccatgatgtccggctaattttttttcttttttttgagatggagtatcactctgtcactcaggctagagtgcactggcgtggtctcggctcactgcaacctctggctcctgggttcaggcggttctcccgccttagacccttgagtagctcagactacaggcacatgctacctcacctggctaatttttgtatttttagtagagacggggtttcaccatgttggccaggatggtctcgatctcctgacctcatgatctgccagcctcggcctctgaaaagtgctgggattataggcgtgagccactgtgcctggcctcaactgttttgtttctaacttttgaaataaaaggtattgtagtgaacagccttgggcacaccttttggtgcatgtgtttagttggaatagtctggatgataggtaatagtctgggaagttaaatgaagaaactgtaggaagctctgtctaggctgtgcgagggcttcagataaactcccatagctgagtagcttaacacaagcaaagttttttcttactctcctgtggcttgatgtgggttaggtggttctcctctactttgtggctttgacttttggacacatgtcctctgtagttctcacagaaagaaaacagagctagagaattatacaggatattaagggccaggcttggaaatggccttccgttcaatacattctagaacactttatctctgacctgctacaaaggagaatggaaaagatagtcgtaatttgagctcagaaagagaaaatagtgtggtaaatgcacagcattgtttttgctgcagtgcatatgtctgcttatttccttagaataatttattcttttttgtttttttgagactgagtctcactctgttaccaggctggagtgcagtggcgtgatctcagctcactgcagactctgcctcctgggttcaagccattctcctgcctcagcctcccgagtagctgggattacaggtgcgcaccaccacacccagctaatttttgtatttttggtagagacagggtttcacaatgttggccaggatggtctcgatctcctgacctcatgatctgccagcctcggcctctgaaagtgctgagattaaaggcgtgagccactgtgcctggccagcttattaattcttaagccaaaatatgtgtctttaggatccaagttaaatttgctcagattacatttttttttttttaagatggcatctcgccctgtcacccagactggagtgcaatggcgcgatctcggctcaccacatcctctgcctcccaggttaaagcgattctcctgcctcagtcccttgagtagctggaattacaggcgtgtgccaccatgccccgttaatttttgtagttttagtagagatggggtttcactgtgttggccaggctggtcttgaactcctgacctcgtgatctgcccatcttggcctcccaaagtgctgagattataggcatgagccaccacgcccagctagattactcatttttttcaaatacttccttttggaaaaataggaattctgtttccatccatacctttgtttcactaagtacaaaaatgagtataactaatatttcattgtaagatatttacttagccaggcacagtggctcacacttgtaatcagcactttgggaggctgaggcgggtggactgcttgagcccaggaatttgagaccagcccaggcaatatagggagaccttgtctctactcctccacaaaaaaaaaaaaaaaaaaaaaattagctgggcatggtggcacatgcctgtggtctcagctacttagaatgctgaagcagtaggatcagttgaattcggaaggcggagactgcagtgagctgagattgtactgctgcactccagcctgggtgacagagcgagaccctatctcacacatacacacacacaaagatgtttacttacaagtatactcatcagataccttgagggacttttgcatgaaattaataatgtttattgaaaaaatgatttactacttacaggggtgattttcatactctttataattcttttgatacttttatagttcataagtgtggtgattggctgttcacacacacatatgagatgtaccaccctagaaccttgttacaatgttagcacattaccagtctgacatgaaaaaaaataattctttacacttaccttgatgcaaaaacattgtctatctgcactaatatcttaggaatataagtgagcaggaaaaaatatatatcttatttttaacacatcatcattaaatattttgtttatgacagtcttacttggtcactcaggctgaagtgcagtggtgccatcatagctcactgcagccttgacctcctgggctcaaacaatccctcttttctgcctcctgagtagctgggactacaggtgcatgccaccatgcccaactaatttgttaaatttttgtagagtgtatcagatttttgatgaggtctcactgtgttgcccaggctgatctcaaatgtctgactgtaagcaatcctcttgcttggcctcccaaagtgctgggattacaggtgtgagccactgtgcgcagccgttaaatattttaaaccgtcactgactttaccatagcttactatttatataaataatcctgggttaaacttgcatagtgagataatatttcccccaacttttatttatttatttgagatggagtcttgctctgtcgcccaggctggagtgcagtggcgcaatctcggctcactgcagtctccgcctcccaggttcaagcatttctcctgcctcagcctcccaagtagctgggattacaggcacacgccactgtgcccggctagtttttatatttttggtagagacagggttttgccacgttggccaggctggtcttgaactcctggtctcaggtgatccacccgcgtcggcctcccaaggtgctgggattacaggcatgagccactgcatccggcctaatttttgtatttttagtagagacggggtttcaccatgttagtgaggctggtcttgaacttctgaccttgtgatctgcccacctcggcctcccaaagtgctgggatgacagacgtgagccaccatgcttggcctcccccagcttctagttttaaaaatgttcagctggtgcagtggctcatgcctgtcatcccagcactttgggaagctgaggtgggtggatcacttcaggccaggagttcgaggccagcctggccaacatggtgaaacctcgtctctactaaaaatacaaaaattagccaggcttggtggcttgcgcccgtaatcccaactgctcgggaggcctaggtgggagaatcgcttgaacctgggagacagaggttgcagtgagctgagatcgctccactgtactccaatgtgggtgacagggtgaaactctgtctcagaaaaaaataaaaaagaaaatgtgcaaatctacagaaagattaaaaagtaccctgtagttacagaaagatttttttaaaaaataccctgtagcccttaaacaatttctaacataatgtcctgttagctttctctctttttttcgtgaatcatatgaaaatcatttgcaaacatcatgacccttcacccctaaatacttctgtatgcatccttaggaataaaggcactcttttctatagctgtaataaaagtaacatacctgagaaaatgacaagaattctacaatattatctaataatcatgccatagtcaaaatctctagtcatcctcaaaatctcctttgtagattttttttggttttccagtccaggatccaatccagttttctgccttttagtcaattactcatcaaattattttttccagcaacttactagtaataatggtaatagccttagcttttattaataacaaccacttttcttttgaaatgttaatataaaactagatttattacctacataatcttcataatcttcaagttaggtattatcactactttacctaatgagggaggttatgctcagggtacttgtccaaggcacatagtgaggtatggttgaggtttgaactcagatatatctgatcccaaagccagctgtctttttctgtgctggactgactatactaggaaacaatcaatgtgaacttagaaatgtttgacccaaaagaaaaaaaatttcactcctattcataggctaaatgaactttactaaatatggaagattcctgtagcccggaagttgggttagttaacttttgagatctctgccaaccctgaaattctgtaacccttgtttcttacatctgcctcatacatggattaccaaagatgtatatgcatataatatttaacagttttattgagataaaattcacatactatattattcacccacttaatgtatacaattttgtagttttgtgtgtgtgtgtgtgtgtgtgtatttttgagatggagtctcactctgtcacccaggctggagtgcagtggcacgatcactgcaacctctgcctcctgggttcaagtgattctgtggcctcagcctgttgagtagctgggattacaggcgcccaccaccatgcccggctgatttttgtgtttcagtagagatggggtttcaccgtgttggtcaggctgttctcgaactcctggactcaagttatctgcccaccatggcctccccaaagtgctgagattacaggcgtgagccatcgcgcccggcagttttcgtatattgatggagttgtgcaaacaccacctcattcaattttagaacatttttatcacctgaaaaagaaacgctgtatcctttagccatacttcccccttcctccctaactcccccagctctaggcaaccagggatctactgtctatttagatttgtctgtttgggtcatctcatataaatggaattacataacatgtcttttgtgtgtggcttcaatttttttatttttttgagatggagtcttgctctgtcacccaggctggagtgcagtggcatgatctcagctcactgcaacttttgcctcctgggttcaactgattctcttgcctcagcctcccaggtagctgggattacaggctcctgccaccatgcctgactaatttttgtattttttactagagtcggggtttcactatgttggccaggctgttctcaaactcctgacctcaagtgatccacctgcctcggcctcccgaagtgctgggattaaagacatgagccaccacgcccagcctgtgtgtggcttctttcacttagaataatgtttccaaggttcatctgtgttgtagcatgtatctgtatcttatttatttttattgctgaatagtattccattgtatggataaactgcattttgtttattcattgattagttgttgatggacatttgggttgtttccactttttagctatatttacattactgcttgtgttttcatttctcttggttatatactaggagcagaattgctgggtcatatggtacttctacttttaacctttgaggacctgccagactgttttctaaagtggttttaccattttacattctcatcagcatatgtgagggttctggatttctctacatcctcaccagtatttgtctttgatcatagtcatcctagtgggtatacaggggtgtctcattgtgggggtttttttccccattggggttttgatttgcatttccctgatggagataaatatattttttgtgtgtccccccacaaactgcctggttctgatgagaccagtgttcttacagagaataactttgctttgaaacaaaacaaacaaacagccttttgacttgggtaacctttggagtatgttaattgtgatttactctggccttgtaacattgtaagtggagattttgtttaaaaactgcgttcgctgaaacaagtaataaggttcagacctattgttacaagttctgagttttctttcatataaatatgtttgttcttttgtgtggataaaacctaacgtggcaaaaaggtgtcaaacacctaagtattaaggaaactaaaatgaaaatgctgcatgaacagaaaccttgtccaattttcattactatagcaccatcacctataacagtgccagtgtacagtagatattacataatatttttgaatgaatgagtggaaaatgatatgcatttttctcttctgcatcctctgaaagatttcacaacgtgcaaagtatgtaaggctttatttatatacagataaaataatcagagtttataatctatgtatttactttcctgcatagaaactccatatgattaaaaattgagattatttattttaataacatgactaatcagtttacttaacctagaaatgaatgttatctaagaacaagcaaagaatgttagaagaatttagtgtttaggaattattattgttttccatctcagtcgtatatattttctgttttagccactttggagatttgttaatgataccaaagacaaaagaatgttagtttataaatctgaagatatcaagaatgtttcacgtttgcagtctccaaaagtgtgtggttatttaaaagtggataatgaagagttgctcccaaaagggttagtagacagagaaccacctgaaggtaagacttaaagagtgtatttcaaataagaaacaaacatactacaattgacttcagtaggggtggttgttatttgttaaaaaataacatgattgtcaagtaactatagtatttggcatgaaaataagaggtttgttccagaaattttcatcttcttttgtttataatgtaagagttgaaaactctggaaaataatgggaacaacagagattagactttaaaaaagattagggaaaagggaaatggagtgatctgagggaaaatattcctgcagatatttagaaatgataaaataatatggtggaaagacaatctttagagtttataagaaattaattggtagtaggagggacctatatatatactgcttagaatacaagaaggttatatccatcttgggacaatccatttagggtcatttaaaaaacgtaaccatcttggaattttactgcccaaaacacctctggttaggttttttgttttgttttgttttgttttgtttgcagcgcgatctcggctcactgcaacctttgacttccaggttcaggtgattctcctgcctcagactcctgagtagctggattataggcatgtgccaccaggcctggctaatttttgtatttttagtggagatggggtttcaccatgttggtcaggctgttctcaaactcctggcctcaagtgatctgcccacctcagcctcccaaagtgttgggattacaggcgtgcaccaacatgcccggccaaagacggttatgttattaaaattatatattagcattttaatatataaataaagaaattcttaatttatttcacaagaaagttgtcctattaaactaattttcaatgtgaatatcttgacatttttactgttacattggttaattcataaacttcttgttgtagaatatgactgacagcttcatagcccagcattaggtgactgttttactctgttgagcactatttatttatttatttatttagagatgaagtctcacttttgtcgccctggcttgagtgcaatggcacaatcttggctcactgcaacctccgcaccctgggttgaagtgattctcctgcctcagccttacaagtagctgggattacaggcgggtgccaccatatctggctaatttttgtatttttaatagagatggggtttcatcatgttggccaggctggtctcgaactcccgtcctcaggtgattcacccaccttggcctcgcaaagtgctgggattacaggcctgagccaacatgcccggccttactctgttgagcactttttaaagtttctgtattggaaaaattaaagaggcacttgtccttggttttgaattctacagtgttttaactttatgttacttttcacttttctgtcttcctccaaattattttttgttgttgttcagaatcctttagtgatattaagctcacataatgtttgtttcaaaaatatgttagatttaaagtgttaccataaaactccttgttttggtgaattttgatttaatagtgcatacaaattcatattagagcttgttcatcgagtgaaaagaagagctgacccagatcccatgaagaacacgtgtaaattattggtggtagcagatcatcgcttctacagatacatgggcagaggggaagagagtacaactacaaattacttagtaagtatttgatattgcatcgagtaattgaaaaaaaaatttgggtgggtacattccatgaaacttaatgcaaccagatctgttccagatactctgttatttccctaaaatatttgagggatattctctgaggtttttatgttactgtatggaaattatagtttcaaatttgtgacaacccattttacccttgaactaatattttctgcatgttagaatttatgcatatagggtttgggagaggttataatgtagtccttcctccttgatataagtgagttctttaaaaacatcactgctatcatggtagtgaacctgtggtgtcacatgtgaatgtaaaaatatgtatttgcatgaacccatgtttttcttttgcttatatgtatatttcagagaggaaggcgagttttgtttgtcatgttaaagacctaatcattggacttcacttgaaataggtgggactttcatggtcataactagttctagggcacagaagtgaaggaaagatgtaagaagtgatgatactggatttttaagtatgaactattatgatttttgaagtctggggaatcatttttcattgacattttttgctagtgtgacttcattcgtcatgattacttggcactgaccaaaatgttgttactgagggaataatggagaatgcagctattcatgaagcaagaagaagctggtgcagtaaagatgtctttctcattgccttgcttttcccatgctgtccattttattcataccctcccaacttctttcccttccctttcatgtcaagtggatttttttttttttttttcaacacagagtctcactgtgtcgcccaggctggagtgcagtggcacaatctcagctcactgcaacccccacctcctgggttcaagcaattctcctgcctcagcatcacaagtagctggaattacaggcgtgaaccacagcactcggccccatatcaagtgaatttattatgaggctagtaagagtcactgtgattcttgttcctaaataagagagatttttactttaaaaagcttctctcttaatctgggttttatattaaggggctcctcttattttacttctttgttcattgcactataaatatgaatataatgagagatctagtcttaaaaattgtatttttttacaacttcttaggcataacttgtttcacagttgctagaacaaacctcatcaacccagtttttgaacagtagaatattctctttgagaaaaagataggtaattagcattttgttctttctcatgtcattttccttggaaactatactgccttccttctccagttttcccaaatcagagaacaaaagaaggagggttgctgaaatgaaccttgttctttctggctgtcttcttacccattcctcagtgctgaactttttggggtgagagtgggggaatagggttggcagttgtctgccacggccccttacttgtttctggggaagacattcgaggtactcaccaagagatagagtgaagatggaattctttttagaagggaatacagttgacccaggaacagtgcgggggtgtggttagaagcactgaccttcttccctctgcagtcgaaaatcctcacgtgactttttttttttaaggctctgtcgcccaggccggagtgcagtggtgaaatcatagcttgctgcagcctctattgcccgggccaaagcaatcttcccacctcagcctcctctagctgggacaacaggtgttcacccttcctggctaagttttttgatttttagtagagatggagaatttcccaggatggtctcaaacttctaagcttaagcaatcctcctgcctcagcctcccaaggtgctgggattacaggcatgagccactatgcccggccactgtataactttgattctccaaaaatttaactactaatagtctactgttgaccagaagccttaccaataaaataagttgattaacacatttttaaaatatgtattattactgtgttcttacaatcaagtaagctagagaaaggaaaatgttatgatgaaaatcataaaaaaaaaaaaaagcccggcatggtggtgtgtgcctgtagtcttctgttactcaggaggctgaggtgagaggattgcttgagtccagaaattcaggctgtagtgagctatgatcgtgccgctgtactgcacccctggtgacagagcaagaccttgtctcttgaaaaaaaaaaaagaaaatcataaggaagagaaaaatacatttactattcactaagtggaagtggatcatcataatggtcttcatgttgagtaggctgaggaggaagaggaagagttgatcatattgtctctggtgacagaggctcaaggaaatccatatgtaagtggacacttgaagttcaaatctgttgttcaagggtcaactgtatttcaggtatactgattgacttttaaatttaatttttattattggctgaaacggtagttttaaaaaagcctgttacttgtcattttggttccatgtgcaattgagtacctgaaatttaggttaaactataccattgttttattctggtaacagcactttaagtttggggccaaaggttgggaatactctgatacagtaacatctcaatgctagtttttgcgaaagtagaaacttttgcaatggcctctaaactgagattttttctttccccatagattttatattgcattgccaggagaggtaaagagttacataatgtcttttttcttttttaaatacacacagatagagctaattgacagagttgatgacatctatcggaacacttcatgggataatgcaggttttaaaggctatggaatacagatagagcaggtatttatcaatagatatggcttatattacttaagttttgtaatgtaaatatttgtcacttgtattcaaaacctaaaaacttgtccttaacaataattgtaaataagttttctcagatgccaatgattttttatgatgaattgtgcagtatttttgatgttaattagttctagattgtgaagttttctgtccttagtctcgctttaggtagaaagccttttatgctgctgtgctttgttccttctttgaattcatggcctttatattctctgtagttttcttcccccctccgattatgcttaagtctttagttaaaactctggcatgcaccattgaatccttagtcagaaaatttactaaaaaatactgtgtacctttgcaaggctgtatttatatatacagaacctttaggttctttcctctcagatatctccttctgatttcttgtaatctgttaacagagtgtgtctagtaatgttatattaatgtcatcttaataatagctcatattaaaagttatttcaaattgctaggactaattaaaaaggcttctgacaaagggtattgctttgggcagagagacattttgatatgtaaattatataaattgttatctctatttttttccaagctttttgtagtaaaccatatttttataagttatatagtatagaatttagaggttgaaaaaatttttaaaaatcattcaccatgtttataaatgttaaactttgatattacttgtataaaactaagagaattatttttcccttttcattctctttcactgttacgcattttctttttaagttattatttgaataggtaacatgtacacagtacaaaagccagtgaaaagtaagtctctgcagcctgtttattgtcaaaccagttcctttccccaaagacattcatgtcactagtttcatatgtatctttctagagatgtcgtatgcaggtatagtgtatgtatatgtctgtatttgacacaacggtgctatgcagtacacttttacaccttgctttttcatttcacagtatgttggagagtacttcatgttcatgcatgtaaagctgcttcacttgttttattataaatagctgcatcatgtttgagtttcagggaacctgtaaattttctttttgctttaggcatttggaaccagtcgaagaaacaggaataatataggagattaaaacattaacttctttacatctgatgaaggatggattggagggtgtggtttagatgtgtatcatggtgggcttctaagtagttctatcccagatttgaccttgaccagccaccatcaaaactgcagagtccaccccagtaaacttaccacacagtggcagaggagaccagaatgggccttctctgcaggcaggcaggcaggcaggcaggcagagagactcacagaaactctgagctgagcatggtttccttctttatctcacacttactaatgggagcctttgttacttttttttttcttctttgcaggtttaatatgaatttgtctgaaatgcctgtataaggagaagactctattcttagccttttattcctttgatgcacaaagagatgtatattttattattctttcctgagttgtcgactgtagtcgtaataaatattttaggctcctgtaacccaagttcttattttttcaaaataaacatggaggatatgaaaatttaagagtacatttataatattataaataattcattgacatatgttttccataccatatgcttctctgtttgtttcaaacattgaatattggtactgaagaatttatgaattttggttttaaaatgttttttttctagaacgattctttttttgaacagataaaataatgcagtattcagagccttctgacttattttggaagtgttctaagtatatgatctctttaagtatagattcgcattctcaagtctccacaagaggtaaaacctggtgaaaagcactacaacatggcaaaaagttacccaaatgaagaaaaggatgcttgggatgtgaagatgttgctagaggtaggtcttagaatcctggatatggtgctaacaccactttgtcatttctgatatgtggattgtatgtgttttaatgaaggagcatgttagaaaagatggacacccagaagcagtctcctccagctgatccagcagtaaccccatcccatgtagcagcatagacaacaaataacaaaaactctatgaaaaagaaaaacgctataaagcaatgcttccttttttttttttttttttttttgagacagagtttcactcttgttgccctggctggagggcaatggcgtgatcttggctcaccgcaacctccatctcccaggttcaagagattctcctgcctcagcctcccaagtagctaggattataggcatgcaccaccacggccggctaatttttgtatttttagtagagacagggtttctccatgttggtcaggctggtcttgaactcccgacctcagatgatccgtctgcctcggcctcccaaagtgctgggattacaagtgtgagccaccatgcccggccaaagcagtgcgtcttaaccttaatatctttgaggatctaatgagacaatcagtggatcttctctagaaaataacatggatacccaatatatagagtttttgcacactgtttcattagttctgcacacttagttcagctctctctgaagcttatcaatttatcttttagggcagtaattatcaaacaggttatgaacatgtattggagagtagaaatatagcttggagatctgaaagttctctacaggaatttaaaatttttgtgtttttattctggcgattaatctaaagatggctaacttaatcattttatgtcatttggagtcttgccgtataacagggtgctgccatgtgattccagtgtcttgagtttgtgtgtgctattactttggtgtagaatgactttatatgaagcgatagtttttatcttttaatgtgttggcaagtttattagtttcttgttgttgctttaattatcacaagtggagcagcttagaacaacacttatttatcccatagtttgcatgggctagtccaggtatggtgtggctcatctggattcttgtttagggtctcatgaggctgaaatcaagttttcaaagcttcaatagaattaaaggatattataactattcatccagatggagaagcataatgtgcagcacctgtgtggtactcattcataccttgtctaatttgatctgctgagcaccctgagaggttggttgagacagcatccttgtgaggaggctcagcaagtgttactgtttattccagctgacatgacaaagcagcataggctgggggacttaaacaacagaagtttgggttttcacagttctggaagctggaagtccaaaatcaaggggtcagcagggttgatttcttctgaggccaaggtacttgtggtgtagatgctgtcttctccctgtgttctcacatggtccttccctcagtgtgtgtgtatattctgatctccttatcaggacaccagccatattggattaaggcccacccatatgacctcagtgtaccttaattacctccttaagggccctgtttccagatagagtcacattctggggtactgttgagggttaggacttcaacatttgaattgtggggtggcacaattcagccagtagcaggaagattaaatgacttgtctgattagtcatacaactggtgatggcagaggttgaattgagcacagatctcctgactcctagaacagctgaaccactgcgcctgtctgcttttctgtgagcctccagacagcccatggcaggggaggaaccaaagagaaaaatgacttatgttgacagatggtcctctccagttttcttccctaagcctcctagaatattcttagaagcctcatccttttaccacggaactatcagaatccccatgtaaccacacttcattcctcatatagggctctctggcctctcatttaaagcattttaaacattgagggttttggctaggcatggtggttcatgcctgtaatcccagcactttgggaggctgaggatgaggcagtggattgtttgagcccaggagttcaaggctagcttgggcaacatgttgtacaaaaaatacaaaaattagccgggcatggtgaggcacgcctttggtaccagcttcttgggaggctgaggtgggaggttcacttgagcctgggaggtcgaggctgcagtgagctgtgattgcgtcactgcattccagcctaggtgacacagcgagaccctgtctcaagcaaaataaatcaaaccccccccccaaattaaggtttttttaaacttggagacgctggacggttatggtagaggtttttaaagtaatgtatgaagcccttttaaattaagaaaaaaaaaatcctctcaaacctgcagtgttgatttaaatggatgtaaaatctttattttagtaacataaaactgggtatgtatgcttttctataagtgtatatttatataaatgacaatatattatgaagctcaaaaaagtttaagattaaaatttctataaaaccaattgaatccttgaaatacttgagagggatctgttttggcctggagtgctgcaatccccttatcgaattggagcatctctagtcctgggctgtatgtcttcagaacagccctcggaggagcagtgagttagttctgaagagctggagcaagctcccgaactattcccttttgtgtcccttgtcagatgacagtgtgtgcctctcacctgtgcaggtggagaagcactttagggaaagagcaaagcactgcacgaggttgtgattgctggtgctgagctgcatgccatcatagttctgttctggaatgtttagttgatttagattacatcttttagtctgatgtaattgttaatctaagaatgcttttttttttttttttttttttggtctttcaaagcaatttagctttgatatagctgaggaagcatctaaagtttgcttggcacaccttttcacataccaagattttgatatgggaactcttggattagcttatgttggctctcccagagcaaacagccatggaggtgtttgtccaaagggtaagtttttccatttcttgtgtgaatatgctgctgggattattaagatgattggattatattataattctgtatttaataagcaatttatctctgtttccttttgactttagcttattatagcccagttgggaagaaaaatatctatttgaatagtggtttgacgagcacaaagaattatggtaaaaccatccttacaaaggtatgttcttttatttctaaaagaatagtgttagagtttattgtagtagaacctcagttatatatttatgtaggtatttttttaaaaaatgtaatatatactgttttttaaatttctgcctaaataaaatttatgtatttttgtgggatatatgaaaattaaagcataaagaagaaaataaaaatggcctgtcagccttcttttgaaacatgtgaggaccactgcttttctcgaaccctctgtcctggacccctctgacctgcagcaactcttagagctccctgtctcctagtcctgcagtgcagctgtcattcaaggcatcccacaccctcttattttcagaaccccatggtctccctctttctcagtgccatcattttggtgtagtgtatcttgcaggagcttcctaagaaaacgtagatgacctgcatattgttgggatttcatatatctgaaaatgtctttattccactcttaagcctgattgataattttggctgagtatattcttagttctcatgttctctatggtcttctgtgcatgttgcttctaaagaatctgaagtcattttgagttcttatctttgtttgtcacctgtttttttctctggaatatcttaagatcttgtttttctccagctatgtctgttaaaatgtgtttgactacaaataacagaaaattaaataagcagtggtttaaataaggggtttatttgtctcagtcaacaagaagttcagggatagcattttctgggtggtacagcaactcagaggtaccctcagtggctcaagaacaagcaggaagtctttgtcctcatggatgtcacctcatggttttaagatggttctcttctgtgttggagaaaggaggagaaagagaacatggctagcctagtctggcccttctaaaaagcttctctggaggccccatcctggcttttgtttatatgttactggacagcactgggtcccgtggctgcccttagcctcaacggaatgtggaaagctggctattttagctgagtatattgctgtcctgggcaaaattagggctcattaagtaaggaagaaggggagagagatgttggtaggacatattagtatctgatatactgatttttaatttttatttaatttttattttttttgagacagagtcttgctctgtggcccagtctggagggcagtggcaccatcttggctcactgtaacctctgccttctgggttcaagcagttctcctgcttcaacctcctgagtagttgggattacaagcacctgtcaccacgcctggctaatttttgtatttttgttttagagacagggtttcaccatgttggccaggctggtctcatgaacccctgacctcaagtgatccactcaccttggcttcctaaagggctggttggtatactgattttttgactatgatgttatacttggtgtagggtatgggaaaacatttgcaaaagacacatctgagaaaagactgctatctgaaatatacaaagaggccgggcatggtggctcattcctataatcttcggcactttgggaggccgaggcaggagaatcacttgagcccaggagtttgaaactaacctgggcaagatggtcagaccctgtctctacaaaattaaaaataaataaataaataaaaatttccatatgtataaagaactgttaaaattcaacaataagaaaatgaacaacctaatttaaaaacagacaaaagagcagaacagatacctccaaagatatacagatagcagagaagcatatgaaaagatgctcagcgtcatatgtcattaggaaattgcaaattaacaatgaagctggttgtaggggtacatgcctgtagtcccagttgcttgggaggctgaggtgggaggattgctcgagcccaggagtttgagacccatcctgggcaacattagtgagatcctatttctataaaaaactttaagaaacccaacaacaatgtgctattactagtagcttattagaatggctaaaatcccaaacactggcaacacaattccaacaaggctatggagcaacaggaactctcattaattgctagtgggaatgcaaaaatggaacagccactttggaaggcagttggcagtttcttttctttttcttttttcttttttttttttttttggagacggagtttcactcttgtcacccaggctggagtgcaatggcgccatctcggctcactgcaacctctgcctcccaggtttaagcaattctgcctcagtctcctgagtagctgggattacaggtgcccgctgccactcccagctaatttttgtatttttagtagagatggggtttcaccatgttgtccaggctggtctcgaactcctgacctcaggtgatccgcctgcttcagcctcccaaagtgctgggattacgggtgtgagccactacgcccagccataagaatgtttatggcagcttaattcataattgataaaacttggaagcaaccaagatatcctttagttggtaaatggataaactggcacatccataaaatgagaaaaaaataaaaagctattaagccatgaaaagacatagaggaaccttaaaagcatactactaagtaaaataagccagtctgaaaggctacatactatatgattccaaatatatgacattctagaaaagacaaaaccatgcagactataaaatgatcagtgattgctagatgctgggggagggagggatgaataggtggagagcagggtaattactctgtatgatacttcaacagtcagtataagacattatgcatttgttgaaacacatagaatatacagcacaaagagtggaccctaacataaactgtggactttgggtgatttaaaaacaggtggtggcaggagcctatagtcccagctacgcgggaggatcacttgaggccaagagttagaggctgtagtgtgataaatgcaactgtgaatacccgctacattccagcctgagcaacttagcgagatcctccttttcttttttgagatggagtctcgctgtgtctcccatgctggagtgcaatggcatgatcttggctcactgcaagctctgtctcctgggttcatgccattctcttgcctcagcctcccaagtagctgggactacaggcacccccaccaccacgcccggctaattttttgtatttttagtagagacggggtttcactgtgttagccaggatggtctcaatctcctgaccttgtgatctgcccgccttggcctcccaaagtgttggaattacaggcgtgagccaccgtgcctggcctgagaccctgtctctttttatttatatatatatatatatatatatatatatatatatatatatatatatatatttatattttaaatttaagttctaggatacatgtgcacaacgtgcaggtttgttacatatgtatacatgtgccatgttggtgtgctgcacccattaactcgtcatttacattaggtatatctcctaatgctatcccttcccccttccccctccccccaccccacgacaggcaccggtgtgtgatgttccccttcctgtgtccaagtgttctcattgttcaattcccacctttgagtgagaacatgcggtgtttggcttttgtccttgcgatagtttgctgagaatgatggtttccagcttcatccatgtccctacgaaggacatgaactcatccttttttatggctgcatagtattccatggtgtatatgtgccacattttcttaatccagtctatcattgttggacaatgttgaacaataatgtagagtggtatgagaaaagaaaaagacactaattagcttttgggaatcttttaatttctttttttcttttcttttttttttttttgagatggagttttctcttgttgcccaggctggagtgcaatggtgtgatcttggctcactgcaacctccgcctcccggattcaagcaattctcctgcctctttctcctgagcagctgggattacaggcatgcgccatcacgaccagctaattttgtatttttagtagagatggggtttcttcatgttggtcaggctggctctcaggtgatccgtctgcctcggcctcccaaactgctggattacaggcgtgagccaccgtgcttggccttaatttctaaatttatttttttcttatggtactttgttttaggggaaaaaatctctcaaactgtgttttccctctattctcacatcacaaccatcatcatcaacacagaagacttgtgtgaccagaccaaacgtgtggggatttccccctacatatcaagcagtagacatcagctaggtgtcctccaattcaattcaaacactctccacccggaaatagtatcagatctcacagtttgagggcccagtcccacaagactgactgttccctcctccccaccagttacaagtctgagcctccagaacttctgaccaactggcttcaagttggggtttccacattctcctctttgggtctgattaatttgcttaagtggctcacagaactcagggaaaagcttaacttagtttatgggtttattacataggatattttaaaggatacaaagaagctgggtgcggtggctcacgcctgtaatcccagcactttgggaggccgaggtgggtagatacctgaggtcaggagtttgagaccagcctgaccaacatggtgaaacctcgtctctactaaaaatacaaaaattagccaggtgtggtggtgcatgcctataatctcagccactcgggaggctgaggcaggagaagtgcttgaacctgggaggcagagattgcagtgagctgagattgcgccactgtactggtcaacagagggagtctttgtctcaaaaaataaaaaaaaaagaaaggatacaaagaaatagccaaatgaagggatacatagggcgaggtctggaagggtcccgagtacaggagcttctgtccccatggagttgggatgtacctccctcctggcacacgaatgagttttgcaccttcctgtcaacctccatgtattcaaaatgctctctggaagctctctgaatcctgttttttgagattttatggaggcttcattacataagcacgaatgacaactgtgtagaaatgtgattggacaaaatgggtatgttctcatactaaccgactgagtggggaagcccaccaaggcctgtccagattctccttgacctctctgtgcagcattcctccctccacagtaaagggcaggaccctctctagaatgagaatgagaatgaggatctctggacccacaatcagattagagtcttgccttggatcaggtaaaaggaggacaggagaaggtcagagagagagattctgtttcctgaggattgctcctgagccctaaagcaccccaacattataacagaagaccgtaaccagggctacggagggttgtaagccaggagccatggacagaaacatacatgtgtgtacagtagctcacgcttttacttttttggagtcacaacttcttaatggcttgatttcatgacatattttctttggtcttccagaactttcctcttaaaaaaacacagcaaaaaaacaaaatttgatttgaaatttttgagatttttttttaagagtcattagcaaatccactaatgaattttccccaagcagttaggagatatttctcttcattacacctttgggatttgagtgcttttgctaaaaatttaagttttttttcccactacggttttaatatgaacatgtggaaagacttcttgtatagaaaaatgacttgcaaaatattattttttcaggttctatggagtgatttcccccccttaggaaaaaagaactcaggaattttaagtttatatgtatatatatttattttattttattttatttatttattttaagacagactctcactcttttgcccaggctgggggttcagtggcctatctcggctcacagcaacctccgcctcctgggttcaagcaattcttctggctcagcctcccaaatagctgcgattacaggcgcccaccacaatgcctggctaggttttatatttttagtagagacagggtttcaccatgttggccagtctggtctggaactcctgacctcaagtgatccagctgccttggcctcccaaagtgctggaattccaggcgtgagccactgtgcctggcctttaagtttgatattttattcagataaatatggaaaaaaaattttagctttattggcaaaatttattattcatatagaaatcatctgataatctgatagattaagtacagccctgcaactggattctaataaaccaagtcctctaggtcattaagattgttattggacatgaattcagtcattgagaaaataaaacattgttttgttgttcctcagttgtggtttttgttttttttttaagatagagtttcactcttgttgcctaggctggagtgcaatggcatgatctcagctcactgcaacctccgcctcctgggttcaagtgattttcctgtctcagcctcccgagtagccgggattacaggcgtgcgccaccacacccagctaattttttgtatttttagtagagatggggttttactatgttggccaggctggtctcgaactcctgacctcaggcgatcaacccaccttggcctcccaaagtgctgggattacaggtgtgagccactgcgcctatccgtactgttttttttaccccttgctttttttttcctttctgctgagatgctttaggttttaacagacatgtgattgggccgaggggcatgtgaggaggctggacaattaactacagttagcttattgcatttatcagcaccagattgtgtgtggttgaaatggccaaggtttgatgttttgttatgaatgttccagtatatcttataaattacattttcttaaattgatttgttactacttacaataatgtttgatagtattaaataaaatcctacttattctgttaaattcatataattggtagaagaatcatagtccggttattactcttttttgagacaaagtcttactctgtcacccaggctggagtgcagtggtgtgatcatagatcactgtagcctcagcctcctgggttcaggtgatactctcacctcagcctcccaagtagctgggaccacaggtgtgcaccaccatgcctggctaatttttttttttttttttttgagacgaagtctcgccctgtctcccaggctggagtgcaatggcgtgatctcagctcactgcaacctccgccccctgggttcaagcagttctcctgcctcagcctcccgagtagttgagattacaggcgcgtgcctccatgcccagctaatttttgtatttttagtagagacagggtttcaccatgttggccaggctggtctcgaactcctgacctcgtgatccacctgcctcagcctcccaaagtgctgggattacaggcgtgagccaccatgcctagcccacctggttaatattttttattatttttgtagagatagggtctccctgtgttacccaggctggcctcaaactcctagagtaaagtaatcctcccatctcagcctcctaaagtgctggtattataagcatgcagttcttattctcttgttgatctgattataaggctctatttaagacagcataggcccaactggcagaagtaggtgatggctggatattgagaaataatgttttctttgcatgatccttaaggaagctgacctggttacaactcatgaattgggacataattttggagcagaacatgatccggatggtctagcagaatgtgccccgaatgaggaccagggagggaaatatgtcatgtatcccatagctgtgagtggcgatcacgagaacaataaggtatgtgtgtgtcgagaattttttatgtggtttggaaagaggctgtgtataatgatcataatgagagctcagaaacgtattccattcctaggcgtttccctagggatggatgtgcaaattacaaagtaccttgaaacgtggttgtgtgttttggggtgaagcacggttcatctaaatctggttaaaactatcatttggactttgttgtcaagcttaatggtgtagatttgagctctaggaaaaattactaataataatggctttttttggagttctggatttcagggtctggtgggctcaggctttatgttaaaaatttgtcatttcatttacaagttgtcattcattttaactctacaatttacatgtacagtttacacgtttttattaacttttgcagttaaacacatagtttgcctgactacaagcctcatgggagaaaggcccttccttgtctgtcttattcatagctctatcttattcatagctctatctccagtgcctagtaggagtatctggcatgtaacaaatatttgttgaataattaatggaatcatttactattgggggtttctgatagagaatactagttgatttgtgatactgtaaaacactttcagagactttaagagtgccgtgactaactcttagagtctgaactaaaagttgtgttaataaatatctggttctttcattttatttgaagttaaacagcataaagcagtgtgaggaaaacaatagttgcactgctgagttaaagagggtcggtggggagagcttaaaggagtctgattctaatcacaaaagattgtgaagtatttgtcctgactcctattttgagcttggctgtgggctaatgtgcaagccttccctggacacagagggcaagattacttctgcttttccctggctctgacaccctgctttctgaaatttctgcctcctgttctttttgtgatctttgattgttgcatctcatttttttttggctttttatgtatattttctgcatctcattttctttggctgttatgtgtaaacagttcctctgttactttgcatgttatgttttatttttcctctgcttgacaacttgtgccagagaaacatttttctacccctttttgtctactcttccaacctgtcaaactgttgaattttccttctcttttcatagtctctgcatttctaatcatgttcactatagttcagtgctgcccaatagaactttctgctgcggggcgggggatgttttgtgtctgctctgcccagtatagtagccactagcccagtggagcaattgaaatgtggctagaaactgaggaactgaattgtaaattctattttatttaaatttttaataatgtttgcctgtgatgggagacgggaatgggcattaactgtaaaaggacatgagtgagattactggaaggatggaaatgtcctaaaattgacttatagcaatggtttcaacacttggtaaagttattagaaatcactgagttatatacttgaaatggatcaattttgtgatatgtgaaatatgtcttaataaagttgttaataagccaacaaacaaaaacagcagtgtgggagcagaggaaaagtagcgcggatgtagaggagctgtgaagtcataagttgattattgttgaagctggtgaggggcacgggggcattcatgataccatcctgtctacttcatagatgcttgaatatttctgtaatagaaactgtaaaatatgtgactaggaacaaaatttaagtagccacatatggttggtggctaccatattgcatactgtttctctaagtaataggtcatatgcttcttggttatgaggatagtgtcagaacttgggagcaaaatgttttactttgcagactgcctgggtggacatgcatgctgctgactcttcctgctgccagttctggggctcttcaaaacagccctgtaagaacttgccagtgaggcatggtggctcacacctgtaatcccagcactttgagaggccgaggtgggcagatcacttgagcctaggagttcaggatcagcctggacaacatgtgaaactccatctctacagaaaatacaaaaattagctgggcatagaagcacatgcttgtagtcccagctactcaggaggctaaggtaggaggaacccggggagttcaaggcggcagtgagccaaggttgtgctactacactccagcctggatgacagagtgagactttatctcaaaaaaaggaaaaagaaaaaaaagaacttgctaatgagaatggggcctgggaagaactttttttttctggagctgccagtctgtatcaatgaagaacaatttatttattttgtcctgagcacatcatatttagtctgtgtttttctagtttggttgcccaagtaggagtccccttgtaagaagataatgtgcatcttctatgttttatttatttattattatttattatgattttttgagtggagtctcactctgtcgcccaggctggagtgcagtggtgtgatctctgctcactgcaacctccacctcccaggttcaagcgattctcctgccttagcctcctgagtagctggggttacaggtgcatgccaccacacctggccaatttttgtagttttagtaggatggggtttcaccatgttggccaggttggtcaactgactggtcaacaaactcctgacctcaggtgatccacctgcctcgacctctcaaagtgctgggattacaggcatgagctgctgtgcccagcctatgttttaaatgaattccttaataaaaatatttttaactgatgaaaagggcttacaggacaaaaataaagtagttccttgacctagaaagacagaacccatcaccctctactaggcaagcctatgaagagcagtttgccacaggtggacttctctgtggacagatgacattagtgaaaaggaatgtaggacctttgagattgtaacttcttaggaaggtttgctgaacggaagaggaagtcttatgacaaggatgcaaacagaagctgccagatcttcagggatgtgtaggcagaaagccagagttgcgggttggtccttttatcgttagtgctctccagctgcttgggagttgtaactctgacaaatcagtgaagaggtcttcttatctgttcactgtgaattttaactccattttaacctgataaaatggaacccagagatacatgatgttgatgaataaacccaccaaaatgacaactgcctgaggccccgattagaataaccagaccccttagacatctgtactgtaacgacagatttgggccgggcgcggtggctcacgcctgtaatcccagcactttggagaccgaggtgggcagatcatgaggtcaagagatcgagaccatcctggtcaacatggtgaaaccctgtttctacaaaaaatacaaaaattagctgggcgtggtggcatgcacctgtagtcctagctactcaggaggctgaggcagaagaatcacttgaacccgggaggcggaggttacaataagccaagattgtgcctctgtagtccagcctggtgacagagcaagactccatctaaaaaaaaaaaaaaaaaaaaaaaaaaacagatttgaagatgttttttaaaaagccagttagtatttctgtgtaagatgaggtctttgctatctttctgaaagtagctcctttggtgtctgatttggtggttacaggcacctttggagggtctcatacacttggctctcaggggcttcatgattgttgtctggggtgaaagtgaagccattttggcatctgcagagcactttggagaccccgacctaagaagtaactatgctcagttttccctaagcctcttctttttttgataacttcaggaggtctggaaaatgaccgcagttttagagctcctgataaaaccctcagccttaaaagggagttatcctagtggttctgtactccagggtgggaaggtagtgtagagactttttgagacactggtcttgctggttgatgaaaatgtttaggtaacaattggggatttaatttatataaaatgtactattatgcctattactaagctcaaatatttaaacaactttaaacttggatcatccatataagtagccaaagaaggagaagaaaccccttctcctgcatttctgaattgttttgtctgggacaacattaacctacagaggttcttaattcttgtcactgcatgagtggcatgcctgaggtgaggagatttcaagtctgatggagctacgagctctctgttgtgctattctgcttgtccttaagtgggctttgactgggatgtttggtctcagtatttgtatagcttgcttaccttcgtaagaagaattatagatccttaaccaagttcacatcagccatttagcattctatggagggaggttcccagttccatatcagtggcctttggaggagactgtggtggccttgccataactccagggtggctctgatggtggttttacattaagagtttgtctctagagaagacacaaacattgcatgggaatacatttttatgatattattttgggtccttattgccttttttctctcaagatgttttcaaactgcagtaaacaatcaatctataagaccattgaaagtaaggcccaggagtgttttcaagaacgcagcaataaagtttgtgggaactcgagggtggatgaaggagaagagtgtgatcctggcatcatgtatctgaacaacgacacctgctgcaacagcgactgcacgttgaaggaaggtgtccagtgcaggtgaggagtctctccacagggattttgggaagttggtataacaagatgtccaaaataagagaagactgaacttgcaggggctttagaatcaactgaaaggggtgtgagtgtgtttgtttacatctacctcttttgcccttcacagcaagaaattgctttctgggcctggcacggtggctcactcctgtcatcccagcactctgggaggctgaggtgggagaaatgcttgagaacagcctgggcaacatagtgagacactatctcttaaaaaacaaaaaacaaataagaaaagaagaagctttctggaaagcagtgtgacattatgtaacaaaatccttgaccttgcatgctccttggtttagcagtcctatagttaaaagaatcttttttttttttttttttcctgagacagagtcttgctctgtcgccaggctggagtgcagtggcgcgatcttggcttactgcaatctttgtctcccgggttcaagtgattcccctgccttagcctcctgagtagtgggactacaggcacgcaccaccatgcccggctaattttttgtattagtagagacgaggtttcactacggtggccaggatggtctccaactcctgaccttgtgatccatccaccttggcctcccaaagtgctgggattacaggtgtgaggcaccgtgcctggcaaaataatcttttttatttaatttaatttatttatttattttgagacggcgtctcgctctgttgccaggctggagtgcagtggcgcgatctcagcgcactgcaatctccgcctcccaggttcaagcgattcccctgcctcagcctccccaataactgggactacaggtacgcaccatcacgcctggctgattttttgtattttagtagagacggagttttagcatgttggccaggatggtctcgatctcctgacttcatgatctgcccaccttggcctcccaaagtgctgggattacagaggggagccaccgtgcctggcctttattttctttttgagacagggtctcagtctgttgcccaagatggagtgcagtggcatgatcatggctcactgcagcctcaacctcccaggctcaatcagtccttccacctcagcctcccggatagacaggactacaggtgtgtgccacctggctaattttttttgtattttttatagagatggggttttgccatgttgcccaagcttgttgtaaagtcctgggctcaagtgatccacccttctaagcctcctaaagtgtggagattctaggtatgaggcaccatgcctggcccaaataatcttttatttctttttttttttttttgagacggagtcttgctctgtcgcccaggctggagtgcagtggcgtgatcttggctcactgcaacctccgcctcctgggttcaagccattcccctgcctcagcctccccagtagctgggattacagtgtgcaccaccacgcccagctaatttttgtgtttttagtagagatggggtttcaccatgttggccaggctggtctcgaactcctgacttcgtgatctgcctgcctcagcctcccaaagtgttgggattacaggcgtgagccactgctcctggctgcccaaagaatcttttgggcaacagagataagatttaacaagggtataagatttaacaaggtttttttatggctacatcctaatagcaaaattttggaaacaatcaaaatgacagtcttgggatatgaatgttatcatgattctatatactggaatagtgtggaggaagtaggttacaagttagaaagttacccaggttttcattttttatatacactgatagaccagtgcctggcttagaagtaaaagggttaaacttcagttttctggtgaataattgagatttaactggatacagtgcatattaacgctgtaaatactgatggggagtagagttctggctgccgagtgtcttagctatggattgccttgtggccccaccttgtcttttttttttttccttgtctttttttttttttttgagagagtctcgccctgttgaccaggctggagtgcagtggcgcgatcttggctcaccgcaacctctgccttccaggttcaagctattctcctgccttagcctcccgagtagctgggattacaggcatgtagcaccatgcccggctaattttttgtatctttagtagagacggagtttcaccatgttggccaggctggtctcaaacccctaacctcgtggtccacctgcctcatcttttttttttttttttttttttttgagacagaatttctctcttgttgcctaggctggagtgcagtggtgcgatctcggctcactgcaacctctgtctccggggtccaggcgattctcctgcctcagccttctaagtagctgggattacaggagcgcaccaccacgcccagctaatttttgtatttttagtagagatggggtttcaccatgttggccaggctcatctcgaactctcctgacctcaggtgatccacccacctcggcctcccaaagtgttgggttgggattataggtgtgagccacctcgcccagcccatcttgtcttttttaaattaatgcgttaaatgaatgaaaaccaagggcaccaagatgtttcacaggtgattgctgtgttcccattcttttctcctatagtgtggcatttatgtgacctcacgcacattaggaagggacaaagtgtgtgcaggtagctctagcagcggagatgtctgatgatgtaggagtgggtgacggagccaggaggtcttccccggtgatcttcaggtcactgtaacgtaactgtagcgtttgatttgatatggggccataatttgaattgctctgttcctgtctgctgttcttctccagtgacaggaacagtccttgctgtaaaaactgtcagtttgagactgcccagaagaagtgccaggaggcgattaatgctacttgcaaaggcgtgtcctactgcacaggttcgtgttcttgttgcttccttggaatgctgtgggtcaagtgtgtgtgtgtctttgaaaaacaagattatgttttgttcagatgagagacaccttatttttaatctcatatgccgggttgagtttctggcactccttagtttgtgacacttggctttggtgggtttaagacctgtttctatttctctttcatttccatcactctcctctttctcctcacagacatccactctactgtggttaatatttgcctggatatgtgtatatccttgaaagatcatatagtgttattttgtgcatgtatgtgtttttaatgtgccaaaatgatattctaccttaaatttacttttaaaaaattcagtatcatgttttaaagaattacccatattgtgctacagataatataacaaggtttttaatggctacatcctaatagcaaaattttggaaacaatcaaaatgacaatcttgggataatgaatgttatcatgaatctatgcactggaatagtgtggaggaagcaggatacaagttagaagggtaaccagtttttctatatgtatctatatgtatttcactgttggggacacctacatattgtttagttatatgattggctgtgttttacttacaagtcaccaagtggtagctacttccattgccttcatccccttgatattccagataggacacagatcacatcctcctacgtcccttcaggaacctgtgtgtttctctgggtactgaggagtgtcattgtgtagtcacagaggcaggatgtgctggtctctagagcaccactgctaggttgcctgtgtctgaggactccttatcctgacgttctggccaacgcttggaattaccctgctgtcctattagcatgatgagtataaagtaatctcttgttcttacttttttttttaacagcccttgtcctaatgcacttacttacatttttcttgagcatctctttatatttttcagctattcagatttctcctgtgaatagccagttcatatatttggttcattttttaaaaattgggtttcatgttatttcactactgtgaatttggaggagttcttatgtaatcatccatttgggcatacgtctcctatctgttgccattctcagaacagaaatctttaacgtaatcaaatccatcattttgttgtgtgtgtgtattttttaaacacatggttcagaaaagccatggcggatggttaaaaagatattttccacagctgcttctattagcttcataagttgtccttttacattcaggacttgaatctttctggagctaacctttccaggtgtccagtatcttttgttcggtcaattgttgctttaaaaatttcaaagctatgttattactaggtatataaacggacatatctctacatctttatctgctgttccttaccagtatataatgttccttttttacccttgcgatgttttttgacttaaattgtcaaaaagcaatattcagtttgctattctagtttttttgttcctctgatatatctatctgtcccattcttatatttttcaaaatttgtctctcttggttggttggtttgattttgtaatagctttattgatacataattcacactcatgtagtttgcccatttaaagtgtacagtttaatgatttttagtatattcagatttatgcagtcatcacaattaattttagaacatttacattactccagaaagaaaccctgtatcctttagctatgatcctccaatccccccattccccacaactcagagcaaccactaaccaccctattctttatggagttgtctgttttgaacatttcatataaatggaattatacaatatggtttcgtgaccacatattgtatgactggcttctttcactgaacatagcatttttaaggttcatgtatgttgtagcatgtatcagtacttcatgtacttttattgctgggtaaattccattgcatggatatgccacattttgtttattcattcattggttgatagacatttgggttgcttccacttttttgctataacaaataatgctgctgtgaacatttatctatgagtttttgtgtggacagttcctttggatattattcaggaatagaatttctgggtcatgtggtaactatgcttaatcttttgaggagctgtcagactgttttccaaaatggctacaccattttacagtctcagcagcattgtatgagggtcccagcttctccatatcctcaccaacacttgttatcttttttattgtaactatcctaggttttgtgataaggatgcaaacagaaagctggaggtcttcagggacctagtgaatgaagttgtgtcctattttggcttgattttggttttccgtgtgcatagtatgacatgttgcccatgtttttatcttttgggatctgtcactatcacattactttgccaaatgttaggaacctgatggcccggcacagtggctcacacctgtaatcctagcactttgggaggccgaggtgggcagatcacgagatcaggagatcgagaccatcctggctaacacggtgaaaccctgtgtctactaaaagatacaaaaaattagctgggcgtggtggcgggcgcctgtagtcccagctacttgggaggctgaggcaggagaatggcgtgaacccgggaggcggagcttgcagtgagccgagatcacgccactgcactccagcctgggcaacagagcaagactccatctcaaaaaaaaaccaaaaaaacaaatgttaggaacctgaatatctaaatcaagctttaaagaagcatttgctagctatgctcaatgtttcatcttcactgtaataataaaatagattgagaaaaatgctttcttttaaataaacgtaagtaaaacaatttgaaaacgtttgttcttatcaaacagccttttgttcccttgatattttatacaaaatagtagatagcagaggataagttcctgataaggaatcagtattttctagcaggaaaagctagagaacaacaacctcaaaaaaaaaaaaaaaaaagaagaagaaagaaaaaaagcaattagcatttcacaaccagcagcagcagcatcacctgggagcttattagaaatggaaattgtcagtcccctccctggatctactgcatcaaaaaatgtgggaagggaggccagcagtctgtgctgtgtaaccttctgtcaggtgatttccatgcatgctaaactttggggaccatgctagatagatgataccattttcagaattattttcctacctgtctaatactctgactttagtcttttaagaacagatgctcaacagatatttattgagcattttttaatgtatcagggcagtatcatataccaaaaatacaataatgatccacaatataaaccttccctgagctcactggacatcatactttcagtaatagtttgttaaatgactgttgacatgatgaatgcccagtgctcatgaaaggttttatgagaaccagaggcaaagtgcctggttatctgttgggtacttaataaaccatcacttttgtttgaaactggccagattttctgtacattttgtgttactgctctgaaaccctctaagtcagaattcttttgattggcttcattcttcagctgaaaggccagtccagagctgtggatatatagtccattgctttcataaagtgttttttttctcctcctctatttgtgttgacttttagctacttgtgctattcattttccagaatgattcactcattccatcctgtctctcccagtttaactttctttggtgggttttctttggcattattggcctgggcacagtggctcatgcctatcattccagcacttggaaggccaaggtgggaggatcccttgagcccagcagttttacaccagcatggtcaacacagggagatctcgtctctcaaaaaaaaagaaagaaaattagccaggtatggtggcgtacgcctgaaatcctaggtacttgtgaggctgaggcaggaggattgccggaacctaggagtttgaggctgcagtaagctatgatcacacccctgccttccagcctgggtgacagactgagaccctgtctcaaaagaaaaataaaaagaataattgatttatttaagaaatatttgtagtatacctataatatgatagggattggagataacttaatagatttgatcattgctgtcatggggctttccagtctagtagagggaaaacagaaaataacattaaatatatatatataaattgcaaaacatatgcaatgaaggagagaaggagtgtgatagtgcataatggaagtgggaggccacatcaacttagcatcctcagggatatctcagaaaacctttgagacaaaacttaatccataagaaaagccagctaattgccccaaaagagtggaaacaccagcattccaggtagaaggaatagtatctgttaatattgaaggaactgaatggaggttgtcatagccaaagcagtgggctgtgggagagttgtgtgcgatgaagtcagggccagatagggaaggccgtggagttcttttaagccttcatacaaagtttgcaatttattctaagtaatagcacataggatattcttttatatatgactgtgagatgcagaagtggagaccatgcattctaactggggcttgggaggccagggactcatgcagcctagcctggcacatagccaggcactcccatttaaatgctgattgctggtgagatgcaggctcttgtcctagctctgtaggtcactttttgcttttgcaaggtaagatgctcacttgtatgagaaacagcgtattatgcacctgtagaactggtggacctgtgactcattctttttgttatgactggtgtttgcttccaggtaatagcagtgagtgcccgcctccaggaaatgctgaagatgacactgtttgcttggatcttggcaagtgtaaggatgggaaatgcatccctttctgcgagagggaacagcagctggagtcctgtgcatgtaatggtgagcagttttattcccagtccagcagcaggagaaaacatggcctttgtctgccaggctcccttcctccatttggaggttgtgcgaatgacagcagtggtgagatccaagccgaggatgaggggatggggaagggcagggtggtgtctggagacaggcatctctgcatgcagatccaccatacctgggagacctatcctgttggtgtttcttcttgctgcagtttcaggccatatggcaggctttgaggtgggagaggagggaattttgttgggggtgagtgggtgggtaggtagaggtgtgtcctagccttcctctgctccatatcatacaaaccacaaaagcagcagtagctatctacattacattggcatggaactaggatactcctgcaacaactccaccagagagagctgattccaggacctaaccccactagatgaggatttttgcagttatcaagaaggctgggtctgctcccctctgatctcttagagcagcctggggcaggagcctctctcctgctggcctgtcagttttccttaggtttctgtgctattttggaacccctgggtttgagggcatcctcatggactggtcagggactggctggactctgcttcccaccccacttaaaccatgggagtcgatgagggagttctcttgctttcaaaatagacagagagccaggtgtggtgactcacacctgtaatcccatcactttgggaggccgaggtgggcagatcacttgaggtcaggagtttgagagcagcttggtcaacatggcaaaacgctgtctctactaaaaataaaaaaaattagccgggtgtggtagcgtacacctgtaatcccagctgctagggaggctgaggcaggagaattgcttgaacccagggggcggaggttgctgtgagctgagattgcgccgctacactctagcctgggcaacagagcgagactccatttcaaataaataaataaataagtaaaaaataaaataaataaaagacaaagaacccggtagttaaataaaatcactgggttggaagctcaccatccatacagtggagtgaggaactcttccaagttcaataatgtgtaggtaaagaagataggttgagggcagtgtctcacatctataatcccagcactttgggaggccaaggtgggtggatcacttgagctcaggagttgtttgagaccagcctgggcaacattgtgaaacctcacctcttaaaaaaaaaaaaaaaaaaggtaacacgtagcagatgccaaataaatctgttgtgttgaatgccaagaggcttggggtgctctggaaggacagagcccgacacagtaaaagtccaagaaatattttataaattagtgaatgatgaaaaggttttctttttttttttttgagatggagtctcactctcgcccaggctggagtgcagtggcgcgatctcaggtcaccgcagcctccgcctcccgggttcaagtgattctcgtgcctcagcctcctgagtagctgggactacaggcaagcaccaccacatctggctaattttttttatttttagtagagatggggtcttgccatgttggccaggctgttctcgaactcctggcctcaagtgatctgtccgccttggcctcccaaagtgctgggattacaagcgagagccactgctcccggccttttctgaaaaggttttctttttgcttgtttttgtgttctagttgatttctttttctcctaagtatggtttaattttctggcatttctgccattcttatgtatgcccacatggctcacagatgcccggtgttttatcctgtgacctgtcagagctgttcttgggaggagttgtggagctttggctgcagggctcatgctcctggggtcactgagctccccacccaagggtggacagttgtgtcccagctgctctcgctttcagggagccagtgtgggccctgaggggcacactttagactgaaaaaccaaggattgaagtcagcagggtgacaagaaagttgggacaaagggaagcatttagaagagcattgtgaggggcttgaaggggagagaatagttagactttgaagagaggtcttgaatctagaatggatttttctctgcatttttttttaaaccttgtggcctctgtcactgaaggctgaggagtgtgacctcagaaactactccttggtgggggctatggatagtattagctatttaaataaaaaataaatgtgatttcttacctctttgggagcatggtcagggaggaaagaggaggcaggaggagaggcaggtctcagaacaatccagctgtcaatgcgtgttctctgttccagaaactgacaactcctgcaaggtgtgctgcagggacctttctggccgctgtgtgccctatgtcgatgctgaacaaaagaacttatttttgaggaaaggaaagccctgtacagtaggattttgtgacatgaatgtgagtatttatgtacagctttttctgtaacagccagataggaagtttttattttgtaagtacttgattttgcagatgaaaacaaatcaaaacacaagtggggctacatccttctggcccattgttatctacgggtattacttaggaggagaagacggagtgctttcaggtccctgcctgtagtttccttctgtggtgggaggctttgagcccagagactgagaaggactggggtggggactttatggtaaagttggttggtttcaggcagtgggtcctaattatgttttcctagattacttacagaactgactaagattgcaaaattattcagggtgtgattttgaaacaggtgctgaatgagtaggaaagacctagaaggctgcttgacttacttaagccagacccttttgttctctagagaagcataatttttctcatgcagaatgatgggagagggttttaagatttacgaggcttcacagggagtctggctgtgttgttcactgtccactgtgtatgtgtagagtccttactggaatgcctcatctttagcaaactggtttccttgatttttgtctcctggtaattctaaatcacttgtaaaaatggagtaattatgaaagtgttaatgacagatgttctactttcttgggtactcattacgcggaagttattgccttgtgtcaaagatgggaaaacgtttgattttaatgaagccctttacatgtcagttatttttataaagctacattgcttctgaatacattgtgtttgggaatgatgctgtatgtatgttttttcttcatagggcaaatgtgagaaacgagtacaggatgtaattgaacgattttgggatttcattgaccagctgagcatcaatacttttggtaggtgatttccccagattacttactgagagctgagtcaatttctgtgatgacattagaaaagtgtgctttcagagtgatgtgctttaattctgcagtagaaggtggaactattcacagctttagttatgaaacaactttgttggctagaataaaatgaactcatagatagtctgtccccgtggagcttggatgcacagattttctgacaagggaaataaagtcaaaatactggcttccttctttacccaaaaatatccatgtgattagcataagcatagtttaatgctatagactgaatcctgattgatgtaagagtgtttatttgactgaatgctatatactgaatcctgcttgatgtaaaagtgagcctcatattttgcagaagcagggtatatcatgttgtcacgagtccataatttaatcacaaaaataatatccaggtaacaaaaactttgtcttcttaagcatttactagtagtagcattccatattaatctgttgacacagctactccaggtaacatgttgaatattctgcaatctcttcctgtcagccagtatatgagggctatttctttaaaagcacttggtatggagagatggtgtggtgtaatacaggcagcacagacattctgctctcggtagtatgtctagccagcagctctggcatttgacacaatggtaatatcctaagagcatttcactttagatttgtgaagtacttggtcaagacattaactgtttggaattgttcacaggaaagtttttagcagacaacatcgttgggtctgtcctggttttctccttgatattttggattcctttcagcattcttgtccattgtgtggtaagtcatcaacttttaagtaattaaatgttttatttaaattttgatcaactccaaccatgtaatctctggaaaaggtaaaacttgttcttagcaaagtttggcctgatatttccaatagctttttttgttgttattcctaggggaacatgtcttgtagaaagcttaactaatggtcttttaaaaaaaatactatttttgtgtgttggtgttttaatatataaatttcttaggaattttatacttttaagcataggagactgtttaactggatttgtccaggtcctttgatgagtaaagcccttattgaagagcattttcaggctgacttcgttgcaatagagcaaatatcaaacatcggcatttcagatgttccccatatatcatgtagattattggcagcagatggctatgtcttcagccttctgcacaaataggatgtagggactggggcccagctgtcatatagagtatttacatcttccccaaaaaataagagtaagcagtcttttctgttctcattcagaatcagtaacagctacaagttgaattgggctttgactaaggaactcctggtcctttataaatttgaggccctttttcataaatgttcttacgaatccattcacttgcatctgtggggaatggggatttgtctgctgtagagatgagaaagtcacacccaggcttccagacttgttttcccaaactctttcatagtggccttcctatgagcatttaaaaattccagcacaactctgatgacaaaggagtttttcctactgcctccttcctttcctttcctgctggcttctcctgcctaggggccatctcacagagcagctcttcctcagggtggtgagcatgatgggtataggaagatctctagggagcacttgtgctgaagaaagctgaaggtgacgtgcttgaagctttgacagatgtctctggatgacagtgccatccatcacgattgcttctattggaggatggaacctattttgtttacagggaagttgcacatgtggacaaggcacgacccttgatttcagagcaaagcctccgataggagggagggccatggcttgtttttggtcatagaatgcattgatggcacccagacaggaagcctagtcctggattcttggtccttgccctctgtcacctattatgcttcagccacaggcagggatggggcagcagatggccatgtggttagccttctgcagaagtaggatgtagggattgaggcccagttcctccagcagagcatggtccacagaaactgtggagacagctaagagagtgaggccatgggccggggcagtgcgaagaatgctgcaggcccagccacctgggtcttcctaccagttgcccttccagtcagtgcggtcctggtgtacccagcatctgggacatttgtcatttcatgcacaggaagatgcctttattattcccctgcccacagagggataaatttctcagaaaacatagcacttaaaccttgcctctttctgtacttaacgccaaaatgtatttcctttgagtgcaaaggaaacacttctagactggtggcataactaaagcttgggtgagaaatggattgtcatctgttgagcctgctatcactttctacaactcaggttctaagttcttcagttagtgttaggaatagcctgtgatgaaatagtactcactaactgaattgtatttgtagggaatgaccttcttgctgtttctttctaggataagaaattggataaacagtatgaatctctgtctctgtttcaccccagtgtaagtataccatatgaaagaaacataatcttcgcctggtctgaggccctgttaggcaaagaccttcacctgacccagcaagagctttcactggctgatggaaggtcatgttgcagcaggaagggtctaggttggaatgtttacccttctgacaacagtgatggtgaacttcgattagttgcatggatggacatttaaagagctgtgctgtccccttcccaagccataaggagtgatttagccattcaacacttagttaatattttgagttcaatttctctcttgggatcttaccttgagaggtttgaatcctcttttgggtcttcaaatggtaagtaagttttcaggatgcttgaaagctagtaattactgtttttgccattaaaagtaatggcattaattacttttgcaccaacctagtattttttagtcacttaggttgagtgagcctcacctagcacttttttcttagcatcacagtgccaacagaataagaggctgtttgatgggtaagggtggagctgtgaggacctccgattcatcttttattcctatcaatcaattgaacccatgtctttgcagaacgtcgaaatgctgagcagcatggattctgcatcggttcgcattatcaaaccctttcctgcgccccagactccaggccgcctgcagcctgcccctgtgatcccttcggcgccagcagctccaaaactggaccaccagagaatggacaccatccaggaagaccccagcacagactcacatatggacgaggatgggtttgagaaggaccccttcccaaatagcagcacagctgccaagtcatttgaggatctcacggaccatccggtcaccagaagtgaaaaggctgcctcctttaaactgcagcgtcagaatcgtgttgacagcaaagaaacagagtgctaatttagttctcagctcttctgacttaagtgtgcaaaatatttttatagatttgacctacaaatcaatcacagcttgtattttgtgaagactgggaagtgacttagcagatgctggtcatgtgtttgaacttcctgcaggtaaacagttcttgtgtggtttggcccttctccttttgaaaaggtaaggtgaaggtgaatctagcttattttgaggctttcaggttttagtttttaaaatatcttttgacctgtggtgcaaaagcagaaaatacagctggattgggttatgaatatttacgtttttgtaaattaatcttttatattgataacagcactgactagggaaatgatcagtttttttttatacactgtaatgaaccgctgaatatgaggcatttggcatttatttgtgatgacaactggaatagttttttttttttttttttttttttgccttcaactaaaaacaaaggagataaatctagtatacattgtctctaaattgtgggtctatttctagttattacccagagtttttatgtagcagggaaaatatatatctaaatttagaaatcatttgggttaatatggctcttcataattctaagactaatgctctctagaaacctaaccacctaccttacagtgagggctatacatggtagccagttgaatttatggaatctaccaactgtttagggccctgatttgctgggcagtttttctgtattttataagtatcttcatgtatccctgttactgatagggatacatgctcttagaaaattcactattggctgggagtggtggctcatgcctgtaatcccagcacttggagaggctgaggttgcgccactacactccagcctgggtgacagagtgagactctgcctcaaaaaaaaaaaaaaaaaaaaaaaattcactatctacaaacctagaatatttaaaatacaaagattgcctgttttcaaacactattgaataagagggtgagatatttcttaacaacaacaacaacaaaaaaaacaggttgttttgaatgtgatgagccagccaggagatagaatactacctgcccttagggttgggggctgtccccacaagacttgatacttcagaaaccctttttattgacccacaagcagatatttgaattacttcttactttattgctccaggattctggatgggctgcatttactgtgtgaaggataaaaatcattagcctggattctgatttctataaattgccattaaaagctttttttcccctaagaactgaaatgtgctcaccagccaaaacattttaacttgtaaattttgagggcagttaaccaaacctgtgactaatcatatctcctcctaccccccatttccaaggacatttgttactcagatacttgttatactaatacttgaacttgtaccttatggtatttgctatcttttaactagtcatgatattcttatactttagttacacttttggaatttgatacaaggttgagtggggtgtgtgggtgtatgtatgagtgaaacagttctcaaaagaatgtaagaaaaaccatttttataaaattgtgactttttaaaaacatagtctttgtcatttatagaattaacaagctgctcagggtatattttatagctgtagcactgatatctgcattaataaatactgtcgaaacacaa

SEQ ID NO: 15373 - DNA, 34197 bp, Homo sapiens
cgccacctgcacttctgggggcgtcgagcctggcggtagaatcttcccagtaggcggcgcgggagggaaaagaggattgaggggctaggccgggcggatcccgtcctcccccgatgtgagcagttttccgaaaccccgtcaggcgaaggctgcccagagaggtggagtcggtagcggggccgggaacatgaggcagtctctcctattcctgaccagcgtggttcctttcgtgctggcgccgcgacctccggatgacccgggcttcggcccccaccagagactcggtaaagacccaggggagttggcttaggccggcgcctggagcgctcgtttgagggaagagcaggggagctgggtctatcaggtgtttgggggcggggtattggcgatggtggcgcgtccctaagttttcagtgtagaagggggtgtggctctcggagtttggggaaagaataaaggagatgggcctgtctctgagtgggaaagggctactggacgggctccatgtagtgactgagcgcctgagaggggtttgctccctagctttgtgttcggggagggtgttgggaaagcggtaaggagtagggtggctggatcttgtttggagagggagatgtggtcagggttcttgccttagtagggaacaaatctagtgttgtgtgttcctaccagagccagaaaggaagggcccaaagctccagaattcttcctggtcctcgaaggagggaactagaatttctgctgtaggaggtacttatgcagtaatctcgttgggaggcggagactggagttggagtcttaagagttgtgtttttgcgaacatcctaagcacgttcttggttatttcaattgtagcttattggaggtgcttgggagatggggggaggcggaaacctggtaagccaactcgtgatgctgccactatgaatgctttccttgcacttttaaacaaagaaattatcaagagtgacgagtttgatgaatttagaggctagaaagtagagggttcctatttcattagattttccagagagattggattttaaggatggagatgcattaagggatctgaactttggtggaagtaagtttgcgtgaacttttagtgtattttaaaatccttttatctttcaaaaattgacgtgtaagatactttaattagtaataaagtgtgaaataatgttttcccagtgtgtgaaattgtaggcttgcatggttgtactggttcccaaatttcaccatgataccatgtgtagtattttttttctttatatttagtggacagaaattgtaatggattggtatggatactaaaggtgttgagagtgttatcacttgaacagctgtcttatgattctttccgattgaaatggattacaagtgactaatgaaaggcaagggatcttgttaggaagtgctgagaagtggtaagtcagtacaaattgaaggacattttgaggtaggattgtggttaggatggagggatagggtaagggtcttcattttaaggataaatgttagtaaaaagaataaatatgtattttgagatattaaaattatatttgcaccaccctgacacaactgtttcacttatgttattaatctgttgttcgtaggtaaaaataagcatgagtcccaaggaagcatacagtttaaagagaaacattactttctagatcaattcataacatttgcagatcgtaaggttttttagaccattttttttttccaagacagagtcttgctctgttgcccaggctggagtgcagtggcgcgatctcagctcactgcaacctccgcctcccggggttcaagcagttcacctgccttagcctcctgagtagctgggattacaggcatgtgccaccacgcccagctaatttttgtattcctagtagagacggggtttcaccatgttggccaggctggtctagaactcttgacctcgtgatccgcccacctgggcctccctaagtgctgggattacaggcatgaaccaccgctcctggcccatgtgtttgttttttatttgcaaaatgcagaccacctgtgccagaagaatgcatagacttttcttttttcttttcttttctttttctttctttttttttttttttgaggcagtgttttgctcttgttgcccaggctggagtgcaatggcgtcatctcagctcaccacaacctccgcctcccgggttcaagcaattctcctgcctcagcctcccaagtagctgggattacaggcatgtgccaccacgtccggctaattttttgtatttttagtagagatggggtttctccatgttattcaggctggtctcgaactcctgacctcaggtgatcagcacacctcggcctcccaaagtgctgggattaaaggcttgagccaccaggcccggcctctttttttttttttaaacgaaatatttgaaggacacacaagtattatacgtggcattggaaatacaaagatcagacgatatccatcttcaaatggttatagcatagggaaatagacattcatttaggacacttctaaaacagcatagaggagagtgctagagtacgttatagcaagtgttatcaccaaatgaatcttagagatcaagtctagttttcaaataaaggaggaggaaaatgagtctcaggaagatgctgtcagttgtcaatgatgaacataggccttgtgggtatttttcttttgaagaatgactttttttttcagtttgtttgacagcttacaatataatttgttacttaaccttaccattagattgagttggtcaagactagcaaatagtttcatagttgaaaaacatgctttattatttattttttatgtttattgtcctacaaatactactatattgcagtactcaatatcgattaggcatatgacaacatttttctgaaaggcaaaaaatacctaataaaatgaagcctggtttttagagtcctctatgggtcaccaaaaatgatttcaattgaactgttatgaattgcataatttaggaaagttatgagtcatatgagcttagtcatgatgatatcttgttgaagttgcagctggggtgtataagtctcactttgatttcaaaatcgttttccctttgtgttacttttaataaaagaggatgtagtgggtgggaggaaaaaatataggtcacagatgagggatgagaaagtttgtatctgaaacatgtattttcaaatttaccttgaggttattggcatggggattctccatattgcagtgctgatttcattattgacagcaccattttactcagtattttgacatctggctttctcttttgatgttaattttgcttactggctgcattcctttgaaacctaaatgcttaactgccctaactgctccaagggagatttaatgtaactctgctttatattagtctaagagataaaccatatttcaagagtagaatggagaggaattaagcagataattgtgatggggaaactggagagatccttttgactttcacaggatttcctagaacattaaatataggtttcctccaaggccaattgtggttgatttttggatccttcaccattttctatttgtgagataataagtgtatacagctggaagtgtaatgtgaagaaagtctgaaaaagattgataggaaaggaggacaggaatgggcttcattgaggtaacggaagtgaaatgaaaggcttttcatatatgggttgagcatccctaatctgaaatgctccaaaatttgaaactttttgaatgctggcatgacagcacacattacccctaacacacgattttttcactgttagtggtatattttttactgtgtagtacttatgtgtgaataggtataacaaaacgattacttattgtagcatgtaaaatcagtcaggaatgatggtgatgccagacaaccacagattatttatgtgggtggccgagacagtgacacctttgctttcgaatgcttcgttgtacacaaactttttttcatgcaaaaaaagttacttaaaaatattgtttaggccaggcgcggtggctcatgcctgtaatcccagcactttgggaggccgagctgggtggatcacgaggtcaggagatcgagaccatcctggctaacatggtgaaaccctgtctgtactaaaaatacaaaaaattagccaggtgtggtagcaggcgcctgtagtcccagctactcgggaggctgaggcaggagaatggtgtgaacctgggaggtggagcttgcagtgagccgagatcgcgccactgcactccagcctgggcgacagagcaagactccatctcaaagtaagtgaataaatgaaacataaatgaattttatatttagacttgggtcccatccccaagatacctcattatgtatatgcaaatatttcaaaatttaaaaaattctgatgaatgaaacacttctggtctcaagcattttggataagggatgctcaatctgtatctctttatttactcctaaaatcagccaaggaaatgggcatctctccgttcccccccttccttttttttttttctttgttgttacatgagttgtactggtttcacttcatttgacagtgttctgctaatgactagacgtgtatctctgacctggacttgttctctggagttcatattcagctgcccatttggcacttcaaatataacatgtccaaaattagttaccttttttttttttttgagacagagtctcactgtcacccaggctggagcgcagtggcgcaatcttggcttactgcaacctccacttcccaggttcaagtgattctcgtgcctcagcctcacgaatagctgggattacaggtgtcccccaccacgcctggctaattttttttttttttttttttttgtatttttagtagagatggggtttcatcatattggacaggcctgtgttgaactcctgacctctggtgatccacctgcctcagcctcccaaagtgctgggattacagacgtgaaccactgccccagccagttacctattcttttgattacaagaatgagtagctggacacagtggcttacacctatagtcccagcactttgggaggctgaggccggcggatgacttgaggccaggagttcaagaccagcttgaccaacatggtgaaacctgtctctactaaaaatacaaaaattagccaggcgtggtggtgcgtgcctgtaatcccagctactggggagactgaggcaggagaattgcttgaacccgggaggcagaggttgcagtgtgccaaggttgagccactgcagtgcagcctgggcagcagagtgagactccatctcaaaaaaaaaaaaaaaaaaaaaaaagaatgagtatcggatacaggtttagcctaggactaggcagggctgctggtaattgtggaagtagtctcattgcctaacctgaaacttgcatcctggttactggtcttgctggagagtcttggctcaggttacgtcccaggtctgttgaggagctcttgatagggaattagttgaagcagctcatactctatcctcctttactggtataaatccataaaattgtttagttcccaggctctggggtccctggcctagcagagagcactgctccctttttctcattccttagtcccaacaacccgcacctgacacttactacacgtggcctgcttccctgtcctgtgtgttttggggggtgctgaagaggaaggctcctgtgtcttcagcacaaacacaataaacacttcacagcagtactggctttatgttttccatttctgatatcagaagtaggagcatgacattgatagtgtcattttgggggaacttttcgtacttcatgcagcagagcagtgaagagtgagctgagtgccttggggttctgcagtacactctcaagtagtattttaggaaaatgcaatttgctgaaaaaataaaagaaattaatgtaaaaaatccacaagctgggcgcggtggctcacgactgtcatctcagcattttggaaagctaagggggaaggatcacttgagcccaggagtttgagaccaggctgggcaacatggcaagaccttgtctctacaaaaaaatagaaacaaaaattagccaggtgcggtggcatgtgcctgtggtcccagccacccggaggattgctcatgcccaggaggttgaggctgcagtgagtggtgattgtgccctgcactctagcctgagcaacagagcgagaccctgtctcaaaaacaaaacaaaacaaaaacccacacgtttccagaaccttctcatataacactttatttacattgttcttaaatacgtgtgggacggttatatacataccactatacttatgtgtatatatgttgatatacacacaaaattatatacataatttttgtttgtttgtttttgagatggagtctcactctatcacctaggctggagtgcagtggcgtgatctcagctcactcactgcaacctctgccacccgggttcaagcgattctcctgcctcaggcttctgagtagctgggattacaggtgcctgccaccgcgcctggctaatttttgtatttttagtagagactgggttttaccatgttggccaggctggtcttgaactcccacccttgtgatccacccacctcggcctcccaaagtgctgggattacaggtgtgagccactgtgacctgccatatacataattttttaaagtttcacgattagttttagcttaaaaatgtcagctctgggcttaatgaagaaaatatggatatactttatgtcaatgcattaaagtgaatggccataaaagcttatcccagagacaaaacaattcagatataagagaagtgggagagtggaaggtttatctaatcttctgtaggcaactccacagctacaaccagaaggccattttgttacaggcctgaaagccccgttttctttttattcttctttgaaacctttagaaggaacaaagtattggctactttttaccgctgatgtcagtgttaagaatcttgtgataacatagatttactctccctgctgaaaatcactatgtggctcatcagtaacacaactagacatgatgacttaatgcaaaggaagtcctatgtaaatgagcaatgaaattgcaactgtgtataaggaacaaaatagaatatgaaactccagaatcttttgttttcatttctgtttctcccaaggctctatcattcaaaactccagaatctttcagcatgcaattgtctcctgatatcagcccctctcttgttttgttttcttttttttttttttaatcacagtgagccacaacctaggagtcttttagtggtttctacttggtttgctctgcagcctaccagcagatttcctacattccggtcttgttcccctctagcccattctccacactgcagtcataatgaaatttctttcttttttgggggggatggagtctcactctgtcacccaggttggagtgcagtggcatgatctcggctcactgccacctttgcctcctgggttcaagcgattctcatgcctcagcctcccaagtagctgagattatacgcacctgctaccacgcccagctaatcttgtatttttagcagagacagggttttgccacgttggccaggctggtctctaactcctgacctcaagtgatcgcccaccttggctttctctctctttttttttttttggattttgagacaggatctggcctcgttgcctaggctggagtgcagtggcacgatatcagctcactgcaacctctgcctcctgagctcaagccatcctcccacctcagcctcctgagcagctgggactgcaggtgtacaccaccacgcctggctaatttttgtattttattttatttatttttttggtagagacggggttttgctgtgttgcccaagcttgtcttgaactcctggggctcaagcgatctacccatcttggcctcccaaggtgctgggatgacaggcatgagccaccacagctggcctataatgaaatttccaacttacagctattgccattatccaaagcccagaatccctgatttccttccatagcccttcatggcctgaccagtgcctgactctccagcctcacacttcatattctctctgtactgctctgcactgtagcctcattgagttgctttcacgtctttaagtgttgtgttctattttttgtggaattcagcatatgttatgcccttgacctaaggcctctcctttcttttccttctctggggtgctgcctcatccttctggtcttcaaaaccgtttccctgggaaaacatctttgactcagcaggcagggatcatgcccctgctgtgtctgtgcataactttctgtggctacttctgtcttggtctgtgatgtactttataataattttggtctttcctccagtgtcacaatactggaagtctgtttctttttctctgtgttgtatccttagtgcctgaaaggtaggaggttctcaataaatatttgttaaataatcaagtaaatggagtctggtggaaaagagaaaaaataagtgtagaatgtgtgtgcaagaaaggaggggtagggggatgaaaaagataacaaaagcacataacaaaacaacaaaaagcaaaaacaacaaaaaatgcagatgacaaaaaagataacaaaatgatgactgctgtggcaacttgtagaaagtaaggaaggtgctctcattctagagagaagtaggcagccattgtagttttttaaagagagaatatgggctgggctctgtggcccacgcctgtaatcccagcactttgggaggccgaagtgggtggatcacgaggtcaagagatcaagaccatcctggccaacacagtgaaaccccttctctactaaaaatacaaaaattagctggataggtggtgtgcacctgtagtcccagctacttgggaggctgagacaggagaatcgcttgaacccaggaggcggaggttgcagtgagctgagatcacgccactgcattccagcctggcgacagagtgagactccatttcaaaaaaaaaaaaagaatatggccagacactgagctgagatagacagtgcggcagtgtctggtattaactgtaataaactctactgtcagaagcaggtggtttatacttaagtttattgagagaattggatatggataagagataaactcttgggaaatggggagaaatataaattctgttgtaaagcctgtaaaaaattgagattactagtggttagaattttggaagtgaagtgcagtgaaatattgagtacctgagaggttacttgttagtgaaaacacaatagcagtagtacgtagctacagtttggctccaaaggaagaactgtttttactatagtttgtaatggcttcagaatcttcaatttgagatatccagttattaaaagagaatcaattgcagttgaaatgcattagttaagtattttaaagtgctttagcaagctacatttaaaaagtgcttattatagaaaatatacccaaaataaccaatgatgttactgtcttgtgcttattttttctagacctatttttatacatagttaagattatacaatatgaatatttctgaaatctatatttaacattataacatatgtatttttccatgttctttctttttttttttttttgagactgggtctcatcctgtcacccaggctggagtgcagtggtgctatcttggcttactgcagccttgacctcctgggctcaagtgatcctcccgcctgaaccttctgagtagctgagactacaagcacatgccaccatgcctggctaattttatttttactttttggagagatgagggtctcactattttgcccaggctggtctcgaactccttgggtcaagcaattctctcaccttgacctcccaaagtgctgggattacaggagcgagccaccgccctcagccccatgttcttaaaaaccttttgtgaacgacatttaaaatagttgcagattttttcccctgtctttggaagtgttacaacatccaaccatttcacagttactaatttaccatcattctggtttttgtccttgaaaataaggcaaggctgaataatgaacatctttgtggctaaagtttttttctttactttgagttgttaccttcctttagcttagttcagtggttttttctttttcttttttgagatggagtcttgccttgttgcccaggctggagagtagtggtgtgatctcggctcactgcaacctccgcctcccaggttcaagcagttctcttgcctcagcctaccgagtagctgggattataggcgtctgctgccatgcccagctaattttttgtatttttagtagagacagggttttgccatgttggccaggctggtcttgaactcctgacctcaggtgatccacccgcctctgcctctccaagtgctgggattacaagtgtgagccaccatgcccagccagttcagtgattttcatatttgagtgtgtcagccttgcctggaagccttgttaaacacagactattggatcccactgggcggatttctgtttgagcaggtctgaggggagacctgagcatttgcatttttaacaaattcccagttgatgatgatgctgctggtttgggaactacactttgagaactactgggctatattattgacaatgaaactataatgttgaggttaagttcctaagtcagtaggagtgattatgatcttgaatgaaactgagttcatgtaccaacctgtatcagggaaattgaagaactaaaggaccatattgcatttcagcactgagaattcgtgcagtttgtgaacatgtgagtgctgatatgtgcaaggtttttgctgagtattgtgaggcaaggatgttgtaatgaataaaaaatagccctttttggctttttttttcttcttttgagatggagtcttgctctgtcgccaggctggagtgcagtgatgtgatctcagctcactgcaacttccgcctcccaggttcaagcgattcttctgcctcagcctcatgagtagctgggactacaggtgcccgccaccacgcctggctaattttttgtattttggtagagactgggtttcaccatgtttgccaggatggtctccatctcctgaccttgtgatccccctgccttggcctcccaaagtgctgggattacaggcgtgagccaccgtgcccagcccggccttttttcccccgcctagagatggagtcttgctctgtcgcccaggctagagtgtagtggtgcaatctcagctccctgcaacatctgcctcctgggttcaagcgattctcctgcctcaaactagctgggattacaggcatgcaccaccatgcccggctaattttgtatttttagtagagacagggtttcaccatgttaatcaggctggtctggaactcctggcttcaggtgatccttggcctcccaaagtgctgggattacaggtgtgagccaccatgcatggcctcatttgggaaacttttgatatcagaatcttaggtttttcattagagattgtcagatttccatattcctctggaaggtaaaggcctaattgctagcattctggaagccagttagggtaggagggtaggagggtagggtattgggtagaggataaagaaggggtttgggaaaggtggggggtgtctcttggcagttgtatggttaaattgagtttttgttttatttagtgatatgtgttttttgggtacatgtgatattttgatacctgtgtataatatgtagtgatcaaatcagggtgattgggatacccatcatttgaaacatcttttctgtgttaggaatattacaagtcttctagctgttttgaagtatacaataaattgttaactataatttctgtactgtactatcaaatattagaacttactaatcaaactgtatttttgtaacactaaccactttctgttcatctccaccactcccacttcccttctcagcctctggtaaccaccattctgctgtctacctccacgagatccacttttttagcttccacacatgagtaagagtctttcttttaaaactggttttgtgagcatatttaacatcagtagcaataaacttgtattttaagctcctgttgctgtattttgaggaccttctaagtccattggaaggattttgaataccatagtgtctgcagtgatagttgttgaaagaaagggaaggcatcagtgcaaatatttttagacagtttttaaagagactcaagtcacccaatttgtcttctaaaaatcctgattttggaagaggcagtggagtttctgttgataaaaaatgatttatagtttgtgcttggcacttcctaatggattacatcaggaaagatttattgtctggcactctcattttaacgatactacaattgattattaggtttagatgctaataccttttttacctttatttcagagaagcttgattctttgctctcagactacgatattctctctttatctaatatccagcagcattcggtaagaaaaagagatctacagacttcaacacatgtagaaacactactaactttttcagctttgaaaaggtaatttgaattattcatggaataatgttggggcactgggggcttggtttggcaaaaacaaaaaagtaagggtatctactgaaatcttgggaaattacattttaaagatttgtaattaatttccagtataatgcttattctaaaattcatactggggctgggtgcagtggctcacgcctataatccgagcactttggggggccaagacatgtggattgcttgagctcaggagtttgcccaagctcagcctgggcaacatggcaaaaccccgtctctactaaaagtacaaaaattaggcatggtgacacgtgcctgtaatcccagctacttgggaggctgaggcaggagaatcacttgaaccagggaggtggaggctgcactagccgagatggtgccactgcactccagactgggcaacagagtgagactctgtctcaaaaaataaataaataaaataaataaagttcatactgatgagtatttttaaaaaagtaaatagatattgcagaggtgttaatgatggtaacgatgtttagaaaattctaacataatttaaattaattgaatgcttataaaaccttttgtttttggtgctactttataaccatcaatcatgtgctaaatattatctttatatatgaagagataaagattttgttcaggaccccacagcctggtggtgagctgggtctagattttactgttctatttatttatttagctaactagttacttagtttccaggattctttaacctgcttcatatttatttatttttaaaaacagggtcttgccatgttgccaaggctgatcttgaacttctgggctcaggtggtctttccatcttggcctcccaaagtgctgggattacaggtgtgagccaccatgcctggcccaaatttaatattctttctacattgagttcctcttacttcttagcataaattgatggatatgttctatttcagtagtaattttaataccacgtattgttttgcacattgaaatgttaaataattgcaggcctctttttaaagtctttaggaagctttattcagtatcaaaaaacagacacatggagaattgactgaattattctttatttatttatttttttgagagtcttgctctgtcgtccaggctggagtgcagttgtgtgatcttggctcactgcaacctctgcctcctgggttcaagcgattcttgtgcctcagcctctcaagtagctgggactacaggtgcacagcaccacgcctgggtgatttttgttatttttagtagagacagagtttcaccatgttggccaggctggtcttgaactcctcacctcaagtgatccacgatctcggcctcccaaagtgctgggattacagacaggggccactgcatctggccatctttattctttatataggacaagccttctcaactatgttaaaaaataaaaggaatatgtgcgtctggtttaaaaaacaagccatggaggatatgcaaagtttttacttctaactcagttagacttctcagacccagagaggtttcctttgtaaacttccaattttttgttttgttttgttttttgttttttgagacagagtttttgctcttgtcgcccagactggagtgcaatggcacgatcttagctcactgaagcctccacctctcgggttcaagcagttctcctgcctcagcttcccgagtagctgggattacaggagcccactgccatgctcagctaatttttgtatttttagtagagatgaggtttcaccatgttggccaggatggtcttgaactcctgacctcaggtgatccacctgcctcaggctcccaatgtgatgggattacaggtgtgagccaccgtgcccgacccaaaatattttaatgcatgttttttgcctataggtctctgtgtgtgtataggtgatatagatagcatatttacctcattttaaacagctgcataaatattcctattgcatagaattgtaacaacatactgactaatacactacagatggatattgtttaaccaaagtgatttttttaatacaacaaacagtgctctagtgagtatctttgtaaatgtgtaccttgatgaggtgtttttataggatatattcctggaaggagaattactgggtcaaggatatgtatactatgtttattgatattgctctttcctcccaaagagatttgacaaatttattcttccagcagcaatatatgagtttacctgtttcctgttatctttgccaatagtaggtttatcagcctttaactgtcacccctctaaagggcatggcattttatagttgttttgattttcattttgtgtgacattgagcatctttttatatatttgtaagtaatttgttttatatttctgtaaactgcctttttatctcttttgactatttttctattgaatttgtctttctaactactgaattgtagcagtgcttagtatattaaggagattggttcattgtcatgtggttattttaggcaaatttttaatgcaaattaatttttcctagctattgcaattatccttaggttattttttaatgacttctttttattcgattttatgtcagaatattatagtattggttattagctttcaacttacaccaaatttgagcagattggtaatattaatagctacagttaatcaggtacttattttctgtaatttactggcattttacataagttatctctaaaagtgattccttttttgaaggaacaaaaaaaaaaaaattaaggcttagacagcttagtaacttgcccaagattactcagctagtaaatgacagatacaagatttgaacaaaggttggactccaaaacttgtgttatttctgctatactggtggagagtttggtgaagaagtggatatagtagcaagaaataagtaggagcgaaggaagagtgaggaaactataaaatgaaaagaactcaaagtttagctttttgggtttctttggatttgaagtggcctgtagaatccgtattctagaggcaaaaacttccatagccttacatatttctctttcaagtttcgtagatgacattgattccctaagaaaatattaaatcgtagccacttgttatcttttctctgtgtaagaaagcagggaagtatgtaatttattttacaaagtttccatactaaatatttaatgggaaatttatctaacagtctatggaattttataccaggtgttttaaaataggttatttcctttaatccccaaaaccgttcagttattaggtgatattatttccatttgtagataaatacttaggattcaaagattgaggccaaggtcggacagtgagtaaatgaaagtaggacttaagccaagtttgtcagactccaaagcccataccctttcttttctatcatattgcgtcattaaagtttaaaacaagaacaaaaacaaagatagctgaagtaatcagtttgtatcagggctgaattaactctatgaaacccctcattacttgatggtaaatgagaagattccgtttttcgatagcagtggaaggcaaagtaatttaaaccaagatcattgcattaaatttggatgtaactattagaggttgaaaaagcatagaaacactgagaggttgtatgaagagttgaagtaacttaagaaaaaaagaaacttgtttaaaatttgccttacaagtttcatttcctttttgttataaatcaagaaattatcagctaggcgtggtgactcacacatgtaatcccagcactttgggaggccgagctggatggatcatgaggtcatgaggtcaggagatcgagaccatcctggctaacacggtgaaaccccgtctctactaaaaatacaaaaaattagccaggcgtggtagcaggcgcctgtagtcccagctatttgggaggctgaggcaggggaatggcgtgaacccaggaggtggagcttgcagttagccgagattgcgccactgcactccagcctgggcgacagagtgagactccgtctcaaaaaaaaaaaaaaatcaagaaattatcttatttttaaataacgaaaaagctgcggagtatatactgttttgatacttttttgatgttgcctgaatttttttggaaaaagttaaatgtttctcctaaaagtgaaatatatcagattacttgagaaggtctagaactgataaagaaatgaaagtgatatacctgactaaatggaccattaaaaatggttagggtaataatgttaattcaaactggttagctggtctttagttactgtaaattcttaagtcaaaagtcagaaagataaaacgttaaagaaatctgtaagaaaatgacttcacataattttgggaggataaagtaaaagaaattttgacattctgttggacgttttataactcaaaagctaatattggaaaatcaaaaaacatgaattttataatcgcttggtctttatctttagaaaagattcttaatgtagcaaatgaaaaatgcaattccactgatttctttctgaaaagaacattaagtaatgttgcaactcttagctttaaaacaaaataataagacatttataataagtatgcttttgaaagttctcagcataactggagggaaaaatcataactgagaatgtgtgggaagatatgttttaggatagcagaagaaaatgttccaaggatttacgaaataatgttctattgtcttttccctttgaccattaaaaaaccacaagcaaactaaaattaccttgttatgctcaaaaagttaaaaatatttgttgccatggagatagtcccagtctagatttctttccggtagtttaaagacttttgcaatcccatggggaagtaatatattttcagtacaacagctgacaaaatttgtttctgtgggtgagatgaataatatacctttctttgtctttggtgttcatggacacattgaaagactataaataatacttgagaaagtcttgctcaccactcctagttttcatgtaaggatggaaagtcatagaaaacaaaaagaatagtaagccaattaaagaactggactgaaactcaacaaaaagaatagtaagcccactaaagaactgaagtgtataccccctcccctctcctcccctcccttcccctcccctcccttcccctcccttccccttcccttcccctctcttccccctccccttcccctctcctccccctctcctcccctctcctccccctctcctcccctcccctcccctcccctcccctcttttcctgtcttctggtgccaatggagtctatattctaatgtctgtcttagataccttgtatttattttcctaactgtaattgtgggttacttttttgcaagatatgttgttttgaggaggaaaaaaagcacgagtactttttttttttcttattttgagcgggagtctcgcgctgtcaaccaggctggcgatctcggctcacagcaggctccgcctcccgggttcactccattctcctgcctcagcctcccaagtagctgggactataggcacccgccaccatgcctggctaatttttgtatttttagtagagatggggtttcgctgtgttagccaggatggtctcgatctcctgacctcgtgatccgcccagctcaacctcccaaagtgctgggattacaggcgtgagccactacgcacggccgcatgagtacttttaaatatagaaagcagcatttattaattttgcacagcaataagaattttctcatagtccacccagcttgatagagacagcatagtacagggttttgaaataaaccaggtttatttcccagtttcaccatttactagctgtgtaactttgagtaggttgattagcttccaagcctcaatttgtacttgtgtgaagtggggataatagatgcatagtacctaacaccaagtaggtgttcaataaatggtatataataggattagtttttgataataatttttttagataatcaggattccaacttaactacgcagtcatgtgtgtttccttattcttcagtgttttccaggagagatgaatgtataagttctttgaatatctttaccctagtgtgagtttattgtgatctgctgtttttatagctaaataaattagttcatttgtcgttacaggagatatattgctctaagtacctaataagactttagttgtaacttgcatagtgttttattaatgtcaatgcttctggctttttaagaaagtttaattatgtgaaaatgagacttaaaatttgtgtgcttagagtaaaatatgaatgcatttttcttcaggcattttaaattatacctgacatcaagtactgaacgtttttcacaaaatttcaaggtcgtggtggtggatggtaaaaacgaaagcgagtacactgtaaaatggcaggacttcttcactggacacgtggttggttagtatggagcttgttggtttgcccctgtgtctggtgtattaggtctccaaatctaacttgattgcatattcttttctggtgcaggatagtggggacggggtgtcatagaagtgctattctttgacttttctttgaggtatataagtttagaggcaggaacattctaatagaaggaaatgagtattatctaaatgtcatactagctggctggtttaatgattaaaattaaattcttcttaagtgataggaatttaacctttcttttcctcagtgactgtaagctttctttatgatattttaaacagggaagcttggagataaaatacttggtgatcctattacgtatgtatttgagaaaatttatcaaacaagcaattgcagtttactttttgacctttttctgcaatgagaaaaaaaaatgtcattgaaatccacaaatagtatagttcctaggcctgtacattctaaatcatgctttctgtctctcttagttcttcctttacctagaagtagataaaattattccagaagaaaatcttagcagttttgtttgttttgggaaagggataggtttcaagtgactaaacttgaggctaccccttaggagttgagattatctagcttctttctggagcctttgtttcttgttttgcagagctctcacagtactaggcaaattccaccctgaaggatttaatttttattgagagtaatgcatagtttcttatttgatgtaagtatttttaaataataattttttttttctcttaaggtgagcctgactctagggttctagcccacataagagatgatgatgttataatcagaatcaacacagatggggccgaatataacatagaggtaaatttatatgtgaattttttttcagtagcttatatctctgattttcaaaaagctgctcagttctgcaaaggtgaaaagtaattatacttatttctttcctcttcgtatttgaagttttttactaggaaagtagactttttaaaaaaggataatctctaagaagctgtgttatgatacaccctgtatttctaagtaccataattgagagagttacatgtgggatggataataggaagagaaaactttctttccctcctgactcattttttaattctttctcaaataataaatgtaaacatcctcagaaatgaaaagtgaagtattatttttcaatttctctgtttttctgctagacacactggaaatgctagatcaatgaaaggtggtagttcatagtctgagaagttaaagaggaagctaggaaagtcaggctgtggtcactcttccattgaaagagtagcaatagaaatcaagaccacagtggctgcattggttaagacacatatctatctgtcagatattagtctacaaaacaaaacgtttcctcataattgtgaattgaagttgattctgtgtttcctgaaaaatgagaagactctgggtggtggtggtgatatcactaaaatagatcacctgtgggaaaactgagtaagattggtcaaaatgaaatgttcaggtgtatttgagtgcttaataggggtaaaacagtctgctggagctatatatactatatgttttaattatatccaatctacatgactgttagtcctttgactgtccattattgtgaaaaagaaacctatggccttgcagtatgttatagtttgttaatgtttaagctatttaatgtcaatgttttgaggagtctggcctaccagaaagagtcagaaatttagtagaaagtaaaggaactaatattataaatgcattcattctagaataggcaaagcatcactggaatgtcttaaatttgcctgttctttcaaatcaatttattttttaagaatacctttattttaaaatatatgctcattgcaaaattcggaaaatagattatctgtacttggacagataactactattgacattttgacagacatccttccaaatttttttttctatgtgtaaatacacaaataaatatagttatacccactattttttcctgcaaaactaggaccatacaatatgtacagtttgtcttcacacatttttcgtttaacaatatgattatgaaccttttcgtgttaatatagatctaaattagggttttgtttgtttgtttgtttgttttttgagacggagtcttgctctgtcacccaggctagagtgcaatggcgtgatcttggctcactataacctctgcctccccggttcaggcgattctcctgccttagcctcccaagtagctgggactgcaggtgtgcgccatgatgtccggctaattttttttcttttttttgagatggagtatcactctgtcactcaggctagagtgcactggcgtggtctcggctcactgcaacctctggctcctgggttcaggcggttctcccgccttagacccttgagtagctcagactacaggcacatgctacctcacctggctaatttttgtatttttagtagagacggggtttcaccatgttggccaggatggtctcgatctcctgacctcatgatctgccagcctcggcctctgaaaagtgctgggattataggcgtgagccactgtgcctggcctcaactgttttgtttctaacttttgaaataaaaggtattgtagtgaacagccttgggcacaccttttggtgcatgtgtttagttggaatagtctggatgataggtaatagtctgggaagttaaatgaagaaactgtaggaagctctgtctaggctgtgcgagggcttcagataaactcccatagctgagtagcttaacacaagcaaagttttttcttactctcctgtggcttgatgtgggttaggtggttctcctctactttgtggctttgacttttggacacatgtcctctgtagttctcacagaaagaaaacagagctagagaattatacaggatattaagggccaggcttggaaatggccttccgttcaatacattctagaacactttatctctgacctgctacaaaggagaatggaaaagatagtcgtaatttgagctcagaaagagaaaatagtgtggtaaatgcacagcattgtttttgctgcagtgcatatgtctgcttatttccttagaataatttattcttttttgtttttttgagactgagtctcactctgttaccaggctggagtgcagtggcgtgatctcagctcactgcagactctgcctcctgggttcaagccattctcctgcctcagcctcccgagtagctgggattacaggtgcgcaccaccacacccagctaatttttgtatttttggtagagacagggtttcacaatgttggccaggatggtctcgatctcctgacctcatgatctgccagcctcggcctctgaaagtgctgagattaaaggcgtgagccactgtgcctggccagcttattaattcttaagccaaaatatgtgtctttaggatccaagttaaatttgctcagattacatttttttttttttaagatggcatctcgccctgtcacccagactggagtgcaatggcgcgatctcggctcaccacatcctctgcctcccaggttaaagcgattctcctgcctcagtcccttgagtagctggaattacaggcgtgtgccaccatgccccgttaatttttgtagttttagtagagatggggtttcactgtgttggccaggctggtcttgaactcctgacctcgtgatctgcccatcttggcctcccaaagtgctgagattataggcatgagccaccacgcccagctagattactcatttttttcaaatacttccttttggaaaaataggaattctgtttccatccatacctttgtttcactaagtacaaaaatgagtataactaatatttcattgtaagatatttacttagccaggcacagtggctcacacttgtaatcagcactttgggaggctgaggcgggtggactgcttgagcccaggaatttgagaccagcccaggcaatatagggagaccttgtctctactcctccacaaaaaaaaaaaaaaaaaaaaaattagctgggcatggtggcacatgcctgtggtctcagctacttagaatgctgaagcagtaggatcagttgaattcggaaggcggagactgcagtgagctgagattgtactgctgcactccagcctgggtgacagagcgagaccctatctcacacatacacacacacaaagatgtttacttacaagtatactcatcagataccttgagggacttttgcatgaaattaataatgtttattgaaaaaatgatttactacttacaggggtgattttcatactctttataattcttttgatacttttatagttcataagtgtggtgattggctgttcacacacacatatgagatgtaccaccctagaaccttgttacaatgttagcacattaccagtctgacatgaaaaaaaataattctttacacttaccttgatgcaaaaacattgtctatctgcactaatatcttaggaatataagtgagcaggaaaaaatatatatcttatttttaacacatcatcattaaatattttgtttatgacagtcttacttggtcactcaggctgaagtgcagtggtgccatcatagctcactgcagccttgacctcctgggctcaaacaatccctcttttctgcctcctgagtagctgggactacaggtgcatgccaccatgcccaactaatttgttaaatttttgtagagtgtatcagatttttgatgaggtctcactgtgttgcccaggctgatctcaaatgtctgactgtaagcaatcctcttgcttggcctcccaaagtgctgggattacaggtgtgagccactgtgcgcagccgttaaatattttaaaccgtcactgactttaccatagcttactatttatataaataatcctgggttaaacttgcatagtgagataatatttcccccaacttttatttatttatttgagatggagtcttgctctgtcgcccaggctggagtgcagtggcgcaatctcggctcactgcagtctccgcctcccaggttcaagcatttctcctgcctcagcctcccaagtagctgggattacaggcacacgccactgtgcccggctagtttttatatttttggtagagacagggttttgccacgttggccaggctggtcttgaactcctggtctcaggtgatccacccgcgtcggcctcccaaggtgctgggattacaggcatgagccactgcatccggcctaatttttgtatttttagtagagacggggtttcaccatgttagtgaggctggtcttgaacttctgaccttgtgatctgcccacctcggcctcccaaagtgctgggatgacagacgtgagccaccatgcttggcctcccccagcttctagttttaaaaatgttcagctggtgcagtggctcatgcctgtcatcccagcactttgggaagctgaggtgggtggatcacttcaggccaggagttcgaggccagcctggccaacatggtgaaacctcgtctctactaaaaatacaaaaattagccaggcttggtggcttgcgcccgtaatcccaactgctcgggaggcctaggtgggagaatcgcttgaacctgggagacagaggttgcagtgagctgagatcgctccactgtactccaatgtgggtgacagggtgaaactctgtctcagaaaaaaataaaaaagaaaatgtgcaaatctacagaaagattaaaaagtaccctgtagttacagaaagatttttttaaaaaataccctgtagcccttaaacaatttctaacataatgtcctgttagctttctctctttttttcgtgaatcatatgaaaatcatttgcaaacatcatgacccttcacccctaaatacttctgtatgcatccttaggaataaaggcactcttttctatagctgtaataaaagtaacatacctgagaaaatgacaagaattctacaatattatctaataatcatgccatagtcaaaatctctagtcatcctcaaaatctcctttgtagattttttttggttttccagtccaggatccaatccagttttctgccttttagtcaattactcatcaaattattttttccagcaacttactagtaataatggtaatagccttagcttttattaataacaaccacttttcttttgaaatgttaatataaaactagatttattacctacataatcttcataatcttcaagttaggtattatcactactttacctaatgagggaggttatgctcagggtacttgtccaaggcacatagtgaggtatggttgaggtttgaactcagatatatctgatcccaaagccagctgtctttttctgtgctggactgactatactaggaaacaatcaatgtgaacttagaaatgtttgacccaaaagaaaaaaaatttcactcctattcataggctaaatgaactttactaaatatggaagattcctgtagcccggaagttgggttagttaacttttgagatctctgccaaccctgaaattctgtaacccttgtttcttacatctgcctcatacatggattaccaaagatgtatatgcatataatatttaacagttttattgagataaaattcacatactatattattcacccacttaatgtatacaattttgtagttttgtgtgtgtgtgtgtgtgtgtgtatttttgagatggagtctcactctgtcacccaggctggagtgcagtggcacgatcactgcaacctctgcctcctgggttcaagtgattctgtggcctcagcctgttgagtagctgggattacaggcgcccaccaccatgcccggctgatttttgtgtttcagtagagatggggtttcaccgtgttggtcaggctgttctcgaactcctggactcaagttatctgcccaccatggcctccccaaagtgctgagattacaggcgtgagccatcgcgcccggcagttttcgtatattgatggagttgtgcaaacaccacctcattcaattttagaacatttttatcacctgaaaaagaaacgctgtatcctttagccatacttcccccttcctccctaactcccccagctctaggcaaccagggatctactgtctatttagatttgtctgtttgggtcatctcatataaatggaattacataacatgtcttttgtgtgtggcttcaatttttttatttttttgagatggagtcttgctctgtcacccaggctggagtgcagtggcatgatctcagctcactgcaacttttgcctcctgggttcaactgattctcttgcctcagcctcccaggtagctgggattacaggctcctgccaccatgcctgactaatttttgtattttttactagagtcggggtttcactatgttggccaggctgttctcaaactcctgacctcaagtgatccacctgcctcggcctcccgaagtgctgggattaaagacatgagccaccacgcccagcctgtgtgtggcttctttcacttagaataatgtttccaaggttcatctgtgttgtagcatgtatctgtatcttatttatttttattgctgaatagtattccattgtatggataaactgcattttgtttattcattgattagttgttgatggacatttgggttgtttccactttttagctatatttacattactgcttgtgttttcatttctcttggttatatactaggagcagaattgctgggtcatatggtacttctacttttaacctttgaggacctgccagactgttttctaaagtggttttaccattttacattctcatcagcatatgtgagggttctggatttctctacatcctcaccagtatttgtctttgatcatagtcatcctagtgggtatacaggggtgtctcattgtgggggtttttttccccattggggttttgatttgcatttccctgatggagataaatatattttttgtgtgtccccccacaaactgcctggttctgatgagaccagtgttcttacagagaataactttgctttgaaacaaaacaaacaaacagccttttgacttgggtaacctttggagtatgttaattgtgatttactctggccttgtaacattgtaagtggagattttgtttaaaaactgcgttcgctgaaacaagtaataaggttcagacctattgttacaagttctgagttttctttcatataaatatgtttgttcttttgtgtggataaaacctaacgtggcaaaaaggtgtcaaacacctaagtattaaggaaactaaaatgaaaatgctgcatgaacagaaaccttgtccaattttcattactatagcaccatcacctataacagtgccagtgtacagtagatattacataatatttttgaatgaatgagtggaaaatgatatgcatttttctcttctgcatcctctgaaagatttcacaacgtgcaaagtatgtaaggctttatttatatacagataaaataatcagagtttataatctatgtatttactttcctgcatagaaactccatatgattaaaaattgagattatttattttaataacatgactaatcagtttacttaacctagaaatgaatgttatctaagaacaagcaaagaatgttagaagaatttagtgtttaggaattattattgttttccatctcagtcgtatatattttctgttttagccactttggagatttgttaatgataccaaagacaaaagaatgttagtttataaatctgaagatatcaagaatgtttcacgtttgcagtctccaaaagtgtgtggttatttaaaagtggataatgaagagttgctcccaaaagggttagtagacagagaaccacctgaaggtaagacttaaagagtgtatttcaaataagaaacaaacatactacaattgacttcagtaggggtggttgttatttgttaaaaaataacatgattgtcaagtaactatagtatttggcatgaaaataagaggtttgttccagaaattttcatcttcttttgtttataatgtaagagttgaaaactctggaaaataatgggaacaacagagattagactttaaaaaagattagggaaaagggaaatggagtgatctgagggaaaatattcctgcagatatttagaaatgataaaataatatggtggaaagacaatctttagagtttataagaaattaattggtagtaggagggacctatatatatactgcttagaatacaagaaggttatatccatcttgggacaatccatttagggtcatttaaaaaacgtaaccatcttggaattttactgcccaaaacacctctggttaggttttttgttttgttttgttttgttttgtttgcagcgcgatctcggctcactgcaacctttgacttccaggttcaggtgattctcctgcctcagactcctgagtagctggattataggcatgtgccaccaggcctggctaatttttgtatttttagtggagatggggtttcaccatgttggtcaggctgttctcaaactcctggcctcaagtgatctgcccacctcagcctcccaaagtgttgggattacaggcgtgcaccaacatgcccggccaaagacggttatgttattaaaattatatattagcattttaatatataaataaagaaattcttaatttatttcacaagaaagttgtcctattaaactaattttcaatgtgaatatcttgacatttttactgttacattggttaattcataaacttcttgttgtagaatatgactgacagcttcatagcccagcattaggtgactgttttactctgttgagcactatttatttatttatttatttagagatgaagtctcacttttgtcgccctggcttgagtgcaatggcacaatcttggctcactgcaacctccgcaccctgggttgaagtgattctcctgcctcagccttacaagtagctgggattacaggcgggtgccaccatatctggctaatttttgtatttttaatagagatggggtttcatcatgttggccaggctggtctcgaactcccgtcctcaggtgattcacccaccttggcctcgcaaagtgctgggattacaggcctgagccaacatgcccggccttactctgttgagcactttttaaagtttctgtattggaaaaattaaagaggcacttgtccttggttttgaattctacagtgttttaactttatgttacttttcacttttctgtcttcctccaaattattttttgttgttgttcagaatcctttagtgatattaagctcacataatgtttgtttcaaaaatatgttagatttaaagtgttaccataaaactccttgttttggtgaattttgatttaatagtgcatacaaattcatattagagcttgttcatcgagtgaaaagaagagctgacccagatcccatgaagaacacgtgtaaattattggtggtagcagatcatcgcttctacagatacatgggcagaggggaagagagtacaactacaaattacttagtaagtatttgatattgcatcgagtaattgaaaaaaaaatttgggtgggtacattccatgaaacttaatgcaaccagatctgttccagatactctgttatttccctaaaatatttgagggatattctctgaggtttttatgttactgtatggaaattatagtttcaaatttgtgacaacccattttacccttgaactaatattttctgcatgttagaatttatgcatatagggtttgggagaggttataatgtagtccttcctccttgatataagtgagttctttaaaaacatcactgctatcatggtagtgaacctgtggtgtcacatgtgaatgtaaaaatatgtatttgcatgaacccatgtttttcttttgcttatatgtatatttcagagaggaaggcgagttttgtttgtcatgttaaagacctaatcattggacttcacttgaaataggtgggactttcatggtcataactagttctagggcacagaagtgaaggaaagatgtaagaagtgatgatactggatttttaagtatgaactattatgatttttgaagtctggggaatcatttttcattgacattttttgctagtgtgacttcattcgtcatgattacttggcactgaccaaaatgttgttactgagggaataatggagaatgcagctattcatgaagcaagaagaagctggtgcagtaaagatgtctttctcattgccttgcttttcccatgctgtccattttattcataccctcccaacttctttcccttccctttcatgtcaagtggatttttttttttttttttcaacacagagtctcactgtgtcgcccaggctggagtgcagtggcacaatctcagctcactgcaacccccacctcctgggttcaagcaattctcctgcctcagcatcacaagtagctggaattacaggcgtgaaccacagcactcggccccatatcaagtgaatttattatgaggctagtaagagtcactgtgattcttgttcctaaataagagagatttttactttaaaaagcttctctcttaatctgggttttatattaaggggctcctcttattttacttctttgttcattgcactataaatatgaatataatgagagatctagtcttaaaaattgtatttttttacaacttcttaggcataacttgtttcacagttgctagaacaaacctcatcaacccagtttttgaacagtagaatattctctttgagaaaaagataggtaattagcattttgttctttctcatgtcattttccttggaaactatactgccttccttctccagttttcccaaatcagagaacaaaagaaggagggttgctgaaatgaaccttgttctttctggctgtcttcttacccattcctcagtgctgaactttttggggtgagagtgggggaatagggttggcagttgtctgccacggccccttacttgtttctggggaagacattcgaggtactcaccaagagatagagtgaagatggaattctttttagaagggaatacagttgacccaggaacagtgcgggggtgtggttagaagcactgaccttcttccctctgcagtcgaaaatcctcacgtgactttttttttttaaggctctgtcgcccaggccggagtgcagtggtgaaatcatagcttgctgcagcctctattgcccgggccaaagcaatcttcccacctcagcctcctctagctgggacaacaggtgttcacccttcctggctaagttttttgatttttagtagagatggagaatttcccaggatggtctcaaacttctaagcttaagcaatcctcctgcctcagcctcccaaggtgctgggattacaggcatgagccactatgcccggccactgtataactttgattctccaaaaatttaactactaatagtctactgttgaccagaagccttaccaataaaataagttgattaacacatttttaaaatatgtattattactgtgttcttacaatcaagtaagctagagaaaggaaaatgttatgatgaaaatcataaaaaaaaaaaaaagcccggcatggtggtgtgtgcctgtagtcttctgttactcaggaggctgaggtgagaggattgcttgagtccagaaattcaggctgtagtgagctatgatcgtgccgctgtactgcacccctggtgacagagcaagaccttgtctcttgaaaaaaaaaaaagaaaatcataaggaagagaaaaatacatttactattcactaagtggaagtggatcatcataatggtcttcatgttgagtaggctgaggaggaagaggaagagttgatcatattgtctctggtgacagaggctcaaggaaatccatatgtaagtggacacttgaagttcaaatctgttgttcaagggtcaactgtatttcaggtatactgattgacttttaaatttaatttttattattggctgaaacggtagttttaaaaaagcctgttacttgtcattttggttccatgtgcaattgagtacctgaaatttaggttaaactataccattgttttattctggtaacagcactttaagtttggggccaaaggttgggaatactctgatacagtaacatctcaatgctagtttttgcgaaagtagaaacttttgcaatggcctctaaactgagattttttctttccccatagattttatattgcattgccaggagaggtaaagagttacataatgtcttttttcttttttaaatacacacagatagagctaattgacagagttgatgacatctatcggaacacttcatgggataatgcaggttttaaaggctatggaatacagatagagcaggtatttatcaatagatatggcttatattacttaagttttgtaatgtaaatatttgtcacttgtattcaaaacctaaaaacttgtccttaacaataattgtaaataagttttctcagatgccaatgattttttatgatgaattgtgcagtatttttgatgttaattagttctagattgtgaagttttctgtccttagtctcgctttaggtagaaagccttttatgctgctgtgctttgttccttctttgaattcatggcctttatattctctgtagttttcttcccccctccgattatgcttaagtctttagttaaaactctggcatgcaccattgaatccttagtcagaaaatttactaaaaaatactgtgtacctttgcaaggctgtatttatatatacagaacctttaggttctttcctctcagatatctccttctgatttcttgtaatctgttaacagagtgtgtctagtaatgttatattaatgtcatcttaataatagctcatattaaaagttatttcaaattgctaggactaattaaaaaggcttctgacaaagggtattgctttgggcagagagacattttgatatgtaaattatataaattgttatctctatttttttccaagctttttgtagtaaaccatatttttataagttatatagtatagaatttagaggttgaaaaaatttttaaaaatcattcaccatgtttataaatgttaaactttgatattacttgtataaaactaagagaattatttttcccttttcattctctttcactgttacgcattttctttttaagttattatttgaataggtaacatgtacacagtacaaaagccagtgaaaagtaagtctctgcagcctgtttattgtcaaaccagttcctttccccaaagacattcatgtcactagtttcatatgtatctttctagagatgtcgtatgcaggtatagtgtatgtatatgtctgtatttgacacaacggtgctatgcagtacacttttacaccttgctttttcatttcacagtatgttggagagtacttcatgttcatgcatgtaaagctgcttcacttgttttattataaatagctgcatcatgtttgagtttcagggaacctgtaaattttctttttgctttaggcatttggaaccagtcgaagaaacaggaataatataggagattaaaacattaacttctttacatctgatgaaggatggattggagggtgtggtttagatgtgtatcatggtgggcttctaagtagttctatcccagatttgaccttgaccagccaccatcaaaactgcagagtccaccccagtaaacttaccacacagtggcagaggagaccagaatgggccttctctgcaggcaggcaggcaggcaggcaggcagagagactcacagaaactctgagctgagcatggtttccttctttatctcacacttactaatgggagcctttgttacttttttttttcttctttgcaggtttaatatgaatttgtctgaaatgcctgtataaggagaagactctattcttagccttttattcctttgatgcacaaagagatgtatattttattattctttcctgagttgtcgactgtagtcgtaataaatattttaggctcctgtaa

SEQ ID NO: 15374 - DNA, 65890 bp, Homo sapiens
ggcggatcccgtcctcccccgatgtgagcagttttccgaaaccccgtcaggcgaaggctgcccagagaggtggagtcggtagcggggccgggaacatgaggcagtctctcctattcctgaccagcgtggttcctttcgtgctggcgccgcgacctccggatgacccgggcttcggcccccaccagagactcggtaaagacccaggggagttggcttaggccggcgcctggagcgctcgtttgagggaagagcaggggagctgggtctatcaggtgtttgggggcggggtattggcgatggtggcgcgtccctaagttttcagtgtagaagggggtgtggctctcggagtttggggaaagaataaaggagatgggcctgtctctgagtgggaaagggctactggacgggctccatgtagtgactgagcgcctgagaggggtttgctccctagctttgtgttcggggagggtgttgggaaagcggtaaggagtagggtggctggatcttgtttggagagggagatgtggtcagggttcttgccttagtagggaacaaatctagtgttgtgtgttcctaccagagccagaaaggaagggcccaaagctccagaattcttcctggtcctcgaaggagggaactagaatttctgctgtaggaggtacttatgcagtaatctcgttgggaggcggagactggagttggagtcttaagagttgtgtttttgcgaacatcctaagcacgttcttggttatttcaattgtagcttattggaggtgcttgggagatggggggaggcggaaacctggtaagccaactcgtgatgctgccactatgaatgctttccttgcacttttaaacaaagaaattatcaagagtgacgagtttgatgaatttagaggctagaaagtagagggttcctatttcattagattttccagagagattggattttaaggatggagatgcattaagggatctgaactttggtggaagtaagtttgcgtgaacttttagtgtattttaaaatccttttatctttcaaaaattgacgtgtaagatactttaattagtaataaagtgtgaaataatgttttcccagtgtgtgaaattgtaggcttgcatggttgtactggttcccaaatttcaccatgataccatgtgtagtattttttttctttatatttagtggacagaaattgtaatggattggtatggatactaaaggtgttgagagtgttatcacttgaacagctgtcttatgattctttccgattgaaatggattacaagtgactaatgaaaggcaagggatcttgttaggaagtgctgagaagtggtaagtcagtacaaattgaaggacattttgaggtaggattgtggttaggatggagggatagggtaagggtcttcattttaaggataaatgttagtaaaaagaataaatatgtattttgagatattaaaattatatttgcaccaccctgacacaactgtttcacttatgttattaatctgttgttcgtaggtaaaaataagcatgagtcccaaggaagcatacagtttaaagagaaacattactttctagatcaattcataacatttgcagatcgtaaggttttttagaccattttttttttccaagacagagtcttgctctgttgcccaggctggagtgcagtggcgcgatctcagctcactgcaacctccgcctcccggggttcaagcagttcacctgccttagcctcctgagtagctgggattacaggcatgtgccaccacgcccagctaatttttgtattcctagtagagacggggtttcaccatgttggccaggctggtctagaactcttgacctcgtgatccgcccacctgggcctccctaagtgctgggattacaggcatgaaccaccgctcctggcccatgtgtttgttttttatttgcaaaatgcagaccacctgtgccagaagaatgcatagacttttcttttttcttttcttttctttttctttctttttttttttttttgaggcagtgttttgctcttgttgcccaggctggagtgcaatggcgtcatctcagctcaccacaacctccgcctcccgggttcaagcaattctcctgcctcagcctcccaagtagctgggattacaggcatgtgccaccacgtccggctaattttttgtatttttagtagagatggggtttctccatgttattcaggctggtctcgaactcctgacctcaggtgatcagcacacctcggcctcccaaagtgctgggattaaaggcttgagccaccaggcccggcctctttttttttttttaaacgaaatatttgaaggacacacaagtattatacgtggcattggaaatacaaagatcagacgatatccatcttcaaatggttatagcatagggaaatagacattcatttaggacacttctaaaacagcatagaggagagtgctagagtacgttatagcaagtgttatcaccaaatgaatcttagagatcaagtctagttttcaaataaaggaggaggaaaatgagtctcaggaagatgctgtcagttgtcaatgatgaacataggccttgtgggtatttttcttttgaagaatgactttttttttcagtttgtttgacagcttacaatataatttgttacttaaccttaccattagattgagttggtcaagactagcaaatagtttcatagttgaaaaacatgctttattatttattttttatgtttattgtcctacaaatactactatattgcagtactcaatatcgattaggcatatgacaacatttttctgaaaggcaaaaaatacctaataaaatgaagcctggtttttagagtcctctatgggtcaccaaaaatgatttcaattgaactgttatgaattgcataatttaggaaagttatgagtcatatgagcttagtcatgatgatatcttgttgaagttgcagctggggtgtataagtctcactttgatttcaaaatcgttttccctttgtgttacttttaataaaagaggatgtagtgggtgggaggaaaaaatataggtcacagatgagggatgagaaagtttgtatctgaaacatgtattttcaaatttaccttgaggttattggcatggggattctccatattgcagtgctgatttcattattgacagcaccattttactcagtattttgacatctggctttctcttttgatgttaattttgcttactggctgcattcctttgaaacctaaatgcttaactgccctaactgctccaagggagatttaatgtaactctgctttatattagtctaagagataaaccatatttcaagagtagaatggagaggaattaagcagataattgtgatggggaaactggagagatccttttgactttcacaggatttcctagaacattaaatataggtttcctccaaggccaattgtggttgatttttggatccttcaccattttctatttgtgagataataagtgtatacagctggaagtgtaatgtgaagaaagtctgaaaaagattgataggaaaggaggacaggaatgggcttcattgaggtaacggaagtgaaatgaaaggcttttcatatatgggttgagcatccctaatctgaaatgctccaaaatttgaaactttttgaatgctggcatgacagcacacattacccctaacacacgattttttcactgttagtggtatattttttactgtgtagtacttatgtgtgaataggtataacaaaacgattacttattgtagcatgtaaaatcagtcaggaatgatggtgatgccagacaaccacagattatttatgtgggtggccgagacagtgacacctttgctttcgaatgcttcgttgtacacaaactttttttcatgcaaaaaaagttacttaaaaatattgtttaggccaggcgcggtggctcatgcctgtaatcccagcactttgggaggccgagctgggtggatcacgaggtcaggagatcgagaccatcctggctaacatggtgaaaccctgtctgtactaaaaatacaaaaaattagccaggtgtggtagcaggcgcctgtagtcccagctactcgggaggctgaggcaggagaatggtgtgaacctgggaggtggagcttgcagtgagccgagatcgcgccactgcactccagcctgggcgacagagcaagactccatctcaaagtaagtgaataaatgaaacataaatgaattttatatttagacttgggtcccatccccaagatacctcattatgtatatgcaaatatttcaaaatttaaaaaattctgatgaatgaaacacttctggtctcaagcattttggataagggatgctcaatctgtatctctttatttactcctaaaatcagccaaggaaatgggcatctctccgttcccccccttccttttttttttttctttgttgttacatgagttgtactggtttcacttcatttgacagtgttctgctaatgactagacgtgtatctctgacctggacttgttctctggagttcatattcagctgcccatttggcacttcaaatataacatgtccaaaattagttaccttttttttttttttgagacagagtctcactgtcacccaggctggagcgcagtggcgcaatcttggcttactgcaacctccacttcccaggttcaagtgattctcgtgcctcagcctcacgaatagctgggattacaggtgtcccccaccacgcctggctaattttttttttttttttttttttgtatttttagtagagatggggtttcatcatattggacaggcctgtgttgaactcctgacctctggtgatccacctgcctcagcctcccaaagtgctgggattacagacgtgaaccactgccccagccagttacctattcttttgattacaagaatgagtagctggacacagtggcttacacctatagtcccagcactttgggaggctgaggccggcggatgacttgaggccaggagttcaagaccagcttgaccaacatggtgaaacctgtctctactaaaaatacaaaaattagccaggcgtggtggtgcgtgcctgtaatcccagctactggggagactgaggcaggagaattgcttgaacccgggaggcagaggttgcagtgtgccaaggttgagccactgcagtgcagcctgggcagcagagtgagactccatctcaaaaaaaaaaaaaaaaaaaaaaaagaatgagtatcggatacaggtttagcctaggactaggcagggctgctggtaattgtggaagtagtctcattgcctaacctgaaacttgcatcctggttactggtcttgctggagagtcttggctcaggttacgtcccaggtctgttgaggagctcttgatagggaattagttgaagcagctcatactctatcctcctttactggtataaatccataaaattgtttagttcccaggctctggggtccctggcctagcagagagcactgctccctttttctcattccttagtcccaacaacccgcacctgacacttactacacgtggcctgcttccctgtcctgtgtgttttggggggtgctgaagaggaaggctcctgtgtcttcagcacaaacacaataaacacttcacagcagtactggctttatgttttccatttctgatatcagaagtaggagcatgacattgatagtgtcattttgggggaacttttcgtacttcatgcagcagagcagtgaagagtgagctgagtgccttggggttctgcagtacactctcaagtagtattttaggaaaatgcaatttgctgaaaaaataaaagaaattaatgtaaaaaatccacaagctgggcgcggtggctcacgactgtcatctcagcattttggaaagctaagggggaaggatcacttgagcccaggagtttgagaccaggctgggcaacatggcaagaccttgtctctacaaaaaaatagaaacaaaaattagccaggtgcggtggcatgtgcctgtggtcccagccacccggaggattgctcatgcccaggaggttgaggctgcagtgagtggtgattgtgccctgcactctagcctgagcaacagagcgagaccctgtctcaaaaacaaaacaaaacaaaaacccacacgtttccagaaccttctcatataacactttatttacattgttcttaaatacgtgtgggacggttatatacataccactatacttatgtgtatatatgttgatatacacacaaaattatatacataatttttgtttgtttgtttttgagatggagtctcactctatcacctaggctggagtgcagtggcgtgatctcagctcactcactgcaacctctgccacccgggttcaagcgattctcctgcctcaggcttctgagtagctgggattacaggtgcctgccaccgcgcctggctaatttttgtatttttagtagagactgggttttaccatgttggccaggctggtcttgaactcccacccttgtgatccacccacctcggcctcccaaagtgctgggattacaggtgtgagccactgtgacctgccatatacataattttttaaagtttcacgattagttttagcttaaaaatgtcagctctgggcttaatgaagaaaatatggatatactttatgtcaatgcattaaagtgaatggccataaaagcttatcccagagacaaaacaattcagatataagagaagtgggagagtggaaggtttatctaatcttctgtaggcaactccacagctacaaccagaaggccattttgttacaggcctgaaagccccgttttctttttattcttctttgaaacctttagaaggaacaaagtattggctactttttaccgctgatgtcagtgttaagaatcttgtgataacatagatttactctccctgctgaaaatcactatgtggctcatcagtaacacaactagacatgatgacttaatgcaaaggaagtcctatgtaaatgagcaatgaaattgcaactgtgtataaggaacaaaatagaatatgaaactccagaatcttttgttttcatttctgtttctcccaaggctctatcattcaaaactccagaatctttcagcatgcaattgtctcctgatatcagcccctctcttgttttgttttcttttttttttttttaatcacagtgagccacaacctaggagtcttttagtggtttctacttggtttgctctgcagcctaccagcagatttcctacattccggtcttgttcccctctagcccattctccacactgcagtcataatgaaatttctttcttttttgggggggatggagtctcactctgtcacccaggttggagtgcagtggcatgatctcggctcactgccacctttgcctcctgggttcaagcgattctcatgcctcagcctcccaagtagctgagattatacgcacctgctaccacgcccagctaatcttgtatttttagcagagacagggttttgccacgttggccaggctggtctctaactcctgacctcaagtgatcgcccaccttggctttctctctctttttttttttttggattttgagacaggatctggcctcgttgcctaggctggagtgcagtggcacgatatcagctcactgcaacctctgcctcctgagctcaagccatcctcccacctcagcctcctgagcagctgggactgcaggtgtacaccaccacgcctggctaatttttgtattttattttatttatttttttggtagagacggggttttgctgtgttgcccaagcttgtcttgaactcctggggctcaagcgatctacccatcttggcctcccaaggtgctgggatgacaggcatgagccaccacagctggcctataatgaaatttccaacttacagctattgccattatccaaagcccagaatccctgatttccttccatagcccttcatggcctgaccagtgcctgactctccagcctcacacttcatattctctctgtactgctctgcactgtagcctcattgagttgctttcacgtctttaagtgttgtgttctattttttgtggaattcagcatatgttatgcccttgacctaaggcctctcctttcttttccttctctggggtgctgcctcatccttctggtcttcaaaaccgtttccctgggaaaacatctttgactcagcaggcagggatcatgcccctgctgtgtctgtgcataactttctgtggctacttctgtcttggtctgtgatgtactttataataattttggtctttcctccagtgtcacaatactggaagtctgtttctttttctctgtgttgtatccttagtgcctgaaaggtaggaggttctcaataaatatttgttaaataatcaagtaaatggagtctggtggaaaagagaaaaaataagtgtagaatgtgtgtgcaagaaaggaggggtagggggatgaaaaagataacaaaagcacataacaaaacaacaaaaagcaaaaacaacaaaaaatgcagatgacaaaaaagataacaaaatgatgactgctgtggcaacttgtagaaagtaaggaaggtgctctcattctagagagaagtaggcagccattgtagttttttaaagagagaatatgggctgggctctgtggcccacgcctgtaatcccagcactttgggaggccgaagtgggtggatcacgaggtcaagagatcaagaccatcctggccaacacagtgaaaccccttctctactaaaaatacaaaaattagctggataggtggtgtgcacctgtagtcccagctacttgggaggctgagacaggagaatcgcttgaacccaggaggcggaggttgcagtgagctgagatcacgccactgcattccagcctggcgacagagtgagactccatttcaaaaaaaaaaaaagaatatggccagacactgagctgagatagacagtgcggcagtgtctggtattaactgtaataaactctactgtcagaagcaggtggtttatacttaagtttattgagagaattggatatggataagagataaactcttgggaaatggggagaaatataaattctgttgtaaagcctgtaaaaaattgagattactagtggttagaattttggaagtgaagtgcagtgaaatattgagtacctgagaggttacttgttagtgaaaacacaatagcagtagtacgtagctacagtttggctccaaaggaagaactgtttttactatagtttgtaatggcttcagaatcttcaatttgagatatccagttattaaaagagaatcaattgcagttgaaatgcattagttaagtattttaaagtgctttagcaagctacatttaaaaagtgcttattatagaaaatatacccaaaataaccaatgatgttactgtcttgtgcttattttttctagacctatttttatacatagttaagattatacaatatgaatatttctgaaatctatatttaacattataacatatgtatttttccatgttctttctttttttttttttttgagactgggtctcatcctgtcacccaggctggagtgcagtggtgctatcttggcttactgcagccttgacctcctgggctcaagtgatcctcccgcctgaaccttctgagtagctgagactacaagcacatgccaccatgcctggctaattttatttttactttttggagagatgagggtctcactattttgcccaggctggtctcgaactccttgggtcaagcaattctctcaccttgacctcccaaagtgctgggattacaggagcgagccaccgccctcagccccatgttcttaaaaaccttttgtgaacgacatttaaaatagttgcagattttttcccctgtctttggaagtgttacaacatccaaccatttcacagttactaatttaccatcattctggtttttgtccttgaaaataaggcaaggctgaataatgaacatctttgtggctaaagtttttttctttactttgagttgttaccttcctttagcttagttcagtggttttttctttttcttttttgagatggagtcttgccttgttgcccaggctggagagtagtggtgtgatctcggctcactgcaacctccgcctcccaggttcaagcagttctcttgcctcagcctaccgagtagctgggattataggcgtctgctgccatgcccagctaattttttgtatttttagtagagacagggttttgccatgttggccaggctggtcttgaactcctgacctcaggtgatccacccgcctctgcctctccaagtgctgggattacaagtgtgagccaccatgcccagccagttcagtgattttcatatttgagtgtgtcagccttgcctggaagccttgttaaacacagactattggatcccactgggcggatttctgtttgagcaggtctgaggggagacctgagcatttgcatttttaacaaattcccagttgatgatgatgctgctggtttgggaactacactttgagaactactgggctatattattgacaatgaaactataatgttgaggttaagttcctaagtcagtaggagtgattatgatcttgaatgaaactgagttcatgtaccaacctgtatcagggaaattgaagaactaaaggaccatattgcatttcagcactgagaattcgtgcagtttgtgaacatgtgagtgctgatatgtgcaaggtttttgctgagtattgtgaggcaaggatgttgtaatgaataaaaaatagccctttttggctttttttttcttcttttgagatggagtcttgctctgtcgccaggctggagtgcagtgatgtgatctcagctcactgcaacttccgcctcccaggttcaagcgattcttctgcctcagcctcatgagtagctgggactacaggtgcccgccaccacgcctggctaattttttgtattttggtagagactgggtttcaccatgtttgccaggatggtctccatctcctgaccttgtgatccccctgccttggcctcccaaagtgctgggattacaggcgtgagccaccgtgcccagcccggccttttttcccccgcctagagatggagtcttgctctgtcgcccaggctagagtgtagtggtgcaatctcagctccctgcaacatctgcctcctgggttcaagcgattctcctgcctcaaactagctgggattacaggcatgcaccaccatgcccggctaattttgtatttttagtagagacagggtttcaccatgttaatcaggctggtctggaactcctggcttcaggtgatccttggcctcccaaagtgctgggattacaggtgtgagccaccatgcatggcctcatttgggaaacttttgatatcagaatcttaggtttttcattagagattgtcagatttccatattcctctggaaggtaaaggcctaattgctagcattctggaagccagttagggtaggagggtaggagggtagggtattgggtagaggataaagaaggggtttgggaaaggtggggggtgtctcttggcagttgtatggttaaattgagtttttgttttatttagtgatatgtgttttttgggtacatgtgatattttgatacctgtgtataatatgtagtgatcaaatcagggtgattgggatacccatcatttgaaacatcttttctgtgttaggaatattacaagtcttctagctgttttgaagtatacaataaattgttaactataatttctgtactgtactatcaaatattagaacttactaatcaaactgtatttttgtaacactaaccactttctgttcatctccaccactcccacttcccttctcagcctctggtaaccaccattctgctgtctacctccacgagatccacttttttagcttccacacatgagtaagagtctttcttttaaaactggttttgtgagcatatttaacatcagtagcaataaacttgtattttaagctcctgttgctgtattttgaggaccttctaagtccattggaaggattttgaataccatagtgtctgcagtgatagttgttgaaagaaagggaaggcatcagtgcaaatatttttagacagtttttaaagagactcaagtcacccaatttgtcttctaaaaatcctgattttggaagaggcagtggagtttctgttgataaaaaatgatttatagtttgtgcttggcacttcctaatggattacatcaggaaagatttattgtctggcactctcattttaacgatactacaattgattattaggtttagatgctaataccttttttacctttatttcagagaagcttgattctttgctctcagactacgatattctctctttatctaatatccagcagcattcggtaagaaaaagagatctacagacttcaacacatgtagaaacactactaactttttcagctttgaaaaggtaatttgaattattcatggaataatgttggggcactgggggcttggtttggcaaaaacaaaaaagtaagggtatctactgaaatcttgggaaattacattttaaagatttgtaattaatttccagtataatgcttattctaaaattcatactggggctgggtgcagtggctcacgcctataatccgagcactttggggggccaagacatgtggattgcttgagctcaggagtttgcccaagctcagcctgggcaacatggcaaaaccccgtctctactaaaagtacaaaaattaggcatggtgacacgtgcctgtaatcccagctacttgggaggctgaggcaggagaatcacttgaaccagggaggtggaggctgcactagccgagatggtgccactgcactccagactgggcaacagagtgagactctgtctcaaaaaataaataaataaaataaataaagttcatactgatgagtatttttaaaaaagtaaatagatattgcagaggtgttaatgatggtaacgatgtttagaaaattctaacataatttaaattaattgaatgcttataaaaccttttgtttttggtgctactttataaccatcaatcatgtgctaaatattatctttatatatgaagagataaagattttgttcaggaccccacagcctggtggtgagctgggtctagattttactgttctatttatttatttagctaactagttacttagtttccaggattctttaacctgcttcatatttatttatttttaaaaacagggtcttgccatgttgccaaggctgatcttgaacttctgggctcaggtggtctttccatcttggcctcccaaagtgctgggattacaggtgtgagccaccatgcctggcccaaatttaatattctttctacattgagttcctcttacttcttagcataaattgatggatatgttctatttcagtagtaattttaataccacgtattgttttgcacattgaaatgttaaataattgcaggcctctttttaaagtctttaggaagctttattcagtatcaaaaaacagacacatggagaattgactgaattattctttatttatttatttttttgagagtcttgctctgtcgtccaggctggagtgcagttgtgtgatcttggctcactgcaacctctgcctcctgggttcaagcgattcttgtgcctcagcctctcaagtagctgggactacaggtgcacagcaccacgcctgggtgatttttgttatttttagtagagacagagtttcaccatgttggccaggctggtcttgaactcctcacctcaagtgatccacgatctcggcctcccaaagtgctgggattacagacaggggccactgcatctggccatctttattctttatataggacaagccttctcaactatgttaaaaaataaaaggaatatgtgcgtctggtttaaaaaacaagccatggaggatatgcaaagtttttacttctaactcagttagacttctcagacccagagaggtttcctttgtaaacttccaattttttgttttgttttgttttttgttttttgagacagagtttttgctcttgtcgcccagactggagtgcaatggcacgatcttagctcactgaagcctccacctctcgggttcaagcagttctcctgcctcagcttcccgagtagctgggattacaggagcccactgccatgctcagctaatttttgtatttttagtagagatgaggtttcaccatgttggccaggatggtcttgaactcctgacctcaggtgatccacctgcctcaggctcccaatgtgatgggattacaggtgtgagccaccgtgcccgacccaaaatattttaatgcatgttttttgcctataggtctctgtgtgtgtataggtgatatagatagcatatttacctcattttaaacagctgcataaatattcctattgcatagaattgtaacaacatactgactaatacactacagatggatattgtttaaccaaagtgatttttttaatacaacaaacagtgctctagtgagtatctttgtaaatgtgtaccttgatgaggtgtttttataggatatattcctggaaggagaattactgggtcaaggatatgtatactatgtttattgatattgctctttcctcccaaagagatttgacaaatttattcttccagcagcaatatatgagtttacctgtttcctgttatctttgccaatagtaggtttatcagcctttaactgtcacccctctaaagggcatggcattttatagttgttttgattttcattttgtgtgacattgagcatctttttatatatttgtaagtaatttgttttatatttctgtaaactgcctttttatctcttttgactatttttctattgaatttgtctttctaactactgaattgtagcagtgcttagtatattaaggagattggttcattgtcatgtggttattttaggcaaatttttaatgcaaattaatttttcctagctattgcaattatccttaggttattttttaatgacttctttttattcgattttatgtcagaatattatagtattggttattagctttcaacttacaccaaatttgagcagattggtaatattaatagctacagttaatcaggtacttattttctgtaatttactggcattttacataagttatctctaaaagtgattccttttttgaaggaacaaaaaaaaaaaaattaaggcttagacagcttagtaacttgcccaagattactcagctagtaaatgacagatacaagatttgaacaaaggttggactccaaaacttgtgttatttctgctatactggtggagagtttggtgaagaagtggatatagtagcaagaaataagtaggagcgaaggaagagtgaggaaactataaaatgaaaagaactcaaagtttagctttttgggtttctttggatttgaagtggcctgtagaatccgtattctagaggcaaaaacttccatagccttacatatttctctttcaagtttcgtagatgacattgattccctaagaaaatattaaatcgtagccacttgttatcttttctctgtgtaagaaagcagggaagtatgtaatttattttacaaagtttccatactaaatatttaatgggaaatttatctaacagtctatggaattttataccaggtgttttaaaataggttatttcctttaatccccaaaaccgttcagttattaggtgatattatttccatttgtagataaatacttaggattcaaagattgaggccaaggtcggacagtgagtaaatgaaagtaggacttaagccaagtttgtcagactccaaagcccataccctttcttttctatcatattgcgtcattaaagtttaaaacaagaacaaaaacaaagatagctgaagtaatcagtttgtatcagggctgaattaactctatgaaacccctcattacttgatggtaaatgagaagattccgtttttcgatagcagtggaaggcaaagtaatttaaaccaagatcattgcattaaatttggatgtaactattagaggttgaaaaagcatagaaacactgagaggttgtatgaagagttgaagtaacttaagaaaaaaagaaacttgtttaaaatttgccttacaagtttcatttcctttttgttataaatcaagaaattatcagctaggcgtggtgactcacacatgtaatcccagcactttgggaggccgagctggatggatcatgaggtcatgaggtcaggagatcgagaccatcctggctaacacggtgaaaccccgtctctactaaaaatacaaaaaattagccaggcgtggtagcaggcgcctgtagtcccagctatttgggaggctgaggcaggggaatggcgtgaacccaggaggtggagcttgcagttagccgagattgcgccactgcactccagcctgggcgacagagtgagactccgtctcaaaaaaaaaaaaaaatcaagaaattatcttatttttaaataacgaaaaagctgcggagtatatactgttttgatacttttttgatgttgcctgaatttttttggaaaaagttaaatgtttctcctaaaagtgaaatatatcagattacttgagaaggtctagaactgataaagaaatgaaagtgatatacctgactaaatggaccattaaaaatggttagggtaataatgttaattcaaactggttagctggtctttagttactgtaaattcttaagtcaaaagtcagaaagataaaacgttaaagaaatctgtaagaaaatgacttcacataattttgggaggataaagtaaaagaaattttgacattctgttggacgttttataactcaaaagctaatattggaaaatcaaaaaacatgaattttataatcgcttggtctttatctttagaaaagattcttaatgtagcaaatgaaaaatgcaattccactgatttctttctgaaaagaacattaagtaatgttgcaactcttagctttaaaacaaaataataagacatttataataagtatgcttttgaaagttctcagcataactggagggaaaaatcataactgagaatgtgtgggaagatatgttttaggatagcagaagaaaatgttccaaggatttacgaaataatgttctattgtcttttccctttgaccattaaaaaaccacaagcaaactaaaattaccttgttatgctcaaaaagttaaaaatatttgttgccatggagatagtcccagtctagatttctttccggtagtttaaagacttttgcaatcccatggggaagtaatatattttcagtacaacagctgacaaaatttgtttctgtgggtgagatgaataatatacctttctttgtctttggtgttcatggacacattgaaagactataaataatacttgagaaagtcttgctcaccactcctagttttcatgtaaggatggaaagtcatagaaaacaaaaagaatagtaagccaattaaagaactggactgaaactcaacaaaaagaatagtaagcccactaaagaactgaagtgtataccccctcccctctcctcccctcccttcccctcccctcccttcccctcccttccccttcccttcccctctcttccccctccccttcccctctcctccccctctcctcccctctcctccccctctcctcccctcccctcccctcccctcccctcttttcctgtcttctggtgccaatggagtctatattctaatgtctgtcttagataccttgtatttattttcctaactgtaattgtgggttacttttttgcaagatatgttgttttgaggaggaaaaaaagcacgagtactttttttttttcttattttgagcgggagtctcgcgctgtcaaccaggctggcgatctcggctcacagcaggctccgcctcccgggttcactccattctcctgcctcagcctcccaagtagctgggactataggcacccgccaccatgcctggctaatttttgtatttttagtagagatggggtttcgctgtgttagccaggatggtctcgatctcctgacctcgtgatccgcccagctcaacctcccaaagtgctgggattacaggcgtgagccactacgcacggccgcatgagtacttttaaatatagaaagcagcatttattaattttgcacagcaataagaattttctcatagtccacccagcttgatagagacagcatagtacagggttttgaaataaaccaggtttatttcccagtttcaccatttactagctgtgtaactttgagtaggttgattagcttccaagcctcaatttgtacttgtgtgaagtggggataatagatgcatagtacctaacaccaagtaggtgttcaataaatggtatataataggattagtttttgataataatttttttagataatcaggattccaacttaactacgcagtcatgtgtgtttccttattcttcagtgttttccaggagagatgaatgtataagttctttgaatatctttaccctagtgtgagtttattgtgatctgctgtttttatagctaaataaattagttcatttgtcgttacaggagatatattgctctaagtacctaataagactttagttgtaacttgcatagtgttttattaatgtcaatgcttctggctttttaagaaagtttaattatgtgaaaatgagacttaaaatttgtgtgcttagagtaaaatatgaatgcatttttcttcaggcattttaaattatacctgacatcaagtactgaacgtttttcacaaaatttcaaggtcgtggtggtggatggtaaaaacgaaagcgagtacactgtaaaatggcaggacttcttcactggacacgtggttggttagtatggagcttgttggtttgcccctgtgtctggtgtattaggtctccaaatctaacttgattgcatattcttttctggtgcaggatagtggggacggggtgtcatagaagtgctattctttgacttttctttgaggtatataagtttagaggcaggaacattctaatagaaggaaatgagtattatctaaatgtcatactagctggctggtttaatgattaaaattaaattcttcttaagtgataggaatttaacctttcttttcctcagtgactgtaagctttctttatgatattttaaacagggaagcttggagataaaatacttggtgatcctattacgtatgtatttgagaaaatttatcaaacaagcaattgcagtttactttttgacctttttctgcaatgagaaaaaaaaatgtcattgaaatccacaaatagtatagttcctaggcctgtacattctaaatcatgctttctgtctctcttagttcttcctttacctagaagtagataaaattattccagaagaaaatcttagcagttttgtttgttttgggaaagggataggtttcaagtgactaaacttgaggctaccccttaggagttgagattatctagcttctttctggagcctttgtttcttgttttgcagagctctcacagtactaggcaaattccaccctgaaggatttaatttttattgagagtaatgcatagtttcttatttgatgtaagtatttttaaataataattttttttttctcttaaggtgagcctgactctagggttctagcccacataagagatgatgatgttataatcagaatcaacacagatggggccgaatataacatagaggtaaatttatatgtgaattttttttcagtagcttatatctctgattttcaaaaagctgctcagttctgcaaaggtgaaaagtaattatacttatttctttcctcttcgtatttgaagttttttactaggaaagtagactttttaaaaaaggataatctctaagaagctgtgttatgatacaccctgtatttctaagtaccataattgagagagttacatgtgggatggataataggaagagaaaactttctttccctcctgactcattttttaattctttctcaaataataaatgtaaacatcctcagaaatgaaaagtgaagtattatttttcaatttctctgtttttctgctagacacactggaaatgctagatcaatgaaaggtggtagttcatagtctgagaagttaaagaggaagctaggaaagtcaggctgtggtcactcttccattgaaagagtagcaatagaaatcaagaccacagtggctgcattggttaagacacatatctatctgtcagatattagtctacaaaacaaaacgtttcctcataattgtgaattgaagttgattctgtgtttcctgaaaaatgagaagactctgggtggtggtggtgatatcactaaaatagatcacctgtgggaaaactgagtaagattggtcaaaatgaaatgttcaggtgtatttgagtgcttaataggggtaaaacagtctgctggagctatatatactatatgttttaattatatccaatctacatgactgttagtcctttgactgtccattattgtgaaaaagaaacctatggccttgcagtatgttatagtttgttaatgtttaagctatttaatgtcaatgttttgaggagtctggcctaccagaaagagtcagaaatttagtagaaagtaaaggaactaatattataaatgcattcattctagaataggcaaagcatcactggaatgtcttaaatttgcctgttctttcaaatcaatttattttttaagaatacctttattttaaaatatatgctcattgcaaaattcggaaaatagattatctgtacttggacagataactactattgacattttgacagacatccttccaaatttttttttctatgtgtaaatacacaaataaatatagttatacccactattttttcctgcaaaactaggaccatacaatatgtacagtttgtcttcacacatttttcgtttaacaatatgattatgaaccttttcgtgttaatatagatctaaattagggttttgtttgtttgtttgtttgttttttgagacggagtcttgctctgtcacccaggctagagtgcaatggcgtgatcttggctcactataacctctgcctccccggttcaggcgattctcctgccttagcctcccaagtagctgggactgcaggtgtgcgccatgatgtccggctaattttttttcttttttttgagatggagtatcactctgtcactcaggctagagtgcactggcgtggtctcggctcactgcaacctctggctcctgggttcaggcggttctcccgccttagacccttgagtagctcagactacaggcacatgctacctcacctggctaatttttgtatttttagtagagacggggtttcaccatgttggccaggatggtctcgatctcctgacctcatgatctgccagcctcggcctctgaaaagtgctgggattataggcgtgagccactgtgcctggcctcaactgttttgtttctaacttttgaaataaaaggtattgtagtgaacagccttgggcacaccttttggtgcatgtgtttagttggaatagtctggatgataggtaatagtctgggaagttaaatgaagaaactgtaggaagctctgtctaggctgtgcgagggcttcagataaactcccatagctgagtagcttaacacaagcaaagttttttcttactctcctgtggcttgatgtgggttaggtggttctcctctactttgtggctttgacttttggacacatgtcctctgtagttctcacagaaagaaaacagagctagagaattatacaggatattaagggccaggcttggaaatggccttccgttcaatacattctagaacactttatctctgacctgctacaaaggagaatggaaaagatagtcgtaatttgagctcagaaagagaaaatagtgtggtaaatgcacagcattgtttttgctgcagtgcatatgtctgcttatttccttagaataatttattcttttttgtttttttgagactgagtctcactctgttaccaggctggagtgcagtggcgtgatctcagctcactgcagactctgcctcctgggttcaagccattctcctgcctcagcctcccgagtagctgggattacaggtgcgcaccaccacacccagctaatttttgtatttttggtagagacagggtttcacaatgttggccaggatggtctcgatctcctgacctcatgatctgccagcctcggcctctgaaagtgctgagattaaaggcgtgagccactgtgcctggccagcttattaattcttaagccaaaatatgtgtctttaggatccaagttaaatttgctcagattacatttttttttttttaagatggcatctcgccctgtcacccagactggagtgcaatggcgcgatctcggctcaccacatcctctgcctcccaggttaaagcgattctcctgcctcagtcccttgagtagctggaattacaggcgtgtgccaccatgccccgttaatttttgtagttttagtagagatggggtttcactgtgttggccaggctggtcttgaactcctgacctcgtgatctgcccatcttggcctcccaaagtgctgagattataggcatgagccaccacgcccagctagattactcatttttttcaaatacttccttttggaaaaataggaattctgtttccatccatacctttgtttcactaagtacaaaaatgagtataactaatatttcattgtaagatatttacttagccaggcacagtggctcacacttgtaatcagcactttgggaggctgaggcgggtggactgcttgagcccaggaatttgagaccagcccaggcaatatagggagaccttgtctctactcctccacaaaaaaaaaaaaaaaaaaaaaattagctgggcatggtggcacatgcctgtggtctcagctacttagaatgctgaagcagtaggatcagttgaattcggaaggcggagactgcagtgagctgagattgtactgctgcactccagcctgggtgacagagcgagaccctatctcacacatacacacacacaaagatgtttacttacaagtatactcatcagataccttgagggacttttgcatgaaattaataatgtttattgaaaaaatgatttactacttacaggggtgattttcatactctttataattcttttgatacttttatagttcataagtgtggtgattggctgttcacacacacatatgagatgtaccaccctagaaccttgttacaatgttagcacattaccagtctgacatgaaaaaaaataattctttacacttaccttgatgcaaaaacattgtctatctgcactaatatcttaggaatataagtgagcaggaaaaaatatatatcttatttttaacacatcatcattaaatattttgtttatgacagtcttacttggtcactcaggctgaagtgcagtggtgccatcatagctcactgcagccttgacctcctgggctcaaacaatccctcttttctgcctcctgagtagctgggactacaggtgcatgccaccatgcccaactaatttgttaaatttttgtagagtgtatcagatttttgatgaggtctcactgtgttgcccaggctgatctcaaatgtctgactgtaagcaatcctcttgcttggcctcccaaagtgctgggattacaggtgtgagccactgtgcgcagccgttaaatattttaaaccgtcactgactttaccatagcttactatttatataaataatcctgggttaaacttgcatagtgagataatatttcccccaacttttatttatttatttgagatggagtcttgctctgtcgcccaggctggagtgcagtggcgcaatctcggctcactgcagtctccgcctcccaggttcaagcatttctcctgcctcagcctcccaagtagctgggattacaggcacacgccactgtgcccggctagtttttatatttttggtagagacagggttttgccacgttggccaggctggtcttgaactcctggtctcaggtgatccacccgcgtcggcctcccaaggtgctgggattacaggcatgagccactgcatccggcctaatttttgtatttttagtagagacggggtttcaccatgttagtgaggctggtcttgaacttctgaccttgtgatctgcccacctcggcctcccaaagtgctgggatgacagacgtgagccaccatgcttggcctcccccagcttctagttttaaaaatgttcagctggtgcagtggctcatgcctgtcatcccagcactttgggaagctgaggtgggtggatcacttcaggccaggagttcgaggccagcctggccaacatggtgaaacctcgtctctactaaaaatacaaaaattagccaggcttggtggcttgcgcccgtaatcccaactgctcgggaggcctaggtgggagaatcgcttgaacctgggagacagaggttgcagtgagctgagatcgctccactgtactccaatgtgggtgacagggtgaaactctgtctcagaaaaaaataaaaaagaaaatgtgcaaatctacagaaagattaaaaagtaccctgtagttacagaaagatttttttaaaaaataccctgtagcccttaaacaatttctaacataatgtcctgttagctttctctctttttttcgtgaatcatatgaaaatcatttgcaaacatcatgacccttcacccctaaatacttctgtatgcatccttaggaataaaggcactcttttctatagctgtaataaaagtaacatacctgagaaaatgacaagaattctacaatattatctaataatcatgccatagtcaaaatctctagtcatcctcaaaatctcctttgtagattttttttggttttccagtccaggatccaatccagttttctgccttttagtcaattactcatcaaattattttttccagcaacttactagtaataatggtaatagccttagcttttattaataacaaccacttttcttttgaaatgttaatataaaactagatttattacctacataatcttcataatcttcaagttaggtattatcactactttacctaatgagggaggttatgctcagggtacttgtccaaggcacatagtgaggtatggttgaggtttgaactcagatatatctgatcccaaagccagctgtctttttctgtgctggactgactatactaggaaacaatcaatgtgaacttagaaatgtttgacccaaaagaaaaaaaatttcactcctattcataggctaaatgaactttactaaatatggaagattcctgtagcccggaagttgggttagttaacttttgagatctctgccaaccctgaaattctgtaacccttgtttcttacatctgcctcatacatggattaccaaagatgtatatgcatataatatttaacagttttattgagataaaattcacatactatattattcacccacttaatgtatacaattttgtagttttgtgtgtgtgtgtgtgtgtgtgtatttttgagatggagtctcactctgtcacccaggctggagtgcagtggcacgatcactgcaacctctgcctcctgggttcaagtgattctgtggcctcagcctgttgagtagctgggattacaggcgcccaccaccatgcccggctgatttttgtgtttcagtagagatggggtttcaccgtgttggtcaggctgttctcgaactcctggactcaagttatctgcccaccatggcctccccaaagtgctgagattacaggcgtgagccatcgcgcccggcagttttcgtatattgatggagttgtgcaaacaccacctcattcaattttagaacatttttatcacctgaaaaagaaacgctgtatcctttagccatacttcccccttcctccctaactcccccagctctaggcaaccagggatctactgtctatttagatttgtctgtttgggtcatctcatataaatggaattacataacatgtcttttgtgtgtggcttcaatttttttatttttttgagatggagtcttgctctgtcacccaggctggagtgcagtggcatgatctcagctcactgcaacttttgcctcctgggttcaactgattctcttgcctcagcctcccaggtagctgggattacaggctcctgccaccatgcctgactaatttttgtattttttactagagtcggggtttcactatgttggccaggctgttctcaaactcctgacctcaagtgatccacctgcctcggcctcccgaagtgctgggattaaagacatgagccaccacgcccagcctgtgtgtggcttctttcacttagaataatgtttccaaggttcatctgtgttgtagcatgtatctgtatcttatttatttttattgctgaatagtattccattgtatggataaactgcattttgtttattcattgattagttgttgatggacatttgggttgtttccactttttagctatatttacattactgcttgtgttttcatttctcttggttatatactaggagcagaattgctgggtcatatggtacttctacttttaacctttgaggacctgccagactgttttctaaagtggttttaccattttacattctcatcagcatatgtgagggttctggatttctctacatcctcaccagtatttgtctttgatcatagtcatcctagtgggtatacaggggtgtctcattgtgggggtttttttccccattggggttttgatttgcatttccctgatggagataaatatattttttgtgtgtccccccacaaactgcctggttctgatgagaccagtgttcttacagagaataactttgctttgaaacaaaacaaacaaacagccttttgacttgggtaacctttggagtatgttaattgtgatttactctggccttgtaacattgtaagtggagattttgtttaaaaactgcgttcgctgaaacaagtaataaggttcagacctattgttacaagttctgagttttctttcatataaatatgtttgttcttttgtgtggataaaacctaacgtggcaaaaaggtgtcaaacacctaagtattaaggaaactaaaatgaaaatgctgcatgaacagaaaccttgtccaattttcattactatagcaccatcacctataacagtgccagtgtacagtagatattacataatatttttgaatgaatgagtggaaaatgatatgcatttttctcttctgcatcctctgaaagatttcacaacgtgcaaagtatgtaaggctttatttatatacagataaaataatcagagtttataatctatgtatttactttcctgcatagaaactccatatgattaaaaattgagattatttattttaataacatgactaatcagtttacttaacctagaaatgaatgttatctaagaacaagcaaagaatgttagaagaatttagtgtttaggaattattattgttttccatctcagtcgtatatattttctgttttagccactttggagatttgttaatgataccaaagacaaaagaatgttagtttataaatctgaagatatcaagaatgtttcacgtttgcagtctccaaaagtgtgtggttatttaaaagtggataatgaagagttgctcccaaaagggttagtagacagagaaccacctgaaggtaagacttaaagagtgtatttcaaataagaaacaaacatactacaattgacttcagtaggggtggttgttatttgttaaaaaataacatgattgtcaagtaactatagtatttggcatgaaaataagaggtttgttccagaaattttcatcttcttttgtttataatgtaagagttgaaaactctggaaaataatgggaacaacagagattagactttaaaaaagattagggaaaagggaaatggagtgatctgagggaaaatattcctgcagatatttagaaatgataaaataatatggtggaaagacaatctttagagtttataagaaattaattggtagtaggagggacctatatatatactgcttagaatacaagaaggttatatccatcttgggacaatccatttagggtcatttaaaaaacgtaaccatcttggaattttactgcccaaaacacctctggttaggttttttgttttgttttgttttgttttgtttgcagcgcgatctcggctcactgcaacctttgacttccaggttcaggtgattctcctgcctcagactcctgagtagctggattataggcatgtgccaccaggcctggctaatttttgtatttttagtggagatggggtttcaccatgttggtcaggctgttctcaaactcctggcctcaagtgatctgcccacctcagcctcccaaagtgttgggattacaggcgtgcaccaacatgcccggccaaagacggttatgttattaaaattatatattagcattttaatatataaataaagaaattcttaatttatttcacaagaaagttgtcctattaaactaattttcaatgtgaatatcttgacatttttactgttacattggttaattcataaacttcttgttgtagaatatgactgacagcttcatagcccagcattaggtgactgttttactctgttgagcactatttatttatttatttatttagagatgaagtctcacttttgtcgccctggcttgagtgcaatggcacaatcttggctcactgcaacctccgcaccctgggttgaagtgattctcctgcctcagccttacaagtagctgggattacaggcgggtgccaccatatctggctaatttttgtatttttaatagagatggggtttcatcatgttggccaggctggtctcgaactcccgtcctcaggtgattcacccaccttggcctcgcaaagtgctgggattacaggcctgagccaacatgcccggccttactctgttgagcactttttaaagtttctgtattggaaaaattaaagaggcacttgtccttggttttgaattctacagtgttttaactttatgttacttttcacttttctgtcttcctccaaattattttttgttgttgttcagaatcctttagtgatattaagctcacataatgtttgtttcaaaaatatgttagatttaaagtgttaccataaaactccttgttttggtgaattttgatttaatagtgcatacaaattcatattagagcttgttcatcgagtgaaaagaagagctgacccagatcccatgaagaacacgtgtaaattattggtggtagcagatcatcgcttctacagatacatgggcagaggggaagagagtacaactacaaattacttagtaagtatttgatattgcatcgagtaattgaaaaaaaaatttgggtgggtacattccatgaaacttaatgcaaccagatctgttccagatactctgttatttccctaaaatatttgagggatattctctgaggtttttatgttactgtatggaaattatagtttcaaatttgtgacaacccattttacccttgaactaatattttctgcatgttagaatttatgcatatagggtttgggagaggttataatgtagtccttcctccttgatataagtgagttctttaaaaacatcactgctatcatggtagtgaacctgtggtgtcacatgtgaatgtaaaaatatgtatttgcatgaacccatgtttttcttttgcttatatgtatatttcagagaggaaggcgagttttgtttgtcatgttaaagacctaatcattggacttcacttgaaataggtgggactttcatggtcataactagttctagggcacagaagtgaaggaaagatgtaagaagtgatgatactggatttttaagtatgaactattatgatttttgaagtctggggaatcatttttcattgacattttttgctagtgtgacttcattcgtcatgattacttggcactgaccaaaatgttgttactgagggaataatggagaatgcagctattcatgaagcaagaagaagctggtgcagtaaagatgtctttctcattgccttgcttttcccatgctgtccattttattcataccctcccaacttctttcccttccctttcatgtcaagtggatttttttttttttttttcaacacagagtctcactgtgtcgcccaggctggagtgcagtggcacaatctcagctcactgcaacccccacctcctgggttcaagcaattctcctgcctcagcatcacaagtagctggaattacaggcgtgaaccacagcactcggccccatatcaagtgaatttattatgaggctagtaagagtcactgtgattcttgttcctaaataagagagatttttactttaaaaagcttctctcttaatctgggttttatattaaggggctcctcttattttacttctttgttcattgcactataaatatgaatataatgagagatctagtcttaaaaattgtatttttttacaacttcttaggcataacttgtttcacagttgctagaacaaacctcatcaacccagtttttgaacagtagaatattctctttgagaaaaagataggtaattagcattttgttctttctcatgtcattttccttggaaactatactgccttccttctccagttttcccaaatcagagaacaaaagaaggagggttgctgaaatgaaccttgttctttctggctgtcttcttacccattcctcagtgctgaactttttggggtgagagtgggggaatagggttggcagttgtctgccacggccccttacttgtttctggggaagacattcgaggtactcaccaagagatagagtgaagatggaattctttttagaagggaatacagttgacccaggaacagtgcgggggtgtggttagaagcactgaccttcttccctctgcagtcgaaaatcctcacgtgactttttttttttaaggctctgtcgcccaggccggagtgcagtggtgaaatcatagcttgctgcagcctctattgcccgggccaaagcaatcttcccacctcagcctcctctagctgggacaacaggtgttcacccttcctggctaagttttttgatttttagtagagatggagaatttcccaggatggtctcaaacttctaagcttaagcaatcctcctgcctcagcctcccaaggtgctgggattacaggcatgagccactatgcccggccactgtataactttgattctccaaaaatttaactactaatagtctactgttgaccagaagccttaccaataaaataagttgattaacacatttttaaaatatgtattattactgtgttcttacaatcaagtaagctagagaaaggaaaatgttatgatgaaaatcataaaaaaaaaaaaaagcccggcatggtggtgtgtgcctgtagtcttctgttactcaggaggctgaggtgagaggattgcttgagtccagaaattcaggctgtagtgagctatgatcgtgccgctgtactgcacccctggtgacagagcaagaccttgtctcttgaaaaaaaaaaaagaaaatcataaggaagagaaaaatacatttactattcactaagtggaagtggatcatcataatggtcttcatgttgagtaggctgaggaggaagaggaagagttgatcatattgtctctggtgacagaggctcaaggaaatccatatgtaagtggacacttgaagttcaaatctgttgttcaagggtcaactgtatttcaggtatactgattgacttttaaatttaatttttattattggctgaaacggtagttttaaaaaagcctgttacttgtcattttggttccatgtgcaattgagtacctgaaatttaggttaaactataccattgttttattctggtaacagcactttaagtttggggccaaaggttgggaatactctgatacagtaacatctcaatgctagtttttgcgaaagtagaaacttttgcaatggcctctaaactgagattttttctttccccatagattttatattgcattgccaggagaggtaaagagttacataatgtcttttttcttttttaaatacacacagatagagctaattgacagagttgatgacatctatcggaacacttcatgggataatgcaggttttaaaggctatggaatacagatagagcaggtatttatcaatagatatggcttatattacttaagttttgtaatgtaaatatttgtcacttgtattcaaaacctaaaaacttgtccttaacaataattgtaaataagttttctcagatgccaatgattttttatgatgaattgtgcagtatttttgatgttaattagttctagattgtgaagttttctgtccttagtctcgctttaggtagaaagccttttatgctgctgtgctttgttccttctttgaattcatggcctttatattctctgtagttttcttcccccctccgattatgcttaagtctttagttaaaactctggcatgcaccattgaatccttagtcagaaaatttactaaaaaatactgtgtacctttgcaaggctgtatttatatatacagaacctttaggttctttcctctcagatatctccttctgatttcttgtaatctgttaacagagtgtgtctagtaatgttatattaatgtcatcttaataatagctcatattaaaagttatttcaaattgctaggactaattaaaaaggcttctgacaaagggtattgctttgggcagagagacattttgatatgtaaattatataaattgttatctctatttttttccaagctttttgtagtaaaccatatttttataagttatatagtatagaatttagaggttgaaaaaatttttaaaaatcattcaccatgtttataaatgttaaactttgatattacttgtataaaactaagagaattatttttcccttttcattctctttcactgttacgcattttctttttaagttattatttgaataggtaacatgtacacagtacaaaagccagtgaaaagtaagtctctgcagcctgtttattgtcaaaccagttcctttccccaaagacattcatgtcactagtttcatatgtatctttctagagatgtcgtatgcaggtatagtgtatgtatatgtctgtatttgacacaacggtgctatgcagtacacttttacaccttgctttttcatttcacagtatgttggagagtacttcatgttcatgcatgtaaagctgcttcacttgttttattataaatagctgcatcatgtttgagtttcagggaacctgtaaattttctttttgctttaggcatttggaaccagtcgaagaaacaggaataatataggagattaaaacattaacttctttacatctgatgaaggatggattggagggtgtggtttagatgtgtatcatggtgggcttctaagtagttctatcccagatttgaccttgaccagccaccatcaaaactgcagagtccaccccagtaaacttaccacacagtggcagaggagaccagaatgggccttctctgcaggcaggcaggcaggcaggcaggcagagagactcacagaaactctgagctgagcatggtttccttctttatctcacacttactaatgggagcctttgttacttttttttttcttctttgcaggtttaatatgaatttgtctgaaatgcctgtataaggagaagactctattcttagccttttattcctttgatgcacaaagagatgtatattttattattctttcctgagttgtcgactgtagtcgtaataaatattttaggctcctgtaacccaagttcttattttttcaaaataaacatggaggatatgaaaatttaagagtacatttataatattataaataattcattgacatatgttttccataccatatgcttctctgtttgtttcaaacattgaatattggtactgaagaatttatgaattttggttttaaaatgttttttttctagaacgattctttttttgaacagataaaataatgcagtattcagagccttctgacttattttggaagtgttctaagtatatgatctctttaagtatagattcgcattctcaagtctccacaagaggtaaaacctggtgaaaagcactacaacatggcaaaaagttacccaaatgaagaaaaggatgcttgggatgtgaagatgttgctagaggtaggtcttagaatcctggatatggtgctaacaccactttgtcatttctgatatgtggattgtatgtgttttaatgaaggagcatgttagaaaagatggacacccagaagcagtctcctccagctgatccagcagtaaccccatcccatgtagcagcatagacaacaaataacaaaaactctatgaaaaagaaaaacgctataaagcaatgcttccttttttttttttttttttttttgagacagagtttcactcttgttgccctggctggagggcaatggcgtgatcttggctcaccgcaacctccatctcccaggttcaagagattctcctgcctcagcctcccaagtagctaggattataggcatgcaccaccacggccggctaatttttgtatttttagtagagacagggtttctccatgttggtcaggctggtcttgaactcccgacctcagatgatccgtctgcctcggcctcccaaagtgctgggattacaagtgtgagccaccatgcccggccaaagcagtgcgtcttaaccttaatatctttgaggatctaatgagacaatcagtggatcttctctagaaaataacatggatacccaatatatagagtttttgcacactgtttcattagttctgcacacttagttcagctctctctgaagcttatcaatttatcttttagggcagtaattatcaaacaggttatgaacatgtattggagagtagaaatatagcttggagatctgaaagttctctacaggaatttaaaatttttgtgtttttattctggcgattaatctaaagatggctaacttaatcattttatgtcatttggagtcttgccgtataacagggtgctgccatgtgattccagtgtcttgagtttgtgtgtgctattactttggtgtagaatgactttatatgaagcgatagtttttatcttttaatgtgttggcaagtttattagtttcttgttgttgctttaattatcacaagtggagcagcttagaacaacacttatttatcccatagtttgcatgggctagtccaggtatggtgtggctcatctggattcttgtttagggtctcatgaggctgaaatcaagttttcaaagcttcaatagaattaaaggatattataactattcatccagatggagaagcataatgtgcagcacctgtgtggtactcattcataccttgtctaatttgatctgctgagcaccctgagaggttggttgagacagcatccttgtgaggaggctcagcaagtgttactgtttattccagctgacatgacaaagcagcataggctgggggacttaaacaacagaagtttgggttttcacagttctggaagctggaagtccaaaatcaaggggtcagcagggttgatttcttctgaggccaaggtacttgtggtgtagatgctgtcttctccctgtgttctcacatggtccttccctcagtgtgtgtgtatattctgatctccttatcaggacaccagccatattggattaaggcccacccatatgacctcagtgtaccttaattacctccttaagggccctgtttccagatagagtcacattctggggtactgttgagggttaggacttcaacatttgaattgtggggtggcacaattcagccagtagcaggaagattaaatgacttgtctgattagtcatacaactggtgatggcagaggttgaattgagcacagatctcctgactcctagaacagctgaaccactgcgcctgtctgcttttctgtgagcctccagacagcccatggcaggggaggaaccaaagagaaaaatgacttatgttgacagatggtcctctccagttttcttccctaagcctcctagaatattcttagaagcctcatccttttaccacggaactatcagaatccccatgtaaccacacttcattcctcatatagggctctctggcctctcatttaaagcattttaaacattgagggttttggctaggcatggtggttcatgcctgtaatcccagcactttgggaggctgaggatgaggcagtggattgtttgagcccaggagttcaaggctagcttgggcaacatgttgtacaaaaaatacaaaaattagccgggcatggtgaggcacgcctttggtaccagcttcttgggaggctgaggtgggaggttcacttgagcctgggaggtcgaggctgcagtgagctgtgattgcgtcactgcattccagcctaggtgacacagcgagaccctgtctcaagcaaaataaatcaaaccccccccccaaattaaggtttttttaaacttggagacgctggacggttatggtagaggtttttaaagtaatgtatgaagcccttttaaattaagaaaaaaaaaatcctctcaaacctgcagtgttgatttaaatggatgtaaaatctttattttagtaacataaaactgggtatgtatgcttttctataagtgtatatttatataaatgacaatatattatgaagctcaaaaaagtttaagattaaaatttctataaaaccaattgaatccttgaaatacttgagagggatctgttttggcctggagtgctgcaatccccttatcgaattggagcatctctagtcctgggctgtatgtcttcagaacagccctcggaggagcagtgagttagttctgaagagctggagcaagctcccgaactattcccttttgtgtcccttgtcagatgacagtgtgtgcctctcacctgtgcaggtggagaagcactttagggaaagagcaaagcactgcacgaggttgtgattgctggtgctgagctgcatgccatcatagttctgttctggaatgtttagttgatttagattacatcttttagtctgatgtaattgttaatctaagaatgcttttttttttttttttttttttggtctttcaaagcaatttagctttgatatagctgaggaagcatctaaagtttgcttggcacaccttttcacataccaagattttgatatgggaactcttggattagcttatgttggctctcccagagcaaacagccatggaggtgtttgtccaaagggtaagtttttccatttcttgtgtgaatatgctgctgggattattaagatgattggattatattataattctgtatttaataagcaatttatctctgtttccttttgactttagcttattatagcccagttgggaagaaaaatatctatttgaatagtggtttgacgagcacaaagaattatggtaaaaccatccttacaaaggtatgttcttttatttctaaaagaatagtgttagagtttattgtagtagaacctcagttatatatttatgtaggtatttttttaaaaaatgtaatatatactgttttttaaatttctgcctaaataaaatttatgtatttttgtgggatatatgaaaattaaagcataaagaagaaaataaaaatggcctgtcagccttcttttgaaacatgtgaggaccactgcttttctcgaaccctctgtcctggacccctctgacctgcagcaactcttagagctccctgtctcctagtcctgcagtgcagctgtcattcaaggcatcccacaccctcttattttcagaaccccatggtctccctctttctcagtgccatcattttggtgtagtgtatcttgcaggagcttcctaagaaaacgtagatgacctgcatattgttgggatttcatatatctgaaaatgtctttattccactcttaagcctgattgataattttggctgagtatattcttagttctcatgttctctatggtcttctgtgcatgttgcttctaaagaatctgaagtcattttgagttcttatctttgtttgtcacctgtttttttctctggaatatcttaagatcttgtttttctccagctatgtctgttaaaatgtgtttgactacaaataacagaaaattaaataagcagtggtttaaataaggggtttatttgtctcagtcaacaagaagttcagggatagcattttctgggtggtacagcaactcagaggtaccctcagtggctcaagaacaagcaggaagtctttgtcctcatggatgtcacctcatggttttaagatggttctcttctgtgttggagaaaggaggagaaagagaacatggctagcctagtctggcccttctaaaaagcttctctggaggccccatcctggcttttgtttatatgttactggacagcactgggtcccgtggctgcccttagcctcaacggaatgtggaaagctggctattttagctgagtatattgctgtcctgggcaaaattagggctcattaagtaaggaagaaggggagagagatgttggtaggacatattagtatctgatatactgatttttaatttttatttaatttttattttttttgagacagagtcttgctctgtggcccagtctggagggcagtggcaccatcttggctcactgtaacctctgccttctgggttcaagcagttctcctgcttcaacctcctgagtagttgggattacaagcacctgtcaccacgcctggctaatttttgtatttttgttttagagacagggtttcaccatgttggccaggctggtctcatgaacccctgacctcaagtgatccactcaccttggcttcctaaagggctggttggtatactgattttttgactatgatgttatacttggtgtagggtatgggaaaacatttgcaaaagacacatctgagaaaagactgctatctgaaatatacaaagaggccgggcatggtggctcattcctataatcttcggcactttgggaggccgaggcaggagaatcacttgagcccaggagtttgaaactaacctgggcaagatggtcagaccctgtctctacaaaattaaaaataaataaataaataaaaatttccatatgtataaagaactgttaaaattcaacaataagaaaatgaacaacctaatttaaaaacagacaaaagagcagaacagatacctccaaagatatacagatagcagagaagcatatgaaaagatgctcagcgtcatatgtcattaggaaattgcaaattaacaatgaagctggttgtaggggtacatgcctgtagtcccagttgcttgggaggctgaggtgggaggattgctcgagcccaggagtttgagacccatcctgggcaacattagtgagatcctatttctataaaaaactttaagaaacccaacaacaatgtgctattactagtagcttattagaatggctaaaatcccaaacactggcaacacaattccaacaaggctatggagcaacaggaactctcattaattgctagtgggaatgcaaaaatggaacagccactttggaaggcagttggcagtttcttttctttttcttttttcttttttttttttttttggagacggagtttcactcttgtcacccaggctggagtgcaatggcgccatctcggctcactgcaacctctgcctcccaggtttaagcaattctgcctcagtctcctgagtagctgggattacaggtgcccgctgccactcccagctaatttttgtatttttagtagagatggggtttcaccatgttgtccaggctggtctcgaactcctgacctcaggtgatccgcctgcttcagcctcccaaagtgctgggattacgggtgtgagccactacgcccagccataagaatgtttatggcagcttaattcataattgataaaacttggaagcaaccaagatatcctttagttggtaaatggataaactggcacatccataaaatgagaaaaaaataaaaagctattaagccatgaaaagacatagaggaaccttaaaagcatactactaagtaaaataagccagtctgaaaggctacatactatatgattccaaatatatgacattctagaaaagacaaaaccatgcagactataaaatgatcagtgattgctagatgctgggggagggagggatgaataggtggagagcagggtaattactctgtatgatacttcaacagtcagtataagacattatgcatttgttgaaacacatagaatatacagcacaaagagtggaccctaacataaactgtggactttgggtgatttaaaaacaggtggtggcaggagcctatagtcccagctacgcgggaggatcacttgaggccaagagttagaggctgtagtgtgataaatgcaactgtgaatacccgctacattccagcctgagcaacttagcgagatcctccttttcttttttgagatggagtctcgctgtgtctcccatgctggagtgcaatggcatgatcttggctcactgcaagctctgtctcctgggttcatgccattctcttgcctcagcctcccaagtagctgggactacaggcacccccaccaccacgcccggctaattttttgtatttttagtagagacggggtttcactgtgttagccaggatggtctcaatctcctgaccttgtgatctgcccgccttggcctcccaaagtgttggaattacaggcgtgagccaccgtgcctggcctgagaccctgtctctttttatttatatatatatatatatatatatatatatatatatatatatatatatatatttatattttaaatttaagttctaggatacatgtgcacaacgtgcaggtttgttacatatgtatacatgtgccatgttggtgtgctgcacccattaactcgtcatttacattaggtatatctcctaatgctatcccttcccccttccccctccccccaccccacgacaggcaccggtgtgtgatgttccccttcctgtgtccaagtgttctcattgttcaattcccacctttgagtgagaacatgcggtgtttggcttttgtccttgcgatagtttgctgagaatgatggtttccagcttcatccatgtccctacgaaggacatgaactcatccttttttatggctgcatagtattccatggtgtatatgtgccacattttcttaatccagtctatcattgttggacaatgttgaacaataatgtagagtggtatgagaaaagaaaaagacactaattagcttttgggaatcttttaatttctttttttcttttcttttttttttttttgagatggagttttctcttgttgcccaggctggagtgcaatggtgtgatcttggctcactgcaacctccgcctcccggattcaagcaattctcctgcctctttctcctgagcagctgggattacaggcatgcgccatcacgaccagctaattttgtatttttagtagagatggggtttcttcatgttggtcaggctggctctcaggtgatccgtctgcctcggcctcccaaactgctggattacaggcgtgagccaccgtgcttggccttaatttctaaatttatttttttcttatggtactttgttttaggggaaaaaatctctcaaactgtgttttccctctattctcacatcacaaccatcatcatcaacacagaagacttgtgtgaccagaccaaacgtgtggggatttccccctacatatcaagcagtagacatcagctaggtgtcctccaattcaattcaaacactctccacccggaaatagtatcagatctcacagtttgagggcccagtcccacaagactgactgttccctcctccccaccagttacaagtctgagcctccagaacttctgaccaactggcttcaagttggggtttccacattctcctctttgggtctgattaatttgcttaagtggctcacagaactcagggaaaagcttaacttagtttatgggtttattacataggatattttaaaggatacaaagaagctgggtgcggtggctcacgcctgtaatcccagcactttgggaggccgaggtgggtagatacctgaggtcaggagtttgagaccagcctgaccaacatggtgaaacctcgtctctactaaaaatacaaaaattagccaggtgtggtggtgcatgcctataatctcagccactcgggaggctgaggcaggagaagtgcttgaacctgggaggcagagattgcagtgagctgagattgcgccactgtactggtcaacagagggagtctttgtctcaaaaaataaaaaaaaaagaaaggatacaaagaaatagccaaatgaagggatacatagggcgaggtctggaagggtcccgagtacaggagcttctgtccccatggagttgggatgtacctccctcctggcacacgaatgagttttgcaccttcctgtcaacctccatgtattcaaaatgctctctggaagctctctgaatcctgttttttgagattttatggaggcttcattacataagcacgaatgacaactgtgtagaaatgtgattggacaaaatgggtatgttctcatactaaccgactgagtggggaagcccaccaaggcctgtccagattctccttgacctctctgtgcagcattcctccctccacagtaaagggcaggaccctctctagaatgagaatgagaatgaggatctctggacccacaatcagattagagtcttgccttggatcaggtaaaaggaggacaggagaaggtcagagagagagattctgtttcctgaggattgctcctgagccctaaagcaccccaacattataacagaagaccgtaaccagggctacggagggttgtaagccaggagccatggacagaaacatacatgtgtgtacagtagctcacgcttttacttttttggagtcacaacttcttaatggcttgatttcatgacatattttctttggtcttccagaactttcctcttaaaaaaacacagcaaaaaaacaaaatttgatttgaaatttttgagatttttttttaagagtcattagcaaatccactaatgaattttccccaagcagttaggagatatttctcttcattacacctttgggatttgagtgcttttgctaaaaatttaagttttttttcccactacggttttaatatgaacatgtggaaagacttcttgtatagaaaaatgacttgcaaaatattattttttcaggttctatggagtgatttcccccccttaggaaaaaagaactcaggaattttaagtttatatgtatatatatttattttattttattttatttatttattttaagacagactctcactcttttgcccaggctgggggttcagtggcctatctcggctcacagcaacctccgcctcctgggttcaagcaattcttctggctcagcctcccaaatagctgcgattacaggcgcccaccacaatgcctggctaggttttatatttttagtagagacagggtttcaccatgttggccagtctggtctggaactcctgacctcaagtgatccagctgccttggcctcccaaagtgctggaattccaggcgtgagccactgtgcctggcctttaagtttgatattttattcagataaatatggaaaaaaaattttagctttattggcaaaatttattattcatatagaaatcatctgataatctgatagattaagtacagccctgcaactggattctaataaaccaagtcctctaggtcattaagattgttattggacatgaattcagtcattgagaaaataaaacattgttttgttgttcctcagttgtggtttttgttttttttttaagatagagtttcactcttgttgcctaggctggagtgcaatggcatgatctcagctcactgcaacctccgcctcctgggttcaagtgattttcctgtctcagcctcccgagtagccgggattacaggcgtgcgccaccacacccagctaattttttgtatttttagtagagatggggttttactatgttggccaggctggtctcgaactcctgacctcaggcgatcaacccaccttggcctcccaaagtgctgggattacaggtgtgagccactgcgcctatccgtactgttttttttaccccttgctttttttttcctttctgctgagatgctttaggttttaacagacatgtgattgggccgaggggcatgtgaggaggctggacaattaactacagttagcttattgcatttatcagcaccagattgtgtgtggttgaaatggccaaggtttgatgttttgttatgaatgttccagtatatcttataaattacattttcttaaattgatttgttactacttacaataatgtttgatagtattaaataaaatcctacttattctgttaaattcatataattggtagaagaatcatagtccggttattactcttttttgagacaaagtcttactctgtcacccaggctggagtgcagtggtgtgatcatagatcactgtagcctcagcctcctgggttcaggtgatactctcacctcagcctcccaagtagctgggaccacaggtgtgcaccaccatgcctggctaatttttttttttttttttttgagacgaagtctcgccctgtctcccaggctggagtgcaatggcgtgatctcagctcactgcaacctccgccccctgggttcaagcagttctcctgcctcagcctcccgagtagttgagattacaggcgcgtgcctccatgcccagctaatttttgtatttttagtagagacagggtttcaccatgttggccaggctggtctcgaactcctgacctcgtgatccacctgcctcagcctcccaaagtgctgggattacaggcgtgagccaccatgcctagcccacctggttaatattttttattatttttgtagagatagggtctccctgtgttacccaggctggcctcaaactcctagagtaaagtaatcctcccatctcagcctcctaaagtgctggtattataagcatgcagttcttattctcttgttgatctgattataaggctctatttaagacagcataggcccaactggcagaagtaggtgatggctggatattgagaaataatgttttctttgcatgatccttaaggaagctgacctggttacaactcatgaattgggacataattttggagcagaacatgatccggatggtctagcagaatgtgccccgaatgaggaccagggagggaaatatgtcatgtatcccatagctgtgagtggcgatcacgagaacaataaggtatgtgtgtgtcgagaattttttatgtggtttggaaagaggctgtgtataatgatcataatgagagctcagaaacgtattccattcctaggcgtttccctagggatggatgtgcaaattacaaagtaccttgaaacgtggttgtgtgttttggggtgaagcacggttcatctaaatctggttaaaactatcatttggactttgttgtcaagcttaatggtgtagatttgagctctaggaaaaattactaataataatggctttttttggagttctggatttcagggtctggtgggctcaggctttatgttaaaaatttgtcatttcatttacaagttgtcattcattttaactctacaatttacatgtacagtttacacgtttttattaacttttgcagttaaacacatagtttgcctgactacaagcctcatgggagaaaggcccttccttgtctgtcttattcatagctctatcttattcatagctctatctccagtgcctagtaggagtatctggcatgtaacaaatatttgttgaataattaatggaatcatttactattgggggtttctgatagagaatactagttgatttgtgatactgtaaaacactttcagagactttaagagtgccgtgactaactcttagagtctgaactaaaagttgtgttaataaatatctggttctttcattttatttgaagttaaacagcataaagcagtgtgaggaaaacaatagttgcactgctgagttaaagagggtcggtggggagagcttaaaggagtctgattctaatcacaaaagattgtgaagtatttgtcctgactcctattttgagcttggctgtgggctaatgtgcaagccttccctggacacagagggcaagattacttctgcttttccctggctctgacaccctgctttctgaaatttctgcctcctgttctttttgtgatctttgattgttgcatctcatttttttttggctttttatgtatattttctgcatctcattttctttggctgttatgtgtaaacagttcctctgttactttgcatgttatgttttatttttcctctgcttgacaacttgtgccagagaaacatttttctacccctttttgtctactcttccaacctgtcaaactgttgaattttccttctcttttcatagtctctgcatttctaatcatgttcactatagttcagtgctgcccaatagaactttctgctgcggggcgggggatgttttgtgtctgctctgcccagtatagtagccactagcccagtggagcaattgaaatgtggctagaaactgaggaactgaattgtaaattctattttatttaaatttttaataatgtttgcctgtgatgggagacgggaatgggcattaactgtaaaaggacatgagtgagattactggaaggatggaaatgtcctaaaattgacttatagcaatggtttcaacacttggtaaagttattagaaatcactgagttatatacttgaaatggatcaattttgtgatatgtgaaatatgtcttaataaagttgttaataagccaacaaacaaaaacagcagtgtgggagcagaggaaaagtagcgcggatgtagaggagctgtgaagtcataagttgattattgttgaagctggtgaggggcacgggggcattcatgataccatcctgtctacttcatagatgcttgaatatttctgtaatagaaactgtaaaatatgtgactaggaacaaaatttaagtagccacatatggttggtggctaccatattgcatactgtttctctaagtaataggtcatatgcttcttggttatgaggatagtgtcagaacttgggagcaaaatgttttactttgcagactgcctgggtggacatgcatgctgctgactcttcctgctgccagttctggggctcttcaaaacagccctgtaagaacttgccagtgaggcatggtggctcacacctgtaatcccagcactttgagaggccgaggtgggcagatcacttgagcctaggagttcaggatcagcctggacaacatgtgaaactccatctctacagaaaatacaaaaattagctgggcatagaagcacatgcttgtagtcccagctactcaggaggctaaggtaggaggaacccggggagttcaaggcggcagtgagccaaggttgtgctactacactccagcctggatgacagagtgagactttatctcaaaaaaaggaaaaagaaaaaaaagaacttgctaatgagaatggggcctgggaagaactttttttttctggagctgccagtctgtatcaatgaagaacaatttatttattttgtcctgagcacatcatatttagtctgtgtttttctagtttggttgcccaagtaggagtccccttgtaagaagataatgtgcatcttctatgttttatttatttattattatttattatgattttttgagtggagtctcactctgtcgcccaggctggagtgcagtggtgtgatctctgctcactgcaacctccacctcccaggttcaagcgattctcctgccttagcctcctgagtagctggggttacaggtgcatgccaccacacctggccaatttttgtagttttagtaggatggggtttcaccatgttggccaggttggtcaactgactggtcaacaaactcctgacctcaggtgatccacctgcctcgacctctcaaagtgctgggattacaggcatgagctgctgtgcccagcctatgttttaaatgaattccttaataaaaatatttttaactgatgaaaagggcttacaggacaaaaataaagtagttccttgacctagaaagacagaacccatcaccctctactaggcaagcctatgaagagcagtttgccacaggtggacttctctgtggacagatgacattagtgaaaaggaatgtaggacctttgagattgtaacttcttaggaaggtttgctgaacggaagaggaagtcttatgacaaggatgcaaacagaagctgccagatcttcagggatgtgtaggcagaaagccagagttgcgggttggtccttttatcgttagtgctctccagctgcttgggagttgtaactctgacaaatcagtgaagaggtcttcttatctgttcactgtgaattttaactccattttaacctgataaaatggaacccagagatacatgatgttgatgaataaacccaccaaaatgacaactgcctgaggccccgattagaataaccagaccccttagacatctgtactgtaacgacagatttgggccgggcgcggtggctcacgcctgtaatcccagcactttggagaccgaggtgggcagatcatgaggtcaagagatcgagaccatcctggtcaacatggtgaaaccctgtttctacaaaaaatacaaaaattagctgggcgtggtggcatgcacctgtagtcctagctactcaggaggctgaggcagaagaatcacttgaacccgggaggcggaggttacaataagccaagattgtgcctctgtagtccagcctggtgacagagcaagactccatctaaaaaaaaaaaaaaaaaaaaaaaaaaacagatttgaagatgttttttaaaaagccagttagtatttctgtgtaagatgaggtctttgctatctttctgaaagtagctcctttggtgtctgatttggtggttacaggcacctttggagggtctcatacacttggctctcaggggcttcatgattgttgtctggggtgaaagtgaagccattttggcatctgcagagcactttggagaccccgacctaagaagtaactatgctcagttttccctaagcctcttctttttttgataacttcaggaggtctggaaaatgaccgcagttttagagctcctgataaaaccctcagccttaaaagggagttatcctagtggttctgtactccagggtgggaaggtagtgtagagactttttgagacactggtcttgctggttgatgaaaatgtttaggtaacaattggggatttaatttatataaaatgtactattatgcctattactaagctcaaatatttaaacaactttaaacttggatcatccatataagtagccaaagaaggagaagaaaccccttctcctgcatttctgaattgttttgtctgggacaacattaacctacagaggttcttaattcttgtcactgcatgagtggcatgcctgaggtgaggagatttcaagtctgatggagctacgagctctctgttgtgctattctgcttgtccttaagtgggctttgactgggatgtttggtctcagtatttgtatagcttgcttaccttcgtaagaagaattatagatccttaaccaagttcacatcagccatttagcattctatggagggaggttcccagttccatatcagtggcctttggaggagactgtggtggccttgccataactccagggtggctctgatggtggttttacattaagagtttgtctctagagaagacacaaacattgcatgggaatacatttttatgatattattttgggtccttattgccttttttctctcaagatgttttcaaactgcagtaaacaatcaatctataagaccattgaaagtaaggcccaggagtgttttcaagaacgcagcaataaagtttgtgggaactcgagggtggatgaaggagaagagtgtgatcctggcatcatgtatctgaacaacgacacctgctgcaacagcgactgcacgttgaaggaaggtgtccagtgcaggtgaggagtctctccacagggattttgggaagttggtataacaagatgtccaaaataagagaagactgaacttgcaggggctttagaatcaactgaaaggggtgtgagtgtgtttgtttacatctacctcttttgcccttcacagcaagaaattgctttctgggcctggcacggtggctcactcctgtcatcccagcactctgggaggctgaggtgggagaaatgcttgagaacagcctgggcaacatagtgagacactatctcttaaaaaacaaaaaacaaataagaaaagaagaagctttctggaaagcagtgtgacattatgtaacaaaatccttgaccttgcatgctccttggtttagcagtcctatagttaaaagaatcttttttttttttttttttcctgagacagagtcttgctctgtcgccaggctggagtgcagtggcgcgatcttggcttactgcaatctttgtctcccgggttcaagtgattcccctgccttagcctcctgagtagtgggactacaggcacgcaccaccatgcccggctaattttttgtattagtagagacgaggtttcactacggtggccaggatggtctccaactcctgaccttgtgatccatccaccttggcctcccaaagtgctgggattacaggtgtgaggcaccgtgcctggcaaaataatcttttttatttaatttaatttatttatttattttgagacggcgtctcgctctgttgccaggctggagtgcagtggcgcgatctcagcgcactgcaatctccgcctcccaggttcaagcgattcccctgcctcagcctccccaataactgggactacaggtacgcaccatcacgcctggctgattttttgtattttagtagagacggagttttagcatgttggccaggatggtctcgatctcctgacttcatgatctgcccaccttggcctcccaaagtgctgggattacagaggggagccaccgtgcctggcctttattttctttttgagacagggtctcagtctgttgcccaagatggagtgcagtggcatgatcatggctcactgcagcctcaacctcccaggctcaatcagtccttccacctcagcctcccggatagacaggactacaggtgtgtgccacctggctaattttttttgtattttttatagagatggggttttgccatgttgcccaagcttgttgtaaagtcctgggctcaagtgatccacccttctaagcctcctaaagtgtggagattctaggtatgaggcaccatgcctggcccaaataatcttttatttctttttttttttttttgagacggagtcttgctctgtcgcccaggctggagtgcagtggcgtgatcttggctcactgcaacctccgcctcctgggttcaagccattcccctgcctcagcctccccagtagctgggattacagtgtgcaccaccacgcccagctaatttttgtgtttttagtagagatggggtttcaccatgttggccaggctggtctcgaactcctgacttcgtgatctgcctgcctcagcctcccaaagtgttgggattacaggcgtgagccactgctcctggctgcccaaagaatcttttgggcaacagagataagatttaacaagggtataagatttaacaaggtttttttatggctacatcctaatagcaaaattttggaaacaatcaaaatgacagtcttgggatatgaatgttatcatgattctatatactggaatagtgtggaggaagtaggttacaagttagaaagttacccaggttttcattttttatatacactgatagaccagtgcctggcttagaagtaaaagggttaaacttcagttttctggtgaataattgagatttaactggatacagtgcatattaacgctgtaaatactgatggggagtagagttctggctgccgagtgtcttagctatggattgccttgtggccccaccttgtcttttttttttttccttgtctttttttttttttttgagagagtctcgccctgttgaccaggctggagtgcagtggcgcgatcttggctcaccgcaacctctgccttccaggttcaagctattctcctgccttagcctcccgagtagctgggattacaggcatgtagcaccatgcccggctaattttttgtatctttagtagagacggagtttcaccatgttggccaggctggtctcaaacccctaacctcgtggtccacctgcctcatcttttttttttttttttttttttttgagacagaatttctctcttgttgcctaggctggagtgcagtggtgcgatctcggctcactgcaacctctgtctccggggtccaggcgattctcctgcctcagccttctaagtagctgggattacaggagcgcaccaccacgcccagctaatttttgtatttttagtagagatggggtttcaccatgttggccaggctcatctcgaactctcctgacctcaggtgatccacccacctcggcctcccaaagtgttgggttgggattataggtgtgagccacctcgcccagcccatcttgtcttttttaaattaatgcgttaaatgaatgaaaaccaagggcaccaagatgtttcacaggtgattgctgtgttcccattcttttctcctatagtgtggcatttatgtgacctcacgcacattaggaagggacaaagtgtgtgcaggtagctctagcagcggagatgtctgatgatgtaggagtgggtgacggagccaggaggtcttccccggtgatcttcaggtcactgtaacgtaactgtagcgtttgatttgatatggggccataatttgaattgctctgttcctgtctgctgttcttctccagtgacaggaacagtccttgctgtaaaaactgtcagtttgagactgcccagaagaagtgccaggaggcgattaatgctacttgcaaaggcgtgtcctactgcacaggttcgtgttcttgttgcttccttggaatgctgtgggtcaagtgtgtgtgtgtctttgaaaaacaagattatgttttgttcagatgagagacaccttatttttaatctcatatgccgggttgagtttctggcactccttagtttgtgacacttggctttggtgggtttaagacctgtttctatttctctttcatttccatcactctcctctttctcctcacagacatccactctactgtggttaatatttgcctggatatgtgtatatccttgaaagatcatatagtgttattttgtgcatgtatgtgtttttaatgtgccaaaatgatattctaccttaaatttacttttaaaaaattcagtatcatgttttaaagaattacccatattgtgctacagataatataacaaggtttttaatggctacatcctaatagcaaaattttggaaacaatcaaaatgacaatcttgggataatgaatgttatcatgaatctatgcactggaatagtgtggaggaagcaggatacaagttagaagggtaaccagtttttctatatgtatctatatgtatttcactgttggggacacctacatattgtttagttatatgattggctgtgttttacttacaagtcaccaagtggtagctacttccattgccttcatccccttgatattccagataggacacagatcacatcctcctacgtcccttcaggaacctgtgtgtttctctgggtactgaggagtgtcattgtgtagtcacagaggcaggatgtgctggtctctagagcaccactgctaggttgcctgtgtctgaggactccttatcctgacgttctggccaacgcttggaattaccctgctgtcctattagcatgatgagtataaagtaatctcttgttcttacttttttttttaacagcccttgtcctaatgcacttacttacatttttcttgagcatctctttatatttttcagctattcagatttctcctgtgaatagccagttcatatatttggttcattttttaaaaattgggtttcatgttatttcactactgtgaatttggaggagttcttatgtaatcatccatttgggcatacgtctcctatctgttgccattctcagaacagaaatctttaacgtaatcaaatccatcattttgttgtgtgtgtgtattttttaaacacatggttcagaaaagccatggcggatggttaaaaagatattttccacagctgcttctattagcttcataagttgtccttttacattcaggacttgaatctttctggagctaacctttccaggtgtccagtatcttttgttcggtcaattgttgctttaaaaatttcaaagctatgttattactaggtatataaacggacatatctctacatctttatctgctgttccttaccagtatataatgttccttttttacccttgcgatgttttttgacttaaattgtcaaaaagcaatattcagtttgctattctagtttttttgttcctctgatatatctatctgtcccattcttatatttttcaaaatttgtctctcttggttggttggtttgattttgtaatagctttattgatacataattcacactcatgtagtttgcccatttaaagtgtacagtttaatgatttttagtatattcagatttatgcagtcatcacaattaattttagaacatttacattactccagaaagaaaccctgtatcctttagctatgatcctccaatccccccattccccacaactcagagcaaccactaaccaccctattctttatggagttgtctgttttgaacatttcatataaatggaattatacaatatggtttcgtgaccacatattgtatgactggcttctttcactgaacatagcatttttaaggttcatgtatgttgtagcatgtatcagtacttcatgtacttttattgctgggtaaattccattgcatggatatgccacattttgtttattcattcattggttgatagacatttgggttgcttccacttttttgctataacaaataatgctgctgtgaacatttatctatgagtttttgtgtggacagttcctttggatattattcaggaatagaatttctgggtcatgtggtaactatgcttaatcttttgaggagctgtcagactgttttccaaaatggctacaccattttacagtctcagcagcattgtatgagggtcccagcttctccatatcctcaccaacacttgttatcttttttattgtaactatcctaggttttgtgataaggatgcaaacagaaagctggaggtcttcagggacctagtgaatgaagttgtgtcctattttggcttgattttggttttccgtgtgcatagtatgacatgttgcccatgtttttatcttttgggatctgtcactatcacattactttgccaaatgttaggaacctgatggcccggcacagtggctcacacctgtaatcctagcactttgggaggccgaggtgggcagatcacgagatcaggagatcgagaccatcctggctaacacggtgaaaccctgtgtctactaaaagatacaaaaaattagctgggcgtggtggcgggcgcctgtagtcccagctacttgggaggctgaggcaggagaatggcgtgaacccgggaggcggagcttgcagtgagccgagatcacgccactgcactccagcctgggcaacagagcaagactccatctcaaaaaaaaaccaaaaaaacaaatgttaggaacctgaatatctaaatcaagctttaaagaagcatttgctagctatgctcaatgtttcatcttcactgtaataataaaatagattgagaaaaatgctttcttttaaataaacgtaagtaaaacaatttgaaaacgtttgttcttatcaaacagccttttgttcccttgatattttatacaaaatagtagatagcagaggataagttcctgataaggaatcagtattttctagcaggaaaagctagagaacaacaacctcaaaaaaaaaaaaaaaaaagaagaagaaagaaaaaaagcaattagcatttcacaaccagcagcagcagcatcacctgggagcttattagaaatggaaattgtcagtcccctccctggatctactgcatcaaaaaatgtgggaagggaggccagcagtctgtgctgtgtaaccttctgtcaggtgatttccatgcatgctaaactttggggaccatgctagatagatgataccattttcagaattattttcctacctgtctaatactctgactttagtcttttaagaacagatgctcaacagatatttattgagcattttttaatgtatcagggcagtatcatataccaaaaatacaataatgatccacaatataaaccttccctgagctcactggacatcatactttcagtaatagtttgttaaatgactgttgacatgatgaatgcccagtgctcatgaaaggttttatgagaaccagaggcaaagtgcctggttatctgttgggtacttaataaaccatcacttttgtttgaaactggccagattttctgtacattttgtgttactgctctgaaaccctctaagtcagaattcttttgattggcttcattcttcagctgaaaggccagtccagagctgtggatatatagtccattgctttcataaagtgttttttttctcctcctctatttgtgttgacttttagctacttgtgctattcattttccagaatgattcactcattccatcctgtctctcccagtttaactttctttggtgggttttctttggcattattggcctgggcacagtggctcatgcctatcattccagcacttggaaggccaaggtgggaggatcccttgagcccagcagttttacaccagcatggtcaacacagggagatctcgtctctcaaaaaaaaagaaagaaaattagccaggtatggtggcgtacgcctgaaatcctaggtacttgtgaggctgaggcaggaggattgccggaacctaggagtttgaggctgcagtaagctatgatcacacccctgccttccagcctgggtgacagactgagaccctgtctcaaaagaaaaataaaaagaataattgatttatttaagaaatatttgtagtatacctataatatgatagggattggagataacttaatagatttgatcattgctgtcatggggctttccagtctagtagagggaaaacagaaaataacattaaatatatatatataaattgcaaaacatatgcaatgaaggagagaaggagtgtgatagtgcataatggaagtgggaggccacatcaacttagcatcctcagggatatctcagaaaacctttgagacaaaacttaatccataagaaaagccagctaattgccccaaaagagtggaaacaccagcattccaggtagaaggaatagtatctgttaatattgaaggaactgaatggaggttgtcatagccaaagcagtgggctgtgggagagttgtgtgcgatgaagtcagggccagatagggaaggccgtggagttcttttaagccttcatacaaagtttgcaatttattctaagtaatagcacataggatattcttttatatatgactgtgagatgcagaagtggagaccatgcattctaactggggcttgggaggccagggactcatgcagcctagcctggcacatagccaggcactcccatttaaatgctgattgctggtgagatgcaggctcttgtcctagctctgtaggtcactttttgcttttgcaaggtaagatgctcacttgtatgagaaacagcgtattatgcacctgtagaactggtggacctgtgactcattctttttgttatgactggtgtttgcttccaggtaatagcagtgagtgcccgcctccaggaaatgctgaagatgacactgtttgcttggatcttggcaagtgtaaggatgggaaatgcatccctttctgcgagagggaacagcagctggagtcctgtgcatgtaatggtgagcagttttattcccagtccagcagcaggagaaaacatggcctttgtctgccaggctcccttcctccatttggaggttgtgcgaatgacagcagtggtgagatccaagccgaggatgaggggatggggaagggcagggtggtgtctggagacaggcatctctgcatgcagatccaccatacctgggagacctatcctgttggtgtttcttcttgctgcagtttcaggccatatggcaggctttgaggtgggagaggagggaattttgttgggggtgagtgggtgggtaggtagaggtgtgtcctagccttcctctgctccatatcatacaaaccacaaaagcagcagtagctatctacattacattggcatggaactaggatactcctgcaacaactccaccagagagagctgattccaggacctaaccccactagatgaggatttttgcagttatcaagaaggctgggtctgctcccctctgatctcttagagcagcctggggcaggagcctctctcctgctggcctgtcagttttccttaggtttctgtgctattttggaacccctgggtttgagggcatcctcatggactggtcagggactggctggactctgcttcccaccccacttaaaccatgggagtcgatgagggagttctcttgctttcaaaatagacagagagccaggtgtggtgactcacacctgtaatcccatcactttgggaggccgaggtgggcagatcacttgaggtcaggagtttgagagcagcttggtcaacatggcaaaacgctgtctctactaaaaataaaaaaaattagccgggtgtggtagcgtacacctgtaatcccagctgctagggaggctgaggcaggagaattgcttgaacccagggggcggaggttgctgtgagctgagattgcgccgctacactctagcctgggcaacagagcgagactccatttcaaataaataaataaataagtaaaaaataaaataaataaaagacaaagaacccggtagttaaataaaatcactgggttggaagctcaccatccatacagtggagtgaggaactcttccaagttcaataatgtgtaggtaaagaagataggttgagggcagtgtctcacatctataatcccagcactttgggaggccaaggtgggtggatcacttgagctcaggagttgtttgagaccagcctgggcaacattgtgaaacctcacctcttaaaaaaaaaaaaaaaaaaggtaacacgtagcagatgccaaataaatctgttgtgttgaatgccaagaggcttggggtgctctggaaggacagagcccgacacagtaaaagtccaagaaatattttataaattagtgaatgatgaaaaggttttctttttttttttttgagatggagtctcactctcgcccaggctggagtgcagtggcgcgatctcaggtcaccgcagcctccgcctcccgggttcaagtgattctcgtgcctcagcctcctgagtagctgggactacaggcaagcaccaccacatctggctaattttttttatttttagtagagatggggtcttgccatgttggccaggctgttctcgaactcctggcctcaagtgatctgtccgccttggcctcccaaagtgctgggattacaagcgagagccactgctcccggccttttctgaaaaggttttctttttgcttgtttttgtgttctagttgatttctttttctcctaagtatggtttaattttctggcatttctgccattcttatgtatgcccacatggctcacagatgcccggtgttttatcctgtgacctgtcagagctgttcttgggaggagttgtggagctttggctgcagggctcatgctcctggggtcactgagctccccacccaagggtggacagttgtgtcccagctgctctcgctttcagggagccagtgtgggccctgaggggcacactttagactgaaaaaccaaggattgaagtcagcagggtgacaagaaagttgggacaaagggaagcatttagaagagcattgtgaggggcttgaaggggagagaatagttagactttgaagagaggtcttgaatctagaatggatttttctctgcatttttttttaaaccttgtggcctctgtcactgaaggctgaggagtgtgacctcagaaactactccttggtgggggctatggatagtattagctatttaaataaaaaataaatgtgatttcttacctctttgggagcatggtcagggaggaaagaggaggcaggaggagaggcaggtctcagaacaatccagctgtcaatgcgtgttctctgttccagaaactgacaactcctgcaaggtgtgctgcagggacctttctggccgctgtgtgccctatgtcgatgctgaacaaaagaacttatttttgaggaaaggaaagccctgtacagtaggattttgtgacatgaatgtgagtatttatgtacagctttttctgtaacagccagataggaagtttttattttgtaagtacttgattttgcagatgaaaacaaatcaaaacacaagtggggctacatccttctggcccattgttatctacgggtattacttaggaggagaagacggagtgctttcaggtccctgcctgtagtttccttctgtggtgggaggctttgagcccagagactgagaaggactggggtggggactttatggtaaagttggttggtttcaggcagtgggtcctaattatgttttcctagattacttacagaactgactaagattgcaaaattattcagggtgtgattttgaaacaggtgctgaatgagtaggaaagacctagaaggctgcttgacttacttaagccagacccttttgttctctagagaagcataatttttctcatgcagaatgatgggagagggttttaagatttacgaggcttcacagggagtctggctgtgttgttcactgtccactgtgtatgtgtagagtccttactggaatgcctcatctttagcaaactggtttccttgatttttgtctcctggtaattctaaatcacttgtaaaaatggagtaattatgaaagtgttaatgacagatgttctactttcttgggtactcattacgcggaagttattgccttgtgtcaaagatgggaaaacgtttgattttaatgaagccctttacatgtcagttatttttataaagctacattgcttctgaatacattgtgtttgggaatgatgctgtatgtatgttttttcttcatagggcaaatgtgagaaacgagtacaggatgtaattgaacgattttgggatttcattgaccagctgagcatcaatacttttggtaggtgatttccccagattacttactgagagctgagtcaatttctgtgatgacattagaaaagtgtgctttcagagtgatgtgctttaattctgcagtagaaggtggaactattcacagctttagttatgaaacaactttgttggctagaataaaatgaactcatagatagtctgtccccgtggagcttggatgcacagattttctgacaagggaaataaagtcaaaatactggcttccttctttacccaaaaatatccatgtgattagcataagcatagtttaatgctatagactgaatcctgattgatgtaagagtgtttatttgactgaatgctatatactgaatcctgcttgatgtaaaagtgagcctcatattttgcagaagcagggtatatcatgttgtcacgagtccataatttaatcacaaaaataatatccaggtaacaaaaactttgtcttcttaagcatttactagtagtagcattccatattaatctgttgacacagctactccaggtaacatgttgaatattctgcaatctcttcctgtcagccagtatatgagggctatttctttaaaagcacttggtatggagagatggtgtggtgtaatacaggcagcacagacattctgctctcggtagtatgtctagccagcagctctggcatttgacacaatggtaatatcctaagagcatttcactttagatttgtgaagtacttggtcaagacattaactgtttggaattgttcacaggaaagtttttagcagacaacatcgttgggtctgtcctggttttctccttgatattttggattcctttcagcattcttgtccattgtgtggtaagtcatcaacttttaagtaattaaatgttttatttaaattttgatcaactccaaccatgtaatctctggaaaaggtaaaacttgttcttagcaaagtttggcctgatatttccaatagctttttttgttgttattcctaggggaacatgtcttgtagaaagcttaactaatggtcttttaaaaaaaatactatttttgtgtgttggtgttttaatatataaatttcttaggaattttatacttttaagcataggagactgtttaactggatttgtccaggtcctttgatgagtaaagcccttattgaagagcattttcaggctgacttcgttgcaatagagcaaatatcaaacatcggcatttcagatgttccccatatatcatgtagattattggcagcagatggctatgtcttcagccttctgcacaaataggatgtagggactggggcccagctgtcatatagagtatttacatcttccccaaaaaataagagtaagcagtcttttctgttctcattcagaatcagtaacagctacaagttgaattgggctttgactaaggaactcctggtcctttataaatttgaggccctttttcataaatgttcttacgaatccattcacttgcatctgtggggaatggggatttgtctgctgtagagatgagaaagtcacacccaggcttccagacttgttttcccaaactctttcatagtggccttcctatgagcatttaaaaattccagcacaactctgatgacaaaggagtttttcctactgcctccttcctttcctttcctgctggcttctcctgcctaggggccatctcacagagcagctcttcctcagggtggtgagcatgatgggtataggaagatctctagggagcacttgtgctgaagaaagctgaaggtgacgtgcttgaagctttgacagatgtctctggatgacagtgccatccatcacgattgcttctattggaggatggaacctattttgtttacagggaagttgcacatgtggacaaggcacgacccttgatttcagagcaaagcctccgataggagggagggccatggcttgtttttggtcatagaatgcattgatggcacccagacaggaagcctagtcctggattcttggtccttgccctctgtcacctattatgcttcagccacaggcagggatggggcagcagatggccatgtggttagccttctgcagaagtaggatgtagggattgaggcccagttcctccagcagagcatggtccacagaaactgtggagacagctaagagagtgaggccatgggccggggcagtgcgaagaatgctgcaggcccagccacctgggtcttcctaccagttgcccttccagtcagtgcggtcctggtgtacccagcatctgggacatttgtcatttcatgcacaggaagatgcctttattattcccctgcccacagagggataaatttctcagaaaacatagcacttaaaccttgcctctttctgtacttaacgccaaaatgtatttcctttgagtgcaaaggaaacacttctagactggtggcataactaaagcttgggtgagaaatggattgtcatctgttgagcctgctatcactttctacaactcaggttctaagttcttcagttagtgttaggaatagcctgtgatgaaatagtactcactaactgaattgtatttgtagggaatgaccttcttgctgtttctttctaggataagaaattggataaacagtatgaatctctgtctctgtttcaccccagtgtaagtataccatatgaaagaaacataatcttcgcctggtctgaggccctgttaggcaaagaccttcacctgacccagcaagagctttcactggctgatggaaggtcatgttgcagcaggaagggtctaggttggaatgtttacccttctgacaacagtgatggtgaacttcgattagttgcatggatggacatttaaagagctgtgctgtccccttcccaagccataaggagtgatttagccattcaacacttagttaatattttgagttcaatttctctcttgggatcttaccttgagaggtttgaatcctcttttgggtcttcaaatggtaagtaagttttcaggatgcttgaaagctagtaattactgtttttgccattaaaagtaatggcattaattacttttgcaccaacctagtattttttagtcacttaggttgagtgagcctcacctagcacttttttcttagcatcacagtgccaacagaataagaggctgtttgatgggtaagggtggagctgtgaggacctccgattcatcttttattcctatcaatcaattgaacccatgtctttgcagaacgtcgaaatgctgagcagcatggattctgcatcggttcgcattatcaaaccctttcctgcgccccagactccaggccgcctgcagcctgcccctgtgatcccttcggcgccagcagctccaaaactggaccaccagagaatggacaccatccaggaagaccccagcacagactcacatatggacgaggatgggtttgagaaggaccccttcccaaatagcagcacagctgccaagtcatttgaggatctcacggaccatccggtcaccagaagtgaaaaggctgcctcctttaaactgcagcgtcagaatcgtgttgacagcaaagaaacagagtgctaatttagttctcagctcttctgacttaagtgtgcaaaatatttttatagatttgacctacaaatcaatcacagcttgtattttgtgaagactgggaagtgacttagcagatgctggtcatgtgtttgaacttcctgcaggtaaacagttcttgtgtggtttggcccttctccttttgaaaaggtaaggtgaaggtgaatctagcttattttgaggctttcaggttttagtttttaaaatatcttttgacctgtggtgcaaaagcagaaaatacagctggattgggttatgaatatttacgtttttgtaaattaatcttttatattgataacagcactgactagggaaatgatcagtttttttttatac

SEQ ID NO: 15375 - DNA, 56578 bp, Homo sapiens
gcacttctgggggcgtcgagcctggcggtagaatcttcccagtaggcggcgcgggagggaaaagaggattgaggggctaggccgggcggatcccgtcctcccccgatgtgagcagttttccgaaaccccgtcaggcgaaggctgcccagagaggtggagtcggtagcggggccgggaacatgaggcagtctctcctattcctgaccagcgtggttcctttcgtgctggcgccgcgacctccggatgacccgggcttcggcccccaccagagactcggtaaagacccaggggagttggcttaggccggcgcctggagcgctcgtttgagggaagagcaggggagctgggtctatcaggtgtttgggggcggggtattggcgatggtggcgcgtccctaagttttcagtgtagaagggggtgtggctctcggagtttggggaaagaataaaggagatgggcctgtctctgagtgggaaagggctactggacgggctccatgtagtgactgagcgcctgagaggggtttgctccctagctttgtgttcggggagggtgttgggaaagcggtaaggagtagggtggctggatcttgtttggagagggagatgtggtcagggttcttgccttagtagggaacaaatctagtgttgtgtgttcctaccagagccagaaaggaagggcccaaagctccagaattcttcctggtcctcgaaggagggaactagaatttctgctgtaggaggtacttatgcagtaatctcgttgggaggcggagactggagttggagtcttaagagttgtgtttttgcgaacatcctaagcacgttcttggttatttcaattgtagcttattggaggtgcttgggagatggggggaggcggaaacctggtaagccaactcgtgatgctgccactatgaatgctttccttgcacttttaaacaaagaaattatcaagagtgacgagtttgatgaatttagaggctagaaagtagagggttcctatttcattagattttccagagagattggattttaaggatggagatgcattaagggatctgaactttggtggaagtaagtttgcgtgaacttttagtgtattttaaaatccttttatctttcaaaaattgacgtgtaagatactttaattagtaataaagtgtgaaataatgttttcccagtgtgtgaaattgtaggcttgcatggttgtactggttcccaaatttcaccatgataccatgtgtagtattttttttctttatatttagtggacagaaattgtaatggattggtatggatactaaaggtgttgagagtgttatcacttgaacagctgtcttatgattctttccgattgaaatggattacaagtgactaatgaaaggcaagggatcttgttaggaagtgctgagaagtggtaagtcagtacaaattgaaggacattttgaggtaggattgtggttaggatggagggatagggtaagggtcttcattttaaggataaatgttagtaaaaagaataaatatgtattttgagatattaaaattatatttgcaccaccctgacacaactgtttcacttatgttattaatctgttgttcgtaggtaaaaataagcatgagtcccaaggaagcatacagtttaaagagaaacattactttctagatcaattcataacatttgcagatcgtaaggttttttagaccattttttttttccaagacagagtcttgctctgttgcccaggctggagtgcagtggcgcgatctcagctcactgcaacctccgcctcccggggttcaagcagttcacctgccttagcctcctgagtagctgggattacaggcatgtgccaccacgcccagctaatttttgtattcctagtagagacggggtttcaccatgttggccaggctggtctagaactcttgacctcgtgatccgcccacctgggcctccctaagtgctgggattacaggcatgaaccaccgctcctggcccatgtgtttgttttttatttgcaaaatgcagaccacctgtgccagaagaatgcatagacttttcttttttcttttcttttctttttctttctttttttttttttttgaggcagtgttttgctcttgttgcccaggctggagtgcaatggcgtcatctcagctcaccacaacctccgcctcccgggttcaagcaattctcctgcctcagcctcccaagtagctgggattacaggcatgtgccaccacgtccggctaattttttgtatttttagtagagatggggtttctccatgttattcaggctggtctcgaactcctgacctcaggtgatcagcacacctcggcctcccaaagtgctgggattaaaggcttgagccaccaggcccggcctctttttttttttttaaacgaaatatttgaaggacacacaagtattatacgtggcattggaaatacaaagatcagacgatatccatcttcaaatggttatagcatagggaaatagacattcatttaggacacttctaaaacagcatagaggagagtgctagagtacgttatagcaagtgttatcaccaaatgaatcttagagatcaagtctagttttcaaataaaggaggaggaaaatgagtctcaggaagatgctgtcagttgtcaatgatgaacataggccttgtgggtatttttcttttgaagaatgactttttttttcagtttgtttgacagcttacaatataatttgttacttaaccttaccattagattgagttggtcaagactagcaaatagtttcatagttgaaaaacatgctttattatttattttttatgtttattgtcctacaaatactactatattgcagtactcaatatcgattaggcatatgacaacatttttctgaaaggcaaaaaatacctaataaaatgaagcctggtttttagagtcctctatgggtcaccaaaaatgatttcaattgaactgttatgaattgcataatttaggaaagttatgagtcatatgagcttagtcatgatgatatcttgttgaagttgcagctggggtgtataagtctcactttgatttcaaaatcgttttccctttgtgttacttttaataaaagaggatgtagtgggtgggaggaaaaaatataggtcacagatgagggatgagaaagtttgtatctgaaacatgtattttcaaatttaccttgaggttattggcatggggattctccatattgcagtgctgatttcattattgacagcaccattttactcagtattttgacatctggctttctcttttgatgttaattttgcttactggctgcattcctttgaaacctaaatgcttaactgccctaactgctccaagggagatttaatgtaactctgctttatattagtctaagagataaaccatatttcaagagtagaatggagaggaattaagcagataattgtgatggggaaactggagagatccttttgactttcacaggatttcctagaacattaaatataggtttcctccaaggccaattgtggttgatttttggatccttcaccattttctatttgtgagataataagtgtatacagctggaagtgtaatgtgaagaaagtctgaaaaagattgataggaaaggaggacaggaatgggcttcattgaggtaacggaagtgaaatgaaaggcttttcatatatgggttgagcatccctaatctgaaatgctccaaaatttgaaactttttgaatgctggcatgacagcacacattacccctaacacacgattttttcactgttagtggtatattttttactgtgtagtacttatgtgtgaataggtataacaaaacgattacttattgtagcatgtaaaatcagtcaggaatgatggtgatgccagacaaccacagattatttatgtgggtggccgagacagtgacacctttgctttcgaatgcttcgttgtacacaaactttttttcatgcaaaaaaagttacttaaaaatattgtttaggccaggcgcggtggctcatgcctgtaatcccagcactttgggaggccgagctgggtggatcacgaggtcaggagatcgagaccatcctggctaacatggtgaaaccctgtctgtactaaaaatacaaaaaattagccaggtgtggtagcaggcgcctgtagtcccagctactcgggaggctgaggcaggagaatggtgtgaacctgggaggtggagcttgcagtgagccgagatcgcgccactgcactccagcctgggcgacagagcaagactccatctcaaagtaagtgaataaatgaaacataaatgaattttatatttagacttgggtcccatccccaagatacctcattatgtatatgcaaatatttcaaaatttaaaaaattctgatgaatgaaacacttctggtctcaagcattttggataagggatgctcaatctgtatctctttatttactcctaaaatcagccaaggaaatgggcatctctccgttcccccccttccttttttttttttctttgttgttacatgagttgtactggtttcacttcatttgacagtgttctgctaatgactagacgtgtatctctgacctggacttgttctctggagttcatattcagctgcccatttggcacttcaaatataacatgtccaaaattagttaccttttttttttttttgagacagagtctcactgtcacccaggctggagcgcagtggcgcaatcttggcttactgcaacctccacttcccaggttcaagtgattctcgtgcctcagcctcacgaatagctgggattacaggtgtcccccaccacgcctggctaattttttttttttttttttttttgtatttttagtagagatggggtttcatcatattggacaggcctgtgttgaactcctgacctctggtgatccacctgcctcagcctcccaaagtgctgggattacagacgtgaaccactgccccagccagttacctattcttttgattacaagaatgagtagctggacacagtggcttacacctatagtcccagcactttgggaggctgaggccggcggatgacttgaggccaggagttcaagaccagcttgaccaacatggtgaaacctgtctctactaaaaatacaaaaattagccaggcgtggtggtgcgtgcctgtaatcccagctactggggagactgaggcaggagaattgcttgaacccgggaggcagaggttgcagtgtgccaaggttgagccactgcagtgcagcctgggcagcagagtgagactccatctcaaaaaaaaaaaaaaaaaaaaaaaagaatgagtatcggatacaggtttagcctaggactaggcagggctgctggtaattgtggaagtagtctcattgcctaacctgaaacttgcatcctggttactggtcttgctggagagtcttggctcaggttacgtcccaggtctgttgaggagctcttgatagggaattagttgaagcagctcatactctatcctcctttactggtataaatccataaaattgtttagttcccaggctctggggtccctggcctagcagagagcactgctccctttttctcattccttagtcccaacaacccgcacctgacacttactacacgtggcctgcttccctgtcctgtgtgttttggggggtgctgaagaggaaggctcctgtgtcttcagcacaaacacaataaacacttcacagcagtactggctttatgttttccatttctgatatcagaagtaggagcatgacattgatagtgtcattttgggggaacttttcgtacttcatgcagcagagcagtgaagagtgagctgagtgccttggggttctgcagtacactctcaagtagtattttaggaaaatgcaatttgctgaaaaaataaaagaaattaatgtaaaaaatccacaagctgggcgcggtggctcacgactgtcatctcagcattttggaaagctaagggggaaggatcacttgagcccaggagtttgagaccaggctgggcaacatggcaagaccttgtctctacaaaaaaatagaaacaaaaattagccaggtgcggtggcatgtgcctgtggtcccagccacccggaggattgctcatgcccaggaggttgaggctgcagtgagtggtgattgtgccctgcactctagcctgagcaacagagcgagaccctgtctcaaaaacaaaacaaaacaaaaacccacacgtttccagaaccttctcatataacactttatttacattgttcttaaatacgtgtgggacggttatatacataccactatacttatgtgtatatatgttgatatacacacaaaattatatacataatttttgtttgtttgtttttgagatggagtctcactctatcacctaggctggagtgcagtggcgtgatctcagctcactcactgcaacctctgccacccgggttcaagcgattctcctgcctcaggcttctgagtagctgggattacaggtgcctgccaccgcgcctggctaatttttgtatttttagtagagactgggttttaccatgttggccaggctggtcttgaactcccacccttgtgatccacccacctcggcctcccaaagtgctgggattacaggtgtgagccactgtgacctgccatatacataattttttaaagtttcacgattagttttagcttaaaaatgtcagctctgggcttaatgaagaaaatatggatatactttatgtcaatgcattaaagtgaatggccataaaagcttatcccagagacaaaacaattcagatataagagaagtgggagagtggaaggtttatctaatcttctgtaggcaactccacagctacaaccagaaggccattttgttacaggcctgaaagccccgttttctttttattcttctttgaaacctttagaaggaacaaagtattggctactttttaccgctgatgtcagtgttaagaatcttgtgataacatagatttactctccctgctgaaaatcactatgtggctcatcagtaacacaactagacatgatgacttaatgcaaaggaagtcctatgtaaatgagcaatgaaattgcaactgtgtataaggaacaaaatagaatatgaaactccagaatcttttgttttcatttctgtttctcccaaggctctatcattcaaaactccagaatctttcagcatgcaattgtctcctgatatcagcccctctcttgttttgttttcttttttttttttttaatcacagtgagccacaacctaggagtcttttagtggtttctacttggtttgctctgcagcctaccagcagatttcctacattccggtcttgttcccctctagcccattctccacactgcagtcataatgaaatttctttcttttttgggggggatggagtctcactctgtcacccaggttggagtgcagtggcatgatctcggctcactgccacctttgcctcctgggttcaagcgattctcatgcctcagcctcccaagtagctgagattatacgcacctgctaccacgcccagctaatcttgtatttttagcagagacagggttttgccacgttggccaggctggtctctaactcctgacctcaagtgatcgcccaccttggctttctctctctttttttttttttggattttgagacaggatctggcctcgttgcctaggctggagtgcagtggcacgatatcagctcactgcaacctctgcctcctgagctcaagccatcctcccacctcagcctcctgagcagctgggactgcaggtgtacaccaccacgcctggctaatttttgtattttattttatttatttttttggtagagacggggttttgctgtgttgcccaagcttgtcttgaactcctggggctcaagcgatctacccatcttggcctcccaaggtgctgggatgacaggcatgagccaccacagctggcctataatgaaatttccaacttacagctattgccattatccaaagcccagaatccctgatttccttccatagcccttcatggcctgaccagtgcctgactctccagcctcacacttcatattctctctgtactgctctgcactgtagcctcattgagttgctttcacgtctttaagtgttgtgttctattttttgtggaattcagcatatgttatgcccttgacctaaggcctctcctttcttttccttctctggggtgctgcctcatccttctggtcttcaaaaccgtttccctgggaaaacatctttgactcagcaggcagggatcatgcccctgctgtgtctgtgcataactttctgtggctacttctgtcttggtctgtgatgtactttataataattttggtctttcctccagtgtcacaatactggaagtctgtttctttttctctgtgttgtatccttagtgcctgaaaggtaggaggttctcaataaatatttgttaaataatcaagtaaatggagtctggtggaaaagagaaaaaataagtgtagaatgtgtgtgcaagaaaggaggggtagggggatgaaaaagataacaaaagcacataacaaaacaacaaaaagcaaaaacaacaaaaaatgcagatgacaaaaaagataacaaaatgatgactgctgtggcaacttgtagaaagtaaggaaggtgctctcattctagagagaagtaggcagccattgtagttttttaaagagagaatatgggctgggctctgtggcccacgcctgtaatcccagcactttgggaggccgaagtgggtggatcacgaggtcaagagatcaagaccatcctggccaacacagtgaaaccccttctctactaaaaatacaaaaattagctggataggtggtgtgcacctgtagtcccagctacttgggaggctgagacaggagaatcgcttgaacccaggaggcggaggttgcagtgagctgagatcacgccactgcattccagcctggcgacagagtgagactccatttcaaaaaaaaaaaaagaatatggccagacactgagctgagatagacagtgcggcagtgtctggtattaactgtaataaactctactgtcagaagcaggtggtttatacttaagtttattgagagaattggatatggataagagataaactcttgggaaatggggagaaatataaattctgttgtaaagcctgtaaaaaattgagattactagtggttagaattttggaagtgaagtgcagtgaaatattgagtacctgagaggttacttgttagtgaaaacacaatagcagtagtacgtagctacagtttggctccaaaggaagaactgtttttactatagtttgtaatggcttcagaatcttcaatttgagatatccagttattaaaagagaatcaattgcagttgaaatgcattagttaagtattttaaagtgctttagcaagctacatttaaaaagtgcttattatagaaaatatacccaaaataaccaatgatgttactgtcttgtgcttattttttctagacctatttttatacatagttaagattatacaatatgaatatttctgaaatctatatttaacattataacatatgtatttttccatgttctttctttttttttttttttgagactgggtctcatcctgtcacccaggctggagtgcagtggtgctatcttggcttactgcagccttgacctcctgggctcaagtgatcctcccgcctgaaccttctgagtagctgagactacaagcacatgccaccatgcctggctaattttatttttactttttggagagatgagggtctcactattttgcccaggctggtctcgaactccttgggtcaagcaattctctcaccttgacctcccaaagtgctgggattacaggagcgagccaccgccctcagccccatgttcttaaaaaccttttgtgaacgacatttaaaatagttgcagattttttcccctgtctttggaagtgttacaacatccaaccatttcacagttactaatttaccatcattctggtttttgtccttgaaaataaggcaaggctgaataatgaacatctttgtggctaaagtttttttctttactttgagttgttaccttcctttagcttagttcagtggttttttctttttcttttttgagatggagtcttgccttgttgcccaggctggagagtagtggtgtgatctcggctcactgcaacctccgcctcccaggttcaagcagttctcttgcctcagcctaccgagtagctgggattataggcgtctgctgccatgcccagctaattttttgtatttttagtagagacagggttttgccatgttggccaggctggtcttgaactcctgacctcaggtgatccacccgcctctgcctctccaagtgctgggattacaagtgtgagccaccatgcccagccagttcagtgattttcatatttgagtgtgtcagccttgcctggaagccttgttaaacacagactattggatcccactgggcggatttctgtttgagcaggtctgaggggagacctgagcatttgcatttttaacaaattcccagttgatgatgatgctgctggtttgggaactacactttgagaactactgggctatattattgacaatgaaactataatgttgaggttaagttcctaagtcagtaggagtgattatgatcttgaatgaaactgagttcatgtaccaacctgtatcagggaaattgaagaactaaaggaccatattgcatttcagcactgagaattcgtgcagtttgtgaacatgtgagtgctgatatgtgcaaggtttttgctgagtattgtgaggcaaggatgttgtaatgaataaaaaatagccctttttggctttttttttcttcttttgagatggagtcttgctctgtcgccaggctggagtgcagtgatgtgatctcagctcactgcaacttccgcctcccaggttcaagcgattcttctgcctcagcctcatgagtagctgggactacaggtgcccgccaccacgcctggctaattttttgtattttggtagagactgggtttcaccatgtttgccaggatggtctccatctcctgaccttgtgatccccctgccttggcctcccaaagtgctgggattacaggcgtgagccaccgtgcccagcccggccttttttcccccgcctagagatggagtcttgctctgtcgcccaggctagagtgtagtggtgcaatctcagctccctgcaacatctgcctcctgggttcaagcgattctcctgcctcaaactagctgggattacaggcatgcaccaccatgcccggctaattttgtatttttagtagagacagggtttcaccatgttaatcaggctggtctggaactcctggcttcaggtgatccttggcctcccaaagtgctgggattacaggtgtgagccaccatgcatggcctcatttgggaaacttttgatatcagaatcttaggtttttcattagagattgtcagatttccatattcctctggaaggtaaaggcctaattgctagcattctggaagccagttagggtaggagggtaggagggtagggtattgggtagaggataaagaaggggtttgggaaaggtggggggtgtctcttggcagttgtatggttaaattgagtttttgttttatttagtgatatgtgttttttgggtacatgtgatattttgatacctgtgtataatatgtagtgatcaaatcagggtgattgggatacccatcatttgaaacatcttttctgtgttaggaatattacaagtcttctagctgttttgaagtatacaataaattgttaactataatttctgtactgtactatcaaatattagaacttactaatcaaactgtatttttgtaacactaaccactttctgttcatctccaccactcccacttcccttctcagcctctggtaaccaccattctgctgtctacctccacgagatccacttttttagcttccacacatgagtaagagtctttcttttaaaactggttttgtgagcatatttaacatcagtagcaataaacttgtattttaagctcctgttgctgtattttgaggaccttctaagtccattggaaggattttgaataccatagtgtctgcagtgatagttgttgaaagaaagggaaggcatcagtgcaaatatttttagacagtttttaaagagactcaagtcacccaatttgtcttctaaaaatcctgattttggaagaggcagtggagtttctgttgataaaaaatgatttatagtttgtgcttggcacttcctaatggattacatcaggaaagatttattgtctggcactctcattttaacgatactacaattgattattaggtttagatgctaataccttttttacctttatttcagagaagcttgattctttgctctcagactacgatattctctctttatctaatatccagcagcattcggtaagaaaaagagatctacagacttcaacacatgtagaaacactactaactttttcagctttgaaaaggtaatttgaattattcatggaataatgttggggcactgggggcttggtttggcaaaaacaaaaaagtaagggtatctactgaaatcttgggaaattacattttaaagatttgtaattaatttccagtataatgcttattctaaaattcatactggggctgggtgcagtggctcacgcctataatccgagcactttggggggccaagacatgtggattgcttgagctcaggagtttgcccaagctcagcctgggcaacatggcaaaaccccgtctctactaaaagtacaaaaattaggcatggtgacacgtgcctgtaatcccagctacttgggaggctgaggcaggagaatcacttgaaccagggaggtggaggctgcactagccgagatggtgccactgcactccagactgggcaacagagtgagactctgtctcaaaaaataaataaataaaataaataaagttcatactgatgagtatttttaaaaaagtaaatagatattgcagaggtgttaatgatggtaacgatgtttagaaaattctaacataatttaaattaattgaatgcttataaaaccttttgtttttggtgctactttataaccatcaatcatgtgctaaatattatctttatatatgaagagataaagattttgttcaggaccccacagcctggtggtgagctgggtctagattttactgttctatttatttatttagctaactagttacttagtttccaggattctttaacctgcttcatatttatttatttttaaaaacagggtcttgccatgttgccaaggctgatcttgaacttctgggctcaggtggtctttccatcttggcctcccaaagtgctgggattacaggtgtgagccaccatgcctggcccaaatttaatattctttctacattgagttcctcttacttcttagcataaattgatggatatgttctatttcagtagtaattttaataccacgtattgttttgcacattgaaatgttaaataattgcaggcctctttttaaagtctttaggaagctttattcagtatcaaaaaacagacacatggagaattgactgaattattctttatttatttatttttttgagagtcttgctctgtcgtccaggctggagtgcagttgtgtgatcttggctcactgcaacctctgcctcctgggttcaagcgattcttgtgcctcagcctctcaagtagctgggactacaggtgcacagcaccacgcctgggtgatttttgttatttttagtagagacagagtttcaccatgttggccaggctggtcttgaactcctcacctcaagtgatccacgatctcggcctcccaaagtgctgggattacagacaggggccactgcatctggccatctttattctttatataggacaagccttctcaactatgttaaaaaataaaaggaatatgtgcgtctggtttaaaaaacaagccatggaggatatgcaaagtttttacttctaactcagttagacttctcagacccagagaggtttcctttgtaaacttccaattttttgttttgttttgttttttgttttttgagacagagtttttgctcttgtcgcccagactggagtgcaatggcacgatcttagctcactgaagcctccacctctcgggttcaagcagttctcctgcctcagcttcccgagtagctgggattacaggagcccactgccatgctcagctaatttttgtatttttagtagagatgaggtttcaccatgttggccaggatggtcttgaactcctgacctcaggtgatccacctgcctcaggctcccaatgtgatgggattacaggtgtgagccaccgtgcccgacccaaaatattttaatgcatgttttttgcctataggtctctgtgtgtgtataggtgatatagatagcatatttacctcattttaaacagctgcataaatattcctattgcatagaattgtaacaacatactgactaatacactacagatggatattgtttaaccaaagtgatttttttaatacaacaaacagtgctctagtgagtatctttgtaaatgtgtaccttgatgaggtgtttttataggatatattcctggaaggagaattactgggtcaaggatatgtatactatgtttattgatattgctctttcctcccaaagagatttgacaaatttattcttccagcagcaatatatgagtttacctgtttcctgttatctttgccaatagtaggtttatcagcctttaactgtcacccctctaaagggcatggcattttatagttgttttgattttcattttgtgtgacattgagcatctttttatatatttgtaagtaatttgttttatatttctgtaaactgcctttttatctcttttgactatttttctattgaatttgtctttctaactactgaattgtagcagtgcttagtatattaaggagattggttcattgtcatgtggttattttaggcaaatttttaatgcaaattaatttttcctagctattgcaattatccttaggttattttttaatgacttctttttattcgattttatgtcagaatattatagtattggttattagctttcaacttacaccaaatttgagcagattggtaatattaatagctacagttaatcaggtacttattttctgtaatttactggcattttacataagttatctctaaaagtgattccttttttgaaggaacaaaaaaaaaaaaattaaggcttagacagcttagtaacttgcccaagattactcagctagtaaatgacagatacaagatttgaacaaaggttggactccaaaacttgtgttatttctgctatactggtggagagtttggtgaagaagtggatatagtagcaagaaataagtaggagcgaaggaagagtgaggaaactataaaatgaaaagaactcaaagtttagctttttgggtttctttggatttgaagtggcctgtagaatccgtattctagaggcaaaaacttccatagccttacatatttctctttcaagtttcgtagatgacattgattccctaagaaaatattaaatcgtagccacttgttatcttttctctgtgtaagaaagcagggaagtatgtaatttattttacaaagtttccatactaaatatttaatgggaaatttatctaacagtctatggaattttataccaggtgttttaaaataggttatttcctttaatccccaaaaccgttcagttattaggtgatattatttccatttgtagataaatacttaggattcaaagattgaggccaaggtcggacagtgagtaaatgaaagtaggacttaagccaagtttgtcagactccaaagcccataccctttcttttctatcatattgcgtcattaaagtttaaaacaagaacaaaaacaaagatagctgaagtaatcagtttgtatcagggctgaattaactctatgaaacccctcattacttgatggtaaatgagaagattccgtttttcgatagcagtggaaggcaaagtaatttaaaccaagatcattgcattaaatttggatgtaactattagaggttgaaaaagcatagaaacactgagaggttgtatgaagagttgaagtaacttaagaaaaaaagaaacttgtttaaaatttgccttacaagtttcatttcctttttgttataaatcaagaaattatcagctaggcgtggtgactcacacatgtaatcccagcactttgggaggccgagctggatggatcatgaggtcatgaggtcaggagatcgagaccatcctggctaacacggtgaaaccccgtctctactaaaaatacaaaaaattagccaggcgtggtagcaggcgcctgtagtcccagctatttgggaggctgaggcaggggaatggcgtgaacccaggaggtggagcttgcagttagccgagattgcgccactgcactccagcctgggcgacagagtgagactccgtctcaaaaaaaaaaaaaaatcaagaaattatcttatttttaaataacgaaaaagctgcggagtatatactgttttgatacttttttgatgttgcctgaatttttttggaaaaagttaaatgtttctcctaaaagtgaaatatatcagattacttgagaaggtctagaactgataaagaaatgaaagtgatatacctgactaaatggaccattaaaaatggttagggtaataatgttaattcaaactggttagctggtctttagttactgtaaattcttaagtcaaaagtcagaaagataaaacgttaaagaaatctgtaagaaaatgacttcacataattttgggaggataaagtaaaagaaattttgacattctgttggacgttttataactcaaaagctaatattggaaaatcaaaaaacatgaattttataatcgcttggtctttatctttagaaaagattcttaatgtagcaaatgaaaaatgcaattccactgatttctttctgaaaagaacattaagtaatgttgcaactcttagctttaaaacaaaataataagacatttataataagtatgcttttgaaagttctcagcataactggagggaaaaatcataactgagaatgtgtgggaagatatgttttaggatagcagaagaaaatgttccaaggatttacgaaataatgttctattgtcttttccctttgaccattaaaaaaccacaagcaaactaaaattaccttgttatgctcaaaaagttaaaaatatttgttgccatggagatagtcccagtctagatttctttccggtagtttaaagacttttgcaatcccatggggaagtaatatattttcagtacaacagctgacaaaatttgtttctgtgggtgagatgaataatatacctttctttgtctttggtgttcatggacacattgaaagactataaataatacttgagaaagtcttgctcaccactcctagttttcatgtaaggatggaaagtcatagaaaacaaaaagaatagtaagccaattaaagaactggactgaaactcaacaaaaagaatagtaagcccactaaagaactgaagtgtataccccctcccctctcctcccctcccttcccctcccctcccttcccctcccttccccttcccttcccctctcttccccctccccttcccctctcctccccctctcctcccctctcctccccctctcctcccctcccctcccctcccctcccctcttttcctgtcttctggtgccaatggagtctatattctaatgtctgtcttagataccttgtatttattttcctaactgtaattgtgggttacttttttgcaagatatgttgttttgaggaggaaaaaaagcacgagtactttttttttttcttattttgagcgggagtctcgcgctgtcaaccaggctggcgatctcggctcacagcaggctccgcctcccgggttcactccattctcctgcctcagcctcccaagtagctgggactataggcacccgccaccatgcctggctaatttttgtatttttagtagagatggggtttcgctgtgttagccaggatggtctcgatctcctgacctcgtgatccgcccagctcaacctcccaaagtgctgggattacaggcgtgagccactacgcacggccgcatgagtacttttaaatatagaaagcagcatttattaattttgcacagcaataagaattttctcatagtccacccagcttgatagagacagcatagtacagggttttgaaataaaccaggtttatttcccagtttcaccatttactagctgtgtaactttgagtaggttgattagcttccaagcctcaatttgtacttgtgtgaagtggggataatagatgcatagtacctaacaccaagtaggtgttcaataaatggtatataataggattagtttttgataataatttttttagataatcaggattccaacttaactacgcagtcatgtgtgtttccttattcttcagtgttttccaggagagatgaatgtataagttctttgaatatctttaccctagtgtgagtttattgtgatctgctgtttttatagctaaataaattagttcatttgtcgttacaggagatatattgctctaagtacctaataagactttagttgtaacttgcatagtgttttattaatgtcaatgcttctggctttttaagaaagtttaattatgtgaaaatgagacttaaaatttgtgtgcttagagtaaaatatgaatgcatttttcttcaggcattttaaattatacctgacatcaagtactgaacgtttttcacaaaatttcaaggtcgtggtggtggatggtaaaaacgaaagcgagtacactgtaaaatggcaggacttcttcactggacacgtggttggttagtatggagcttgttggtttgcccctgtgtctggtgtattaggtctccaaatctaacttgattgcatattcttttctggtgcaggatagtggggacggggtgtcatagaagtgctattctttgacttttctttgaggtatataagtttagaggcaggaacattctaatagaaggaaatgagtattatctaaatgtcatactagctggctggtttaatgattaaaattaaattcttcttaagtgataggaatttaacctttcttttcctcagtgactgtaagctttctttatgatattttaaacagggaagcttggagataaaatacttggtgatcctattacgtatgtatttgagaaaatttatcaaacaagcaattgcagtttactttttgacctttttctgcaatgagaaaaaaaaatgtcattgaaatccacaaatagtatagttcctaggcctgtacattctaaatcatgctttctgtctctcttagttcttcctttacctagaagtagataaaattattccagaagaaaatcttagcagttttgtttgttttgggaaagggataggtttcaagtgactaaacttgaggctaccccttaggagttgagattatctagcttctttctggagcctttgtttcttgttttgcagagctctcacagtactaggcaaattccaccctgaaggatttaatttttattgagagtaatgcatagtttcttatttgatgtaagtatttttaaataataattttttttttctcttaaggtgagcctgactctagggttctagcccacataagagatgatgatgttataatcagaatcaacacagatggggccgaatataacatagaggtaaatttatatgtgaattttttttcagtagcttatatctctgattttcaaaaagctgctcagttctgcaaaggtgaaaagtaattatacttatttctttcctcttcgtatttgaagttttttactaggaaagtagactttttaaaaaaggataatctctaagaagctgtgttatgatacaccctgtatttctaagtaccataattgagagagttacatgtgggatggataataggaagagaaaactttctttccctcctgactcattttttaattctttctcaaataataaatgtaaacatcctcagaaatgaaaagtgaagtattatttttcaatttctctgtttttctgctagacacactggaaatgctagatcaatgaaaggtggtagttcatagtctgagaagttaaagaggaagctaggaaagtcaggctgtggtcactcttccattgaaagagtagcaatagaaatcaagaccacagtggctgcattggttaagacacatatctatctgtcagatattagtctacaaaacaaaacgtttcctcataattgtgaattgaagttgattctgtgtttcctgaaaaatgagaagactctgggtggtggtggtgatatcactaaaatagatcacctgtgggaaaactgagtaagattggtcaaaatgaaatgttcaggtgtatttgagtgcttaataggggtaaaacagtctgctggagctatatatactatatgttttaattatatccaatctacatgactgttagtcctttgactgtccattattgtgaaaaagaaacctatggccttgcagtatgttatagtttgttaatgtttaagctatttaatgtcaatgttttgaggagtctggcctaccagaaagagtcagaaatttagtagaaagtaaaggaactaatattataaatgcattcattctagaataggcaaagcatcactggaatgtcttaaatttgcctgttctttcaaatcaatttattttttaagaatacctttattttaaaatatatgctcattgcaaaattcggaaaatagattatctgtacttggacagataactactattgacattttgacagacatccttccaaatttttttttctatgtgtaaatacacaaataaatatagttatacccactattttttcctgcaaaactaggaccatacaatatgtacagtttgtcttcacacatttttcgtttaacaatatgattatgaaccttttcgtgttaatatagatctaaattagggttttgtttgtttgtttgtttgttttttgagacggagtcttgctctgtcacccaggctagagtgcaatggcgtgatcttggctcactataacctctgcctccccggttcaggcgattctcctgccttagcctcccaagtagctgggactgcaggtgtgcgccatgatgtccggctaattttttttcttttttttgagatggagtatcactctgtcactcaggctagagtgcactggcgtggtctcggctcactgcaacctctggctcctgggttcaggcggttctcccgccttagacccttgagtagctcagactacaggcacatgctacctcacctggctaatttttgtatttttagtagagacggggtttcaccatgttggccaggatggtctcgatctcctgacctcatgatctgccagcctcggcctctgaaaagtgctgggattataggcgtgagccactgtgcctggcctcaactgttttgtttctaacttttgaaataaaaggtattgtagtgaacagccttgggcacaccttttggtgcatgtgtttagttggaatagtctggatgataggtaatagtctgggaagttaaatgaagaaactgtaggaagctctgtctaggctgtgcgagggcttcagataaactcccatagctgagtagcttaacacaagcaaagttttttcttactctcctgtggcttgatgtgggttaggtggttctcctctactttgtggctttgacttttggacacatgtcctctgtagttctcacagaaagaaaacagagctagagaattatacaggatattaagggccaggcttggaaatggccttccgttcaatacattctagaacactttatctctgacctgctacaaaggagaatggaaaagatagtcgtaatttgagctcagaaagagaaaatagtgtggtaaatgcacagcattgtttttgctgcagtgcatatgtctgcttatttccttagaataatttattcttttttgtttttttgagactgagtctcactctgttaccaggctggagtgcagtggcgtgatctcagctcactgcagactctgcctcctgggttcaagccattctcctgcctcagcctcccgagtagctgggattacaggtgcgcaccaccacacccagctaatttttgtatttttggtagagacagggtttcacaatgttggccaggatggtctcgatctcctgacctcatgatctgccagcctcggcctctgaaagtgctgagattaaaggcgtgagccactgtgcctggccagcttattaattcttaagccaaaatatgtgtctttaggatccaagttaaatttgctcagattacatttttttttttttaagatggcatctcgccctgtcacccagactggagtgcaatggcgcgatctcggctcaccacatcctctgcctcccaggttaaagcgattctcctgcctcagtcccttgagtagctggaattacaggcgtgtgccaccatgccccgttaatttttgtagttttagtagagatggggtttcactgtgttggccaggctggtcttgaactcctgacctcgtgatctgcccatcttggcctcccaaagtgctgagattataggcatgagccaccacgcccagctagattactcatttttttcaaatacttccttttggaaaaataggaattctgtttccatccatacctttgtttcactaagtacaaaaatgagtataactaatatttcattgtaagatatttacttagccaggcacagtggctcacacttgtaatcagcactttgggaggctgaggcgggtggactgcttgagcccaggaatttgagaccagcccaggcaatatagggagaccttgtctctactcctccacaaaaaaaaaaaaaaaaaaaaaattagctgggcatggtggcacatgcctgtggtctcagctacttagaatgctgaagcagtaggatcagttgaattcggaaggcggagactgcagtgagctgagattgtactgctgcactccagcctgggtgacagagcgagaccctatctcacacatacacacacacaaagatgtttacttacaagtatactcatcagataccttgagggacttttgcatgaaattaataatgtttattgaaaaaatgatttactacttacaggggtgattttcatactctttataattcttttgatacttttatagttcataagtgtggtgattggctgttcacacacacatatgagatgtaccaccctagaaccttgttacaatgttagcacattaccagtctgacatgaaaaaaaataattctttacacttaccttgatgcaaaaacattgtctatctgcactaatatcttaggaatataagtgagcaggaaaaaatatatatcttatttttaacacatcatcattaaatattttgtttatgacagtcttacttggtcactcaggctgaagtgcagtggtgccatcatagctcactgcagccttgacctcctgggctcaaacaatccctcttttctgcctcctgagtagctgggactacaggtgcatgccaccatgcccaactaatttgttaaatttttgtagagtgtatcagatttttgatgaggtctcactgtgttgcccaggctgatctcaaatgtctgactgtaagcaatcctcttgcttggcctcccaaagtgctgggattacaggtgtgagccactgtgcgcagccgttaaatattttaaaccgtcactgactttaccatagcttactatttatataaataatcctgggttaaacttgcatagtgagataatatttcccccaacttttatttatttatttgagatggagtcttgctctgtcgcccaggctggagtgcagtggcgcaatctcggctcactgcagtctccgcctcccaggttcaagcatttctcctgcctcagcctcccaagtagctgggattacaggcacacgccactgtgcccggctagtttttatatttttggtagagacagggttttgccacgttggccaggctggtcttgaactcctggtctcaggtgatccacccgcgtcggcctcccaaggtgctgggattacaggcatgagccactgcatccggcctaatttttgtatttttagtagagacggggtttcaccatgttagtgaggctggtcttgaacttctgaccttgtgatctgcccacctcggcctcccaaagtgctgggatgacagacgtgagccaccatgcttggcctcccccagcttctagttttaaaaatgttcagctggtgcagtggctcatgcctgtcatcccagcactttgggaagctgaggtgggtggatcacttcaggccaggagttcgaggccagcctggccaacatggtgaaacctcgtctctactaaaaatacaaaaattagccaggcttggtggcttgcgcccgtaatcccaactgctcgggaggcctaggtgggagaatcgcttgaacctgggagacagaggttgcagtgagctgagatcgctccactgtactccaatgtgggtgacagggtgaaactctgtctcagaaaaaaataaaaaagaaaatgtgcaaatctacagaaagattaaaaagtaccctgtagttacagaaagatttttttaaaaaataccctgtagcccttaaacaatttctaacataatgtcctgttagctttctctctttttttcgtgaatcatatgaaaatcatttgcaaacatcatgacccttcacccctaaatacttctgtatgcatccttaggaataaaggcactcttttctatagctgtaataaaagtaacatacctgagaaaatgacaagaattctacaatattatctaataatcatgccatagtcaaaatctctagtcatcctcaaaatctcctttgtagattttttttggttttccagtccaggatccaatccagttttctgccttttagtcaattactcatcaaattattttttccagcaacttactagtaataatggtaatagccttagcttttattaataacaaccacttttcttttgaaatgttaatataaaactagatttattacctacataatcttcataatcttcaagttaggtattatcactactttacctaatgagggaggttatgctcagggtacttgtccaaggcacatagtgaggtatggttgaggtttgaactcagatatatctgatcccaaagccagctgtctttttctgtgctggactgactatactaggaaacaatcaatgtgaacttagaaatgtttgacccaaaagaaaaaaaatttcactcctattcataggctaaatgaactttactaaatatggaagattcctgtagcccggaagttgggttagttaacttttgagatctctgccaaccctgaaattctgtaacccttgtttcttacatctgcctcatacatggattaccaaagatgtatatgcatataatatttaacagttttattgagataaaattcacatactatattattcacccacttaatgtatacaattttgtagttttgtgtgtgtgtgtgtgtgtgtgtatttttgagatggagtctcactctgtcacccaggctggagtgcagtggcacgatcactgcaacctctgcctcctgggttcaagtgattctgtggcctcagcctgttgagtagctgggattacaggcgcccaccaccatgcccggctgatttttgtgtttcagtagagatggggtttcaccgtgttggtcaggctgttctcgaactcctggactcaagttatctgcccaccatggcctccccaaagtgctgagattacaggcgtgagccatcgcgcccggcagttttcgtatattgatggagttgtgcaaacaccacctcattcaattttagaacatttttatcacctgaaaaagaaacgctgtatcctttagccatacttcccccttcctccctaactcccccagctctaggcaaccagggatctactgtctatttagatttgtctgtttgggtcatctcatataaatggaattacataacatgtcttttgtgtgtggcttcaatttttttatttttttgagatggagtcttgctctgtcacccaggctggagtgcagtggcatgatctcagctcactgcaacttttgcctcctgggttcaactgattctcttgcctcagcctcccaggtagctgggattacaggctcctgccaccatgcctgactaatttttgtattttttactagagtcggggtttcactatgttggccaggctgttctcaaactcctgacctcaagtgatccacctgcctcggcctcccgaagtgctgggattaaagacatgagccaccacgcccagcctgtgtgtggcttctttcacttagaataatgtttccaaggttcatctgtgttgtagcatgtatctgtatcttatttatttttattgctgaatagtattccattgtatggataaactgcattttgtttattcattgattagttgttgatggacatttgggttgtttccactttttagctatatttacattactgcttgtgttttcatttctcttggttatatactaggagcagaattgctgggtcatatggtacttctacttttaacctttgaggacctgccagactgttttctaaagtggttttaccattttacattctcatcagcatatgtgagggttctggatttctctacatcctcaccagtatttgtctttgatcatagtcatcctagtgggtatacaggggtgtctcattgtgggggtttttttccccattggggttttgatttgcatttccctgatggagataaatatattttttgtgtgtccccccacaaactgcctggttctgatgagaccagtgttcttacagagaataactttgctttgaaacaaaacaaacaaacagccttttgacttgggtaacctttggagtatgttaattgtgatttactctggccttgtaacattgtaagtggagattttgtttaaaaactgcgttcgctgaaacaagtaataaggttcagacctattgttacaagttctgagttttctttcatataaatatgtttgttcttttgtgtggataaaacctaacgtggcaaaaaggtgtcaaacacctaagtattaaggaaactaaaatgaaaatgctgcatgaacagaaaccttgtccaattttcattactatagcaccatcacctataacagtgccagtgtacagtagatattacataatatttttgaatgaatgagtggaaaatgatatgcatttttctcttctgcatcctctgaaagatttcacaacgtgcaaagtatgtaaggctttatttatatacagataaaataatcagagtttataatctatgtatttactttcctgcatagaaactccatatgattaaaaattgagattatttattttaataacatgactaatcagtttacttaacctagaaatgaatgttatctaagaacaagcaaagaatgttagaagaatttagtgtttaggaattattattgttttccatctcagtcgtatatattttctgttttagccactttggagatttgttaatgataccaaagacaaaagaatgttagtttataaatctgaagatatcaagaatgtttcacgtttgcagtctccaaaagtgtgtggttatttaaaagtggataatgaagagttgctcccaaaagggttagtagacagagaaccacctgaaggtaagacttaaagagtgtatttcaaataagaaacaaacatactacaattgacttcagtaggggtggttgttatttgttaaaaaataacatgattgtcaagtaactatagtatttggcatgaaaataagaggtttgttccagaaattttcatcttcttttgtttataatgtaagagttgaaaactctggaaaataatgggaacaacagagattagactttaaaaaagattagggaaaagggaaatggagtgatctgagggaaaatattcctgcagatatttagaaatgataaaataatatggtggaaagacaatctttagagtttataagaaattaattggtagtaggagggacctatatatatactgcttagaatacaagaaggttatatccatcttgggacaatccatttagggtcatttaaaaaacgtaaccatcttggaattttactgcccaaaacacctctggttaggttttttgttttgttttgttttgttttgtttgcagcgcgatctcggctcactgcaacctttgacttccaggttcaggtgattctcctgcctcagactcctgagtagctggattataggcatgtgccaccaggcctggctaatttttgtatttttagtggagatggggtttcaccatgttggtcaggctgttctcaaactcctggcctcaagtgatctgcccacctcagcctcccaaagtgttgggattacaggcgtgcaccaacatgcccggccaaagacggttatgttattaaaattatatattagcattttaatatataaataaagaaattcttaatttatttcacaagaaagttgtcctattaaactaattttcaatgtgaatatcttgacatttttactgttacattggttaattcataaacttcttgttgtagaatatgactgacagcttcatagcccagcattaggtgactgttttactctgttgagcactatttatttatttatttatttagagatgaagtctcacttttgtcgccctggcttgagtgcaatggcacaatcttggctcactgcaacctccgcaccctgggttgaagtgattctcctgcctcagccttacaagtagctgggattacaggcgggtgccaccatatctggctaatttttgtatttttaatagagatggggtttcatcatgttggccaggctggtctcgaactcccgtcctcaggtgattcacccaccttggcctcgcaaagtgctgggattacaggcctgagccaacatgcccggccttactctgttgagcactttttaaagtttctgtattggaaaaattaaagaggcacttgtccttggttttgaattctacagtgttttaactttatgttacttttcacttttctgtcttcctccaaattattttttgttgttgttcagaatcctttagtgatattaagctcacataatgtttgtttcaaaaatatgttagatttaaagtgttaccataaaactccttgttttggtgaattttgatttaatagtgcatacaaattcatattagagcttgttcatcgagtgaaaagaagagctgacccagatcccatgaagaacacgtgtaaattattggtggtagcagatcatcgcttctacagatacatgggcagaggggaagagagtacaactacaaattacttagtaagtatttgatattgcatcgagtaattgaaaaaaaaatttgggtgggtacattccatgaaacttaatgcaaccagatctgttccagatactctgttatttccctaaaatatttgagggatattctctgaggtttttatgttactgtatggaaattatagtttcaaatttgtgacaacccattttacccttgaactaatattttctgcatgttagaatttatgcatatagggtttgggagaggttataatgtagtccttcctccttgatataagtgagttctttaaaaacatcactgctatcatggtagtgaacctgtggtgtcacatgtgaatgtaaaaatatgtatttgcatgaacccatgtttttcttttgcttatatgtatatttcagagaggaaggcgagttttgtttgtcatgttaaagacctaatcattggacttcacttgaaataggtgggactttcatggtcataactagttctagggcacagaagtgaaggaaagatgtaagaagtgatgatactggatttttaagtatgaactattatgatttttgaagtctggggaatcatttttcattgacattttttgctagtgtgacttcattcgtcatgattacttggcactgaccaaaatgttgttactgagggaataatggagaatgcagctattcatgaagcaagaagaagctggtgcagtaaagatgtctttctcattgccttgcttttcccatgctgtccattttattcataccctcccaacttctttcccttccctttcatgtcaagtggatttttttttttttttttcaacacagagtctcactgtgtcgcccaggctggagtgcagtggcacaatctcagctcactgcaacccccacctcctgggttcaagcaattctcctgcctcagcatcacaagtagctggaattacaggcgtgaaccacagcactcggccccatatcaagtgaatttattatgaggctagtaagagtcactgtgattcttgttcctaaataagagagatttttactttaaaaagcttctctcttaatctgggttttatattaaggggctcctcttattttacttctttgttcattgcactataaatatgaatataatgagagatctagtcttaaaaattgtatttttttacaacttcttaggcataacttgtttcacagttgctagaacaaacctcatcaacccagtttttgaacagtagaatattctctttgagaaaaagataggtaattagcattttgttctttctcatgtcattttccttggaaactatactgccttccttctccagttttcccaaatcagagaacaaaagaaggagggttgctgaaatgaaccttgttctttctggctgtcttcttacccattcctcagtgctgaactttttggggtgagagtgggggaatagggttggcagttgtctgccacggccccttacttgtttctggggaagacattcgaggtactcaccaagagatagagtgaagatggaattctttttagaagggaatacagttgacccaggaacagtgcgggggtgtggttagaagcactgaccttcttccctctgcagtcgaaaatcctcacgtgactttttttttttaaggctctgtcgcccaggccggagtgcagtggtgaaatcatagcttgctgcagcctctattgcccgggccaaagcaatcttcccacctcagcctcctctagctgggacaacaggtgttcacccttcctggctaagttttttgatttttagtagagatggagaatttcccaggatggtctcaaacttctaagcttaagcaatcctcctgcctcagcctcccaaggtgctgggattacaggcatgagccactatgcccggccactgtataactttgattctccaaaaatttaactactaatagtctactgttgaccagaagccttaccaataaaataagttgattaacacatttttaaaatatgtattattactgtgttcttacaatcaagtaagctagagaaaggaaaatgttatgatgaaaatcataaaaaaaaaaaaaagcccggcatggtggtgtgtgcctgtagtcttctgttactcaggaggctgaggtgagaggattgcttgagtccagaaattcaggctgtagtgagctatgatcgtgccgctgtactgcacccctggtgacagagcaagaccttgtctcttgaaaaaaaaaaaagaaaatcataaggaagagaaaaatacatttactattcactaagtggaagtggatcatcataatggtcttcatgttgagtaggctgaggaggaagaggaagagttgatcatattgtctctggtgacagaggctcaaggaaatccatatgtaagtggacacttgaagttcaaatctgttgttcaagggtcaactgtatttcaggtatactgattgacttttaaatttaatttttattattggctgaaacggtagttttaaaaaagcctgttacttgtcattttggttccatgtgcaattgagtacctgaaatttaggttaaactataccattgttttattctggtaacagcactttaagtttggggccaaaggttgggaatactctgatacagtaacatctcaatgctagtttttgcgaaagtagaaacttttgcaatggcctctaaactgagattttttctttccccatagattttatattgcattgccaggagaggtaaagagttacataatgtcttttttcttttttaaatacacacagatagagctaattgacagagttgatgacatctatcggaacacttcatgggataatgcaggttttaaaggctatggaatacagatagagcaggtatttatcaatagatatggcttatattacttaagttttgtaatgtaaatatttgtcacttgtattcaaaacctaaaaacttgtccttaacaataattgtaaataagttttctcagatgccaatgattttttatgatgaattgtgcagtatttttgatgttaattagttctagattgtgaagttttctgtccttagtctcgctttaggtagaaagccttttatgctgctgtgctttgttccttctttgaattcatggcctttatattctctgtagttttcttcccccctccgattatgcttaagtctttagttaaaactctggcatgcaccattgaatccttagtcagaaaatttactaaaaaatactgtgtacctttgcaaggctgtatttatatatacagaacctttaggttctttcctctcagatatctccttctgatttcttgtaatctgttaacagagtgtgtctagtaatgttatattaatgtcatcttaataatagctcatattaaaagttatttcaaattgctaggactaattaaaaaggcttctgacaaagggtattgctttgggcagagagacattttgatatgtaaattatataaattgttatctctatttttttccaagctttttgtagtaaaccatatttttataagttatatagtatagaatttagaggttgaaaaaatttttaaaaatcattcaccatgtttataaatgttaaactttgatattacttgtataaaactaagagaattatttttcccttttcattctctttcactgttacgcattttctttttaagttattatttgaataggtaacatgtacacagtacaaaagccagtgaaaagtaagtctctgcagcctgtttattgtcaaaccagttcctttccccaaagacattcatgtcactagtttcatatgtatctttctagagatgtcgtatgcaggtatagtgtatgtatatgtctgtatttgacacaacggtgctatgcagtacacttttacaccttgctttttcatttcacagtatgttggagagtacttcatgttcatgcatgtaaagctgcttcacttgttttattataaatagctgcatcatgtttgagtttcagggaacctgtaaattttctttttgctttaggcatttggaaccagtcgaagaaacaggaataatataggagattaaaacattaacttctttacatctgatgaaggatggattggagggtgtggtttagatgtgtatcatggtgggcttctaagtagttctatcccagatttgaccttgaccagccaccatcaaaactgcagagtccaccccagtaaacttaccacacagtggcagaggagaccagaatgggccttctctgcaggcaggcaggcaggcaggcaggcagagagactcacagaaactctgagctgagcatggtttccttctttatctcacacttactaatgggagcctttgttacttttttttttcttctttgcaggtttaatatgaatttgtctgaaatgcctgtataaggagaagactctattcttagccttttattcctttgatgcacaaagagatgtatattttattattctttcctgagttgtcgactgtagtcgtaataaatattttaggctcctgtaacccaagttcttattttttcaaaataaacatggaggatatgaaaatttaagagtacatttataatattataaataattcattgacatatgttttccataccatatgcttctctgtttgtttcaaacattgaatattggtactgaagaatttatgaattttggttttaaaatgttttttttctagaacgattctttttttgaacagataaaataatgcagtattcagagccttctgacttattttggaagtgttctaagtatatgatctctttaagtatagattcgcattctcaagtctccacaagaggtaaaacctggtgaaaagcactacaacatggcaaaaagttacccaaatgaagaaaaggatgcttgggatgtgaagatgttgctagaggtaggtcttagaatcctggatatggtgctaacaccactttgtcatttctgatatgtggattgtatgtgttttaatgaaggagcatgttagaaaagatggacacccagaagcagtctcctccagctgatccagcagtaaccccatcccatgtagcagcatagacaacaaataacaaaaactctatgaaaaagaaaaacgctataaagcaatgcttccttttttttttttttttttttttgagacagagtttcactcttgttgccctggctggagggcaatggcgtgatcttggctcaccgcaacctccatctcccaggttcaagagattctcctgcctcagcctcccaagtagctaggattataggcatgcaccaccacggccggctaatttttgtatttttagtagagacagggtttctccatgttggtcaggctggtcttgaactcccgacctcagatgatccgtctgcctcggcctcccaaagtgctgggattacaagtgtgagccaccatgcccggccaaagcagtgcgtcttaaccttaatatctttgaggatctaatgagacaatcagtggatcttctctagaaaataacatggatacccaatatatagagtttttgcacactgtttcattagttctgcacacttagttcagctctctctgaagcttatcaatttatcttttagggcagtaattatcaaacaggttatgaacatgtattggagagtagaaatatagcttggagatctgaaagttctctacaggaatttaaaatttttgtgtttttattctggcgattaatctaaagatggctaacttaatcattttatgtcatttggagtcttgccgtataacagggtgctgccatgtgattccagtgtcttgagtttgtgtgtgctattactttggtgtagaatgactttatatgaagcgatagtttttatcttttaatgtgttggcaagtttattagtttcttgttgttgctttaattatcacaagtggagcagcttagaacaacacttatttatcccatagtttgcatgggctagtccaggtatggtgtggctcatctggattcttgtttagggtctcatgaggctgaaatcaagttttcaaagcttcaatagaattaaaggatattataactattcatccagatggagaagcataatgtgcagcacctgtgtggtactcattcataccttgtctaatttgatctgctgagcaccctgagaggttggttgagacagcatccttgtgaggaggctcagcaagtgttactgtttattccagctgacatgacaaagcagcataggctgggggacttaaacaacagaagtttgggttttcacagttctggaagctggaagtccaaaatcaaggggtcagcagggttgatttcttctgaggccaaggtacttgtggtgtagatgctgtcttctccctgtgttctcacatggtccttccctcagtgtgtgtgtatattctgatctccttatcaggacaccagccatattggattaaggcccacccatatgacctcagtgtaccttaattacctccttaagggccctgtttccagatagagtcacattctggggtactgttgagggttaggacttcaacatttgaattgtggggtggcacaattcagccagtagcaggaagattaaatgacttgtctgattagtcatacaactggtgatggcagaggttgaattgagcacagatctcctgactcctagaacagctgaaccactgcgcctgtctgcttttctgtgagcctccagacagcccatggcaggggaggaaccaaagagaaaaatgacttatgttgacagatggtcctctccagttttcttccctaagcctcctagaatattcttagaagcctcatccttttaccacggaactatcagaatccccatgtaaccacacttcattcctcatatagggctctctggcctctcatttaaagcattttaaacattgagggttttggctaggcatggtggttcatgcctgtaatcccagcactttgggaggctgaggatgaggcagtggattgtttgagcccaggagttcaaggctagcttgggcaacatgttgtacaaaaaatacaaaaattagccgggcatggtgaggcacgcctttggtaccagcttcttgggaggctgaggtgggaggttcacttgagcctgggaggtcgaggctgcagtgagctgtgattgcgtcactgcattccagcctaggtgacacagcgagaccctgtctcaagcaaaataaatcaaaccccccccccaaattaaggtttttttaaacttggagacgctggacggttatggtagaggtttttaaagtaatgtatgaagcccttttaaattaagaaaaaaaaaatcctctcaaacctgcagtgttgatttaaatggatgtaaaatctttattttagtaacataaaactgggtatgtatgcttttctataagtgtatatttatataaatgacaatatattatgaagctcaaaaaagtttaagattaaaatttctataaaaccaattgaatccttgaaatacttgagagggatctgttttggcctggagtgctgcaatccccttatcgaattggagcatctctagtcctgggctgtatgtcttcagaacagccctcggaggagcagtgagttagttctgaagagctggagcaagctcccgaactattcccttttgtgtcccttgtcagatgacagtgtgtgcctctcacctgtgcaggtggagaagcactttagggaaagagcaaagcactgcacgaggttgtgattgctggtgctgagctgcatgccatcatagttctgttctggaatgtttagttgatttagattacatcttttagtctgatgtaattgttaatctaagaatgcttttttttttttttttttttttggtctttcaaagcaatttagctttgatatagctgaggaagcatctaaagtttgcttggcacaccttttcacataccaagattttgatatgggaactcttggattagcttatgttggctctcccagagcaaacagccatggaggtgtttgtccaaagggtaagtttttccatttcttgtgtgaatatgctgctgggattattaagatgattggattatattataattctgtatttaataagcaatttatctctgtttccttttgactttagcttattatagcccagttgggaagaaaaatatctatttgaatagtggtttgacgagcacaaagaattatggtaaaaccatccttacaaaggtatgttcttttatttctaaaagaatagtgttagagtttattgtagtagaacctcagttatatatttatgtaggtatttttttaaaaaatgtaatatatactgttttttaaatttctgcctaaataaaatttatgtatttttgtgggatatatgaaaattaaagcataaagaagaaaataaaaatggcctgtcagccttcttttgaaacatgtgaggaccactgcttttctcgaaccctctgtcctggacccctctgacctgcagcaactcttagagctccctgtctcctagtcctgcagtgcagctgtcattcaaggcatcccacaccctcttattttcagaaccccatggtctccctctttctcagtgccatcattttggtgtagtgtatcttgcaggagcttcctaagaaaacgtagatgacctgcatattgttgggatttcatatatctgaaaatgtctttattccactcttaagcctgattgataattttggctgagtatattcttagttctcatgttctctatggtcttctgtgcatgttgcttctaaagaatctgaagtcattttgagttcttatctttgtttgtcacctgtttttttctctggaatatcttaagatcttgtttttctccagctatgtctgttaaaatgtgtttgactacaaataacagaaaattaaataagcagtggtttaaataaggggtttatttgtctcagtcaacaagaagttcagggatagcattttctgggtggtacagcaactcagaggtaccctcagtggctcaagaacaagcaggaagtctttgtcctcatggatgtcacctcatggttttaagatggttctcttctgtgttggagaaaggaggagaaagagaacatggctagcctagtctggcccttctaaaaagcttctctggaggccccatcctggcttttgtttatatgttactggacagcactgggtcccgtggctgcccttagcctcaacggaatgtggaaagctggctattttagctgagtatattgctgtcctgggcaaaattagggctcattaagtaaggaagaaggggagagagatgttggtaggacatattagtatctgatatactgatttttaatttttatttaatttttattttttttgagacagagtcttgctctgtggcccagtctggagggcagtggcaccatcttggctcactgtaacctctgccttctgggttcaagcagttctcctgcttcaacctcctgagtagttgggattacaagcacctgtcaccacgcctggctaatttttgtatttttgttttagagacagggtttcaccatgttggccaggctggtctcatgaacccctgacctcaagtgatccactcaccttggcttcctaaagggctggttggtatactgattttttgactatgatgttatacttggtgtagggtatgggaaaacatttgcaaaagacacatctgagaaaagactgctatctgaaatatacaaagaggccgggcatggtggctcattcctataatcttcggcactttgggaggccgaggcaggagaatcacttgagcccaggagtttgaaactaacctgggcaagatggtcagaccctgtctctacaaaattaaaaataaataaataaataaaaatttccatatgtataaagaactgttaaaattcaacaataagaaaatgaacaacctaatttaaaaacagacaaaagagcagaacagatacctccaaagatatacagatagcagagaagcatatgaaaagatgctcagcgtcatatgtcattaggaaattgcaaattaacaatgaagctggttgtaggggtacatgcctgtagtcccagttgcttgggaggctgaggtgggaggattgctcgagcccaggagtttgagacccatcctgggcaacattagtgagatcctatttctataaaaaactttaagaaacccaacaacaatgtgctattactagtagcttattagaatggctaaaatcccaaacactggcaacacaattccaacaaggctatggagcaacaggaactctcattaattgctagtgggaatgcaaaaatggaacagccactttggaaggcagttggcagtttcttttctttttcttttttcttttttttttttttttggagacggagtttcactcttgtcacccaggctggagtgcaatggcgccatctcggctcactgcaacctctgcctcccaggtttaagcaattctgcctcagtctcctgagtagctgggattacaggtgcccgctgccactcccagctaatttttgtatttttagtagagatggggtttcaccatgttgtccaggctggtctcgaactcctgacctcaggtgatccgcctgcttcagcctcccaaagtgctgggattacgggtgtgagccactacgcccagccataagaatgtttatggcagcttaattcataattgataaaacttggaagcaaccaagatatcctttagttggtaaatggataaactggcacatccataaaatgagaaaaaaataaaaagctattaagccatgaaaagacatagaggaaccttaaaagcatactactaagtaaaataagccagtctgaaaggctacatactatatgattccaaatatatgacattctagaaaagacaaaaccatgcagactataaaatgatcagtgattgctagatgctgggggagggagggatgaataggtggagagcagggtaattactctgtatgatacttcaacagtcagtataagacattatgcatttgttgaaacacatagaatatacagcacaaagagtggaccctaacataaactgtggactttgggtgatttaaaaacaggtggtggcaggagcctatagtcccagctacgcgggaggatcacttgaggccaagagttagaggctgtagtgtgataaatgcaactgtgaatacccgctacattccagcctgagcaacttagcgagatcctccttttcttttttgagatggagtctcgctgtgtctcccatgctggagtgcaatggcatgatcttggctcactgcaagctctgtctcctgggttcatgccattctcttgcctcagcctcccaagtagctgggactacaggcacccccaccaccacgcccggctaattttttgtatttttagtagagacggggtttcactgtgttagccaggatggtctcaatctcctgaccttgtgatctgcccgccttggcctcccaaagtgttggaattacaggcgtgagccaccgtgcctggcctgagaccctgtctctttttatttatatatatatatatatatatatatatatatatatatatatatatatatatttatattttaaatttaagttctaggatacatgtgcacaacgtgcaggtttgttacatatgtatacatgtgccatgttggtgtgctgcacccattaactcgtcatttacattaggtatatctcctaatgctatcccttcccccttccccctccccccaccccacgacaggcaccggtgtgtgatgttccccttcctgtgtccaagtgttctcattgttcaattcccacctttgagtgagaacatgcggtgtttggcttttgtccttgcgatagtttgctgagaatgatggtttccagcttcatccatgtccctacgaaggacatgaactcatccttttttatggctgcatagtattccatggtgtatatgtgccacattttcttaatccagtctatcattgttggacaatgttgaacaataatgtagagtggtatgagaaaagaaaaagacactaattagcttttgggaatcttttaatttctttttttcttttcttttttttttttttgagatggagttttctcttgttgcccaggctggagtgcaatggtgtgatcttggctcactgcaacctccgcctcccggattcaagcaattctcctgcctctttctcctgagcagctgggattacaggcatgcgccatcacgaccagctaattttgtatttttagtagagatggggtttcttcatgttggtcaggctggctctcaggtgatccgtctgcctcggcctcccaaactgctggattacaggcgtgagccaccgtgcttggccttaatttctaaatttatttttttcttatggtactttgttttaggggaaaaaatctctcaaactgtgttttccctctattctcacatcacaaccatcatcatcaacacagaagacttgtgtgaccagaccaaacgtgtggggatttccccctacatatcaagcagtagacatcagctaggtgtcctccaattcaattcaaacactctccacccggaaatagtatcagatctcacagtttgagggcccagtcccacaagactgactgttccctcctccccaccagttacaagtctgagcctccagaacttctgaccaactggcttcaagttggggtttccacattctcctctttgggtctgattaatttgcttaagtggctcacagaactcagggaaaagcttaacttagtttatgggtttattacataggatattttaaaggatacaaagaagctgggtgcggtggctcacgcctgtaatcccagcactttgggaggccgaggtgggtagatacctgaggtcaggagtttgagaccagcctgaccaacatggtgaaacctcgtctctactaaaaatacaaaaattagccaggtgtggtggtgcatgcctataatctcagccactcgggaggctgaggcaggagaagtgcttgaacctgggaggcagagattgcagtgagctgagattgcgccactgtactggtcaacagagggagtctttgtctcaaaaaataaaaaaaaaagaaaggatacaaagaaatagccaaatgaagggatacatagggcgaggtctggaagggtcccgagtacaggagcttctgtccccatggagttgggatgtacctccctcctggcacacgaatgagttttgcaccttcctgtcaacctccatgtattcaaaatgctctctggaagctctctgaatcctgttttttgagattttatggaggcttcattacataagcacgaatgacaactgtgtagaaatgtgattggacaaaatgggtatgttctcatactaaccgactgagtggggaagcccaccaaggcctgtccagattctccttgacctctctgtgcagcattcctccctccacagtaaagggcaggaccctctctagaatgagaatgagaatgaggatctctggacccacaatcagattagagtcttgccttggatcaggtaaaaggaggacaggagaaggtcagagagagagattctgtttcctgaggattgctcctgagccctaaagcaccccaacattataacagaagaccgtaaccagggctacggagggttgtaagccaggagccatggacagaaacatacatgtgtgtacagtagctcacgcttttacttttttggagtcacaacttcttaatggcttgatttcatgacatattttctttggtcttccagaactttcctcttaaaaaaacacagcaaaaaaacaaaatttgatttgaaatttttgagatttttttttaagagtcattagcaaatccactaatgaattttccccaagcagttaggagatatttctcttcattacacctttgggatttgagtgcttttgctaaaaatttaagttttttttcccactacggttttaatatgaacatgtggaaagacttcttgtatagaaaaatgacttgcaaaatattattttttcaggttctatggagtgatttcccccccttaggaaaaaagaactcaggaattttaagtttatatgtatatatatttattttattttattttatttatttattttaagacagactctcactcttttgcccaggctgggggttcagtggcctatctcggctcacagcaacctccgcctcctgggttcaagcaattcttctggctcagcctcccaaatagctgcgattacaggcgcccaccacaatgcctggctaggttttatatttttagtagagacagggtttcaccatgttggccagtctggtctggaactcctgacctcaagtgatccagctgccttggcctcccaaagtgctggaattccaggcgtgagccactgtgcctggcctttaagtttgatattttattcagataaatatggaaaaaaaattttagctttattggcaaaatttattattcatatagaaatcatctgataatctgatagattaagtacagccctgcaactggattctaataaaccaagtcctctaggtcattaagattgttattggacatgaattcagtcattgagaaaataaaacattgttttgttgttcctcagttgtggtttttgttttttttttaagatagagtttcactcttgttgcctaggctggagtgcaatggcatgatctcagctcactgcaacctccgcctcctgggttcaagtgattttcctgtctcagcctcccgagtagccgggattacaggcgtgcgccaccacacccagctaattttttgtatttttagtagagatggggttttactatgttggccaggctggtctcgaactcctgacctcaggcgatcaacccaccttggcctcccaaagtgctgggattacaggtgtgagccactgcgcctatccgtactgttttttttaccccttgctttttttttcctttctgctgagatgctttaggttttaacagacatgtgattgggccgaggggcatgtgaggaggctggacaattaactacagttagcttattgcatttatcagcaccagattgtgtgtggttgaaatggccaaggtttgatgttttgttatgaatgttccagtatatcttataaattacattttcttaaattgatttgttactacttacaataatgtttgatagtattaaataaaatcctacttattctgttaaattcatataattggtagaagaatcatagtccggttattactcttttttgagacaaagtcttactctgtcacccaggctggagtgcagtggtgtgatcatagatcactgtagcctcagcctcctgggttcaggtgatactctcacctcagcctcccaagtagctgggaccacaggtgtgcaccaccatgcctggctaatttttttttttttttttttgagacgaagtctcgccctgtctcccaggctggagtgcaatggcgtgatctcagctcactgcaacctccgccccctgggttcaagcagttctcctgcctcagcctcccgagtagttgagattacaggcgcgtgcctccatgcccagctaatttttgtatttttagtagagacagggtttcaccatgttggccaggctggtctcgaactcctgacctcgtgatccacctgcctcagcctcccaaagtgctgggattacaggcgtgagccaccatgcctagcccacctggttaatattttttattatttttgtagagatagggtctccctgtgttacccaggctggcctcaaactcctagagtaaagtaatcctcccatctcagcctcctaaagtgctggtattataagcatgcagttcttattctcttgttgatctgattataaggctctatttaagacagcataggcccaactggcagaagtaggtgatggctggatattgagaaataatgttttctttgcatgatccttaaggaagctgacctggttacaactcatgaattgggacataattttggagcagaacatgatccggatggtctagcagaatgtgccccgaatgaggaccagggagggaaatatgtcatgtatcccatagctgtgagtggcgatcacgagaacaataaggtatgtgtgtgtcgagaattttttatgtggtttggaaagaggctgtgtataatgatcataatgagagctcagaaacgtattccattcctaggcgtttccctagggatggatgtgcaaattacaaagtaccttgaaacgtggttgtgtgttttggggtgaagcacggttcatctaaatctggttaaaactatcatttggactttgttgtcaagcttaatggtgtagatttgagctctaggaaaaattactaataataatggctttttttggagttctggatttcagggtctggtgggctcaggctttatgttaaaaatttgtcatttcatttacaagttgtcattcattttaactctacaatttacatgtacagtttacacgtttttattaacttttgcagttaaacacatagtttgcctgactacaagcctcatgggagaaaggcccttccttgtctgtcttattcatagctctatcttattcatagctctatctccagtgcctagtaggagtatctggcatgtaacaaatatttgttgaataattaatggaatcatttactattgggggtttctgatagagaatactagttgatttgtgatactgtaaaacactttcagagactttaagagtgccgtgactaactcttagagtctgaactaaaagttgtgttaataaatatctggttctttcattttatttgaagttaaacagcataaagcagtgtgaggaaaacaatagttgcactgctgagttaaagagggtcggtggggagagcttaaaggagtctgattctaatcacaaaagattgtgaagtatttgtcctgactcctattttgagcttggctgtgggctaatgtgcaagccttccctggacacagagggcaagattacttctgcttttccctggctctgacaccctgctttctgaaatttctgcctcctgttctttttgtgatctttgattgttgcatctcatttttttttggctttttatgtatattttctgcatctcattttctttggctgttatgtgtaaacagttcctctgttactttgcatgttatgttttatttttcctctgcttgacaacttgtgccagagaaacatttttctacccctttttgtctactcttccaacctgtcaaactgttgaattttccttctcttttcatagtctctgcatttctaatcatgttcactatagttcagtgctgcccaatagaactttctgctgcggggcgggggatgttttgtgtctgctctgcccagtatagtagccactagcccagtggagcaattgaaatgtggctagaaactgaggaactgaattgtaaattctattttatttaaatttttaataatgtttgcctgtgatgggagacgggaatgggcattaactgtaaaaggacatgagtgagattactggaaggatggaaatgtcctaaaattgacttatagcaatggtttcaacacttggtaaagttattagaaatcactgagttatatacttgaaatggatcaattttgtgatatgtgaaatatgtcttaataaagttgttaataagccaacaaacaaaaacagcagtgtgggagcagaggaaaagtagcgcggatgtagaggagctgtgaagtcataagttgattattgttgaagctggtgaggggcacgggggcattcatgataccatcctgtctacttcatagatgcttgaatatttctgtaatagaaactgtaaaatatgtgactaggaacaaaatttaagtagccacatatggttggtggctaccatattgcatactgtttctctaagtaataggtcatatgcttcttggttatgaggatagtgtcagaacttgggagcaaaatgttttactttgcagactgcctgggtggacatgcatgctgctgactcttcctgctgccagttctggggctcttcaaaacagccctgtaagaacttgccagtgaggcatggtggctcacacctgtaatcccagcactttgagaggccgaggtgggcagatcacttgagcctaggagttcaggatcagcctggacaacatgtgaaactccatctctacagaaaatacaaaaattagctgggcatagaagcacatgcttgtagtcccagctactcaggaggctaaggtaggaggaacccggggagttcaaggcggcagtgagccaaggttgtgctactacactccagcctggatgacagagtgagactttatctcaaaaaaaggaaaaagaaaaaaaagaacttgctaatgagaatggggcctgggaagaactttttttttctggagctgccagtctgtatcaatgaagaacaatttatttattttgtcctgagcacatcatatttagtctgtgtttttctagtttggttgcccaagtaggagtccccttgtaagaagataatgtgcatcttctatgttttatttatttattattatttattatgattttttgagtggagtctcactctgtcgcccaggctggagtgcagtggtgtgatctctgctcactgcaacctccacctcccaggttcaagcgattctcctgccttagcctcctgagtagctggggttacaggtgcatgccaccacacctggccaatttttgtagttttagtaggatggggtttcaccatgttggccaggttggtcaactgactggtcaacaaactcctgacctcaggtgatccacctgcctcgacctctcaaagtgctgggattacaggcatgagctgctgtgcccagcctatgttttaaatgaattccttaataaaaatatttttaactgatgaaaagggcttacaggacaaaaataaagtagttccttgacctagaaagacagaacccatcaccctctactaggcaagcctatgaagagcagtttgccacaggtggacttctctgtggacagatgacattagtgaaaaggaatgtaggacctttgagattgtaacttcttaggaaggtttgctgaacggaagaggaagtcttatgacaaggatgcaaacagaagctgccagatcttcagggatgtgtaggcagaaagccagagttgcgggttggtccttttatcgttagtgctctccagctgcttgggagttgtaactctgacaaatcagtgaagaggtcttcttatctgttcactgtgaattttaactccattttaacctgataaaatggaacccagagatacatgatgttgatgaataaacccaccaaaatgacaactgcctgaggccccgattagaataaccagaccccttagacatctgtactgtaacgacagatttgggccgggcgcggtggctcacgcctgtaatcccagcactttggagaccgaggtgggcagatcatgaggtcaagagatcgagaccatcctggtcaacatggtgaaaccctgtttctacaaaaaatacaaaaattagctgggcgtggtggcatgcacctgtagtcctagctactcaggaggctgaggcagaagaatcacttgaacccgggaggcggaggttacaataagccaagattgtgcctctgtagtccagcctggtgacagagcaagactccatctaaaaaaaaaaaaaaaaaaaaaaaaaaacagatttgaagatgttttttaaaaagccagttagtatttctgtgtaagatgaggtctttgctatctttctgaaagtagctcctttggtgtctgatttggtggttacaggcacctttggagggtctcatacacttggctctcaggggcttcatgattgttgtctggggtgaaagtgaagccattttggcatctgcagagcactttggagaccccgacctaagaagtaactatgctcagttttccctaagcctcttctttttttgataacttcaggaggtctggaaaatgaccgcagttttagagctcctgataaaaccctcagccttaaaagggagttatcctagtggttctgtactccagggtgggaaggtagtgtagagactttttgagacactggtcttgctggttgatgaaaatgtttaggtaacaattggggatttaatttatataaaatgtactattatgcctattactaagctcaaatatttaaacaactttaaacttggatcatccatataagtagccaaagaaggagaagaaaccccttctcctgcatttctgaattgttttgtctgggacaacattaacctacagaggttcttaattcttgtcactgcatgagtggcatgcctgaggtgaggagatttcaagtctgatggagctacgagctctctgttgtgctattctgcttgtccttaagtgggctttgactgggatgtttggtctcagtatttgtatagcttgcttaccttcgtaagaagaattatagatccttaaccaagttcacatcagccatttagcattctatggagggaggttcccagttccatatcagtggcctttggaggagactgtggtggccttgccataactccagggtggctctgatggtggttttacattaagagtttgtctctagagaagacacaaacattgcatgggaatacatttttatgatattattttgggtccttattgccttttttctctcaagatgttttcaaactgcagtaaacaatcaatctataagaccattgaaagtaaggcccaggagtgttttcaagaacgcagcaataaagtttgtgggaactcgagggtggatgaaggagaagagtgtgatcctggcatcatgtatctgaacaacgacacctgctgcaacagcgactgcacgttgaaggaaggtgtccagtgcaggtgaggagtctctccacagggattttgggaagttggtataacaagatgtccaaaataagagaagactgaacttgcaggggctttagaatcaactgaaaggggtgtgagtgtgtttgtttacatctacctcttttgcccttcacagcaagaaattgctttctgggcctggcacggtggctcactcctgtcatcccagcactctgggaggctgaggtgggagaaatgcttgagaacagcctgggcaacatagtgagacactatctcttaaaaaacaaaaaacaaataagaaaagaagaagctttctggaaagcagtgtgacattatgtaacaaaatccttgaccttgcatgctccttggtttagcagtcctatagttaaaagaatcttttttttttttttttttcctgagacagagtcttgctctgtcgccaggctggagtgcagtggcgcgatcttggcttactgcaatctttgtctcccgggttcaagtgattcccctgccttagcctcctgagtagtgggactacaggcacgcaccaccatgcccggctaattttttgtattagtagagacgaggtttcactacggtggccaggatggtctccaactcctgaccttgtgatccatccaccttggcctcccaaagtgctgggattacaggtgtgaggcaccgtgcctggcaaaataatcttttttatttaatttaatttatttatttattttgagacggcgtctcgctctgttgccaggctggagtgcagtggcgcgatctcagcgcactgcaatctccgcctcccaggttcaagcgattcccctgcctcagcctccccaataactgggactacaggtacgcaccatcacgcctggctgattttttgtattttagtagagacggagttttagcatgttggccaggatggtctcgatctcctgacttcatgatctgcccaccttggcctcccaaagtgctgggattacagaggggagccaccgtgcctggcctttattttctttttgagacagggtctcagtctgttgcccaagatggagtgcagtggcatgatcatggctcactgcagcctcaacctcccaggctcaatcagtccttccacctcagcctcccggatagacaggactacaggtgtgtgccacctggctaattttttttgtattttttatagagatggggttttgccatgttgcccaagcttgttgtaaagtcctgggctcaagtgatccacccttctaagcctcctaaagtgtggagattctaggtatgaggcaccatgcctggcccaaataatcttttatttctttttttttttttttgagacggagtcttgctctgtcgcccaggctggagtgcagtggcgtgatcttggctcactgcaacctccgcctcctgggttcaagccattcccctgcctcagcctccccagtagctgggattacagtgtgcaccaccacgcccagctaatttttgtgtttttagtagagatggggtttcaccatgttggccaggctggtctcgaactcctgacttcgtgatctgcctgcctcagcctcccaaagtgttgggattacaggcgtgagccactgctcctggctgcccaaagaatcttttgggcaacagagataagatttaacaagggtataagatttaacaaggtttttttatggctacatcctaatagcaaaattttggaaacaatcaaaatgacagtcttgggatatgaatgttatcatgattctatatactggaatagtgtggaggaagtaggttacaagttagaaagttacccaggttttcattttttatatacactgatagaccagtgcctggcttagaagtaaaagggttaaacttcagttttctggtgaataattgagatttaactggatacagtgcatattaacgctgtaaatactgatggggagtagagttctggctgccgagtgtcttagctatggattgccttgtggccccaccttgtcttttttttttttccttgtctttttttttttttttgagagagtctcgccctgttgaccaggctggagtgcagtggcgcgatcttggctcaccgcaacctctgccttccaggttcaagctattctcctgccttagcctcccgagtagctgggattacaggcatgtagcaccatgcccggctaattttttgtatctttagtagagacggagtttcaccatgttggccaggctggtctcaaacccctaacctcgtggtccacctgcctcatcttttttttttttttttttttttttgagacagaatttctctcttgttgcctaggctggagtgcagtggtgcgatctcggctcactgcaacctctgtctccggggtccaggcgattctcctgcctcagccttctaagtagctgggattacaggagcgcaccaccacgcccagctaatttttgtatttttagtagagatggggtttcaccatgttggccaggctcatctcgaactctcctgacctcaggtgatccacccacctcggcctcccaaagtgttgggttgggattataggtgtgagccacctcgcccagcccatcttgtcttttttaaattaatgcgttaaatgaatgaaaaccaagggcaccaagatgtttcacaggtgattgctgtgttcccattcttttctcctatagtgtggcatttatgtgacctcacgcacattaggaagggacaaagtgtgtgcaggtagctctagcagcggagatgtctgatgatgtaggagtgggtgacggagccaggaggtcttccccggtgatcttcaggtcactgtaacgtaactgtagcgtttgatttgatatggggccataatttgaattgctctgttcctgtctgctgttcttctccagtgacaggaacagtccttgctgtaaaaactgtcagtttgagactgcccagaagaagtgccaggaggcgattaatgctacttgcaaaggcgtgtcctactgcacaggttcgtgttcttgttgcttccttggaatgctgtgggtcaagtgtgtgtgtgtctttgaaaaacaagattatgttttgttcagatgagagacaccttatttttaatctcatatgccgggttgagtttctggcactccttagtttgtgacacttggctttggtgggtttaagacctgtttctatttctctttcatttccatcactctcctctttctcctcacagacatccactctactgtggttaatatttgcctggatatgtgtatatccttgaaagatcatatagtgttattttgtgcatgtatgtgtttttaatgtgccaaaatgatattctaccttaaatttacttttaaaaaattcagtatcatgttttaaagaattacccatattgtgctacagataatataacaaggtttttaatggctacatcctaatagcaaaattttggaaacaatcaaaatgacaatcttgggataatgaatgttatcatgaatctatgcactggaatagtgtggaggaagcaggatacaagttagaagggtaaccagtttttctatatgtatctatatgtatttcactgttggggacacctacatattgtttagttatatgattggctgtgttttacttacaagtcaccaagtggtagctacttccattgccttcatccccttgatattccagataggacacagatcacatcctcctacgtcccttcaggaacctgtgtgtttctctgggtactgaggagtgtcattgtgtagtcacagaggcaggatgtgctggtctctagagcaccactgctaggttgcctgtgtctgaggactccttatcctgacgttctggccaacgcttggaattaccctgctgtcctattagcatgatgagtataaagtaatctcttgttcttacttttttttttaacagcccttgtcctaatgcacttacttacatttttcttgagcatctctttatatttttcagctattcagatttctcctgtgaatagccagttcatatatttggttcattttttaaaaattgggtttcatgttatttcactactgtgaatttggaggagttcttatgtaatcatccatttgggcatacgtctcctatctgttgccattctcagaacagaaatctttaacgtaatcaaatccatcattttgttgtgtgtgtgtattttttaaacacatggttcagaaaagccatggcggatggttaaaaagatattttccacagctgcttctattagcttcataagttgtccttttacattcaggacttgaatctttctggagctaacctttccaggtgtccagtatcttttgttcggtcaattgttgctttaaaaatttcaaagctatgttattactaggtatataaacggacatatctctacatctttatctgctgttccttaccagtatataatgttccttttttacccttgcgatgttttttgacttaaattgtcaaaaagcaatattcagtttgctattctagtttttttgttcctctgatatatctatctgtcccattcttatatttttcaaaatttgtctctcttggttggttggtttgattttgtaatagctttattgatacataattcacactcatgtagtttgcccatttaaagtgtacagtttaatgatttttagtatattcagatttatgcagtcatcacaattaattttagaacatttacattactccagaaagaaaccctgtatcctttagctatgatcctccaatccccccattccccacaactcagagcaaccactaaccaccctattctttatggagttgtctgttttgaacatttcatataaatggaattatacaatatggtttcgtgaccacatattgtatgactggcttctttcactgaacatagcatttttaaggttcatgtatgttgtagcatgtatcagtacttcatgtacttttattgctgggtaaattccattgcatggatatgccacattttgtttattcattcattggttgatagacatttgggttgcttccacttttttgctataacaaataatgctgctgtgaacatttatctatgagtttttgtgtggacagttcctttggatattattcaggaatagaatttctgggtcatgtggtaactatgcttaatcttttgaggagctgtcagactgttttccaaaatggctacaccattttacagtctcagcagcattgtatgagggtcccagcttctccatatcctcaccaacacttgttatcttttttattgtaactatcctaggttttgtgataaggatgcaaacagaaagctggaggtcttcagggacctagtgaatgaagttgtgtcctattttggcttgattttggttttccgtgtgcatagtatgacatgttgcccatgtttttatcttttgggatctgtcactatcacattactttgccaaatgttaggaacctgatggcccggcacagtggctcacacctgtaatcctagcactttgggaggccgaggtgggcagatcacgagatcaggagatcgagaccatcctggctaacacggtgaaaccctgtgtctactaaaagatacaaaaaattagctgggcgtggtggcgggcgcctgtagtcccagctacttgggaggctgaggcaggagaatggcgtgaacccgggaggcggagcttgcagtgagccgagatcacgccactgcactccagcctgggcaacagagcaagactccatctcaaaaaaaaaccaaaaaaacaaatgttaggaacctgaatatctaaatcaagctttaaagaagcatttgctagctatgctcaatgtttcatcttcactgtaataataaaatagattgagaaaaatgctttcttttaaataaacgtaagtaaaacaatttgaaaacgtttgttcttatcaaacagccttttgttcccttgatattttatacaaaat

SEQ ID NO: 15376 - DNA, 66146 bp, Homo sapiens
gcgggagggaaaagaggattgaggggctaggccgggcggatcccgtcctcccccgatgtgagcagttttccgaaaccccgtcaggcgaaggctgcccagagaggtggagtcggtagcggggccgggaacatgaggcagtctctcctattcctgaccagcgtggttcctttcgtgctggcgccgcgacctccggatgacccgggcttcggcccccaccagagactcggtaaagacccaggggagttggcttaggccggcgcctggagcgctcgtttgagggaagagcaggggagctgggtctatcaggtgtttgggggcggggtattggcgatggtggcgcgtccctaagttttcagtgtagaagggggtgtggctctcggagtttggggaaagaataaaggagatgggcctgtctctgagtgggaaagggctactggacgggctccatgtagtgactgagcgcctgagaggggtttgctccctagctttgtgttcggggagggtgttgggaaagcggtaaggagtagggtggctggatcttgtttggagagggagatgtggtcagggttcttgccttagtagggaacaaatctagtgttgtgtgttcctaccagagccagaaaggaagggcccaaagctccagaattcttcctggtcctcgaaggagggaactagaatttctgctgtaggaggtacttatgcagtaatctcgttgggaggcggagactggagttggagtcttaagagttgtgtttttgcgaacatcctaagcacgttcttggttatttcaattgtagcttattggaggtgcttgggagatggggggaggcggaaacctggtaagccaactcgtgatgctgccactatgaatgctttccttgcacttttaaacaaagaaattatcaagagtgacgagtttgatgaatttagaggctagaaagtagagggttcctatttcattagattttccagagagattggattttaaggatggagatgcattaagggatctgaactttggtggaagtaagtttgcgtgaacttttagtgtattttaaaatccttttatctttcaaaaattgacgtgtaagatactttaattagtaataaagtgtgaaataatgttttcccagtgtgtgaaattgtaggcttgcatggttgtactggttcccaaatttcaccatgataccatgtgtagtattttttttctttatatttagtggacagaaattgtaatggattggtatggatactaaaggtgttgagagtgttatcacttgaacagctgtcttatgattctttccgattgaaatggattacaagtgactaatgaaaggcaagggatcttgttaggaagtgctgagaagtggtaagtcagtacaaattgaaggacattttgaggtaggattgtggttaggatggagggatagggtaagggtcttcattttaaggataaatgttagtaaaaagaataaatatgtattttgagatattaaaattatatttgcaccaccctgacacaactgtttcacttatgttattaatctgttgttcgtaggtaaaaataagcatgagtcccaaggaagcatacagtttaaagagaaacattactttctagatcaattcataacatttgcagatcgtaaggttttttagaccattttttttttccaagacagagtcttgctctgttgcccaggctggagtgcagtggcgcgatctcagctcactgcaacctccgcctcccggggttcaagcagttcacctgccttagcctcctgagtagctgggattacaggcatgtgccaccacgcccagctaatttttgtattcctagtagagacggggtttcaccatgttggccaggctggtctagaactcttgacctcgtgatccgcccacctgggcctccctaagtgctgggattacaggcatgaaccaccgctcctggcccatgtgtttgttttttatttgcaaaatgcagaccacctgtgccagaagaatgcatagacttttcttttttcttttcttttctttttctttctttttttttttttttgaggcagtgttttgctcttgttgcccaggctggagtgcaatggcgtcatctcagctcaccacaacctccgcctcccgggttcaagcaattctcctgcctcagcctcccaagtagctgggattacaggcatgtgccaccacgtccggctaattttttgtatttttagtagagatggggtttctccatgttattcaggctggtctcgaactcctgacctcaggtgatcagcacacctcggcctcccaaagtgctgggattaaaggcttgagccaccaggcccggcctctttttttttttttaaacgaaatatttgaaggacacacaagtattatacgtggcattggaaatacaaagatcagacgatatccatcttcaaatggttatagcatagggaaatagacattcatttaggacacttctaaaacagcatagaggagagtgctagagtacgttatagcaagtgttatcaccaaatgaatcttagagatcaagtctagttttcaaataaaggaggaggaaaatgagtctcaggaagatgctgtcagttgtcaatgatgaacataggccttgtgggtatttttcttttgaagaatgactttttttttcagtttgtttgacagcttacaatataatttgttacttaaccttaccattagattgagttggtcaagactagcaaatagtttcatagttgaaaaacatgctttattatttattttttatgtttattgtcctacaaatactactatattgcagtactcaatatcgattaggcatatgacaacatttttctgaaaggcaaaaaatacctaataaaatgaagcctggtttttagagtcctctatgggtcaccaaaaatgatttcaattgaactgttatgaattgcataatttaggaaagttatgagtcatatgagcttagtcatgatgatatcttgttgaagttgcagctggggtgtataagtctcactttgatttcaaaatcgttttccctttgtgttacttttaataaaagaggatgtagtgggtgggaggaaaaaatataggtcacagatgagggatgagaaagtttgtatctgaaacatgtattttcaaatttaccttgaggttattggcatggggattctccatattgcagtgctgatttcattattgacagcaccattttactcagtattttgacatctggctttctcttttgatgttaattttgcttactggctgcattcctttgaaacctaaatgcttaactgccctaactgctccaagggagatttaatgtaactctgctttatattagtctaagagataaaccatatttcaagagtagaatggagaggaattaagcagataattgtgatggggaaactggagagatccttttgactttcacaggatttcctagaacattaaatataggtttcctccaaggccaattgtggttgatttttggatccttcaccattttctatttgtgagataataagtgtatacagctggaagtgtaatgtgaagaaagtctgaaaaagattgataggaaaggaggacaggaatgggcttcattgaggtaacggaagtgaaatgaaaggcttttcatatatgggttgagcatccctaatctgaaatgctccaaaatttgaaactttttgaatgctggcatgacagcacacattacccctaacacacgattttttcactgttagtggtatattttttactgtgtagtacttatgtgtgaataggtataacaaaacgattacttattgtagcatgtaaaatcagtcaggaatgatggtgatgccagacaaccacagattatttatgtgggtggccgagacagtgacacctttgctttcgaatgcttcgttgtacacaaactttttttcatgcaaaaaaagttacttaaaaatattgtttaggccaggcgcggtggctcatgcctgtaatcccagcactttgggaggccgagctgggtggatcacgaggtcaggagatcgagaccatcctggctaacatggtgaaaccctgtctgtactaaaaatacaaaaaattagccaggtgtggtagcaggcgcctgtagtcccagctactcgggaggctgaggcaggagaatggtgtgaacctgggaggtggagcttgcagtgagccgagatcgcgccactgcactccagcctgggcgacagagcaagactccatctcaaagtaagtgaataaatgaaacataaatgaattttatatttagacttgggtcccatccccaagatacctcattatgtatatgcaaatatttcaaaatttaaaaaattctgatgaatgaaacacttctggtctcaagcattttggataagggatgctcaatctgtatctctttatttactcctaaaatcagccaaggaaatgggcatctctccgttcccccccttccttttttttttttctttgttgttacatgagttgtactggtttcacttcatttgacagtgttctgctaatgactagacgtgtatctctgacctggacttgttctctggagttcatattcagctgcccatttggcacttcaaatataacatgtccaaaattagttaccttttttttttttttgagacagagtctcactgtcacccaggctggagcgcagtggcgcaatcttggcttactgcaacctccacttcccaggttcaagtgattctcgtgcctcagcctcacgaatagctgggattacaggtgtcccccaccacgcctggctaattttttttttttttttttttttgtatttttagtagagatggggtttcatcatattggacaggcctgtgttgaactcctgacctctggtgatccacctgcctcagcctcccaaagtgctgggattacagacgtgaaccactgccccagccagttacctattcttttgattacaagaatgagtagctggacacagtggcttacacctatagtcccagcactttgggaggctgaggccggcggatgacttgaggccaggagttcaagaccagcttgaccaacatggtgaaacctgtctctactaaaaatacaaaaattagccaggcgtggtggtgcgtgcctgtaatcccagctactggggagactgaggcaggagaattgcttgaacccgggaggcagaggttgcagtgtgccaaggttgagccactgcagtgcagcctgggcagcagagtgagactccatctcaaaaaaaaaaaaaaaaaaaaaaaagaatgagtatcggatacaggtttagcctaggactaggcagggctgctggtaattgtggaagtagtctcattgcctaacctgaaacttgcatcctggttactggtcttgctggagagtcttggctcaggttacgtcccaggtctgttgaggagctcttgatagggaattagttgaagcagctcatactctatcctcctttactggtataaatccataaaattgtttagttcccaggctctggggtccctggcctagcagagagcactgctccctttttctcattccttagtcccaacaacccgcacctgacacttactacacgtggcctgcttccctgtcctgtgtgttttggggggtgctgaagaggaaggctcctgtgtcttcagcacaaacacaataaacacttcacagcagtactggctttatgttttccatttctgatatcagaagtaggagcatgacattgatagtgtcattttgggggaacttttcgtacttcatgcagcagagcagtgaagagtgagctgagtgccttggggttctgcagtacactctcaagtagtattttaggaaaatgcaatttgctgaaaaaataaaagaaattaatgtaaaaaatccacaagctgggcgcggtggctcacgactgtcatctcagcattttggaaagctaagggggaaggatcacttgagcccaggagtttgagaccaggctgggcaacatggcaagaccttgtctctacaaaaaaatagaaacaaaaattagccaggtgcggtggcatgtgcctgtggtcccagccacccggaggattgctcatgcccaggaggttgaggctgcagtgagtggtgattgtgccctgcactctagcctgagcaacagagcgagaccctgtctcaaaaacaaaacaaaacaaaaacccacacgtttccagaaccttctcatataacactttatttacattgttcttaaatacgtgtgggacggttatatacataccactatacttatgtgtatatatgttgatatacacacaaaattatatacataatttttgtttgtttgtttttgagatggagtctcactctatcacctaggctggagtgcagtggcgtgatctcagctcactcactgcaacctctgccacccgggttcaagcgattctcctgcctcaggcttctgagtagctgggattacaggtgcctgccaccgcgcctggctaatttttgtatttttagtagagactgggttttaccatgttggccaggctggtcttgaactcccacccttgtgatccacccacctcggcctcccaaagtgctgggattacaggtgtgagccactgtgacctgccatatacataattttttaaagtttcacgattagttttagcttaaaaatgtcagctctgggcttaatgaagaaaatatggatatactttatgtcaatgcattaaagtgaatggccataaaagcttatcccagagacaaaacaattcagatataagagaagtgggagagtggaaggtttatctaatcttctgtaggcaactccacagctacaaccagaaggccattttgttacaggcctgaaagccccgttttctttttattcttctttgaaacctttagaaggaacaaagtattggctactttttaccgctgatgtcagtgttaagaatcttgtgataacatagatttactctccctgctgaaaatcactatgtggctcatcagtaacacaactagacatgatgacttaatgcaaaggaagtcctatgtaaatgagcaatgaaattgcaactgtgtataaggaacaaaatagaatatgaaactccagaatcttttgttttcatttctgtttctcccaaggctctatcattcaaaactccagaatctttcagcatgcaattgtctcctgatatcagcccctctcttgttttgttttcttttttttttttttaatcacagtgagccacaacctaggagtcttttagtggtttctacttggtttgctctgcagcctaccagcagatttcctacattccggtcttgttcccctctagcccattctccacactgcagtcataatgaaatttctttcttttttgggggggatggagtctcactctgtcacccaggttggagtgcagtggcatgatctcggctcactgccacctttgcctcctgggttcaagcgattctcatgcctcagcctcccaagtagctgagattatacgcacctgctaccacgcccagctaatcttgtatttttagcagagacagggttttgccacgttggccaggctggtctctaactcctgacctcaagtgatcgcccaccttggctttctctctctttttttttttttggattttgagacaggatctggcctcgttgcctaggctggagtgcagtggcacgatatcagctcactgcaacctctgcctcctgagctcaagccatcctcccacctcagcctcctgagcagctgggactgcaggtgtacaccaccacgcctggctaatttttgtattttattttatttatttttttggtagagacggggttttgctgtgttgcccaagcttgtcttgaactcctggggctcaagcgatctacccatcttggcctcccaaggtgctgggatgacaggcatgagccaccacagctggcctataatgaaatttccaacttacagctattgccattatccaaagcccagaatccctgatttccttccatagcccttcatggcctgaccagtgcctgactctccagcctcacacttcatattctctctgtactgctctgcactgtagcctcattgagttgctttcacgtctttaagtgttgtgttctattttttgtggaattcagcatatgttatgcccttgacctaaggcctctcctttcttttccttctctggggtgctgcctcatccttctggtcttcaaaaccgtttccctgggaaaacatctttgactcagcaggcagggatcatgcccctgctgtgtctgtgcataactttctgtggctacttctgtcttggtctgtgatgtactttataataattttggtctttcctccagtgtcacaatactggaagtctgtttctttttctctgtgttgtatccttagtgcctgaaaggtaggaggttctcaataaatatttgttaaataatcaagtaaatggagtctggtggaaaagagaaaaaataagtgtagaatgtgtgtgcaagaaaggaggggtagggggatgaaaaagataacaaaagcacataacaaaacaacaaaaagcaaaaacaacaaaaaatgcagatgacaaaaaagataacaaaatgatgactgctgtggcaacttgtagaaagtaaggaaggtgctctcattctagagagaagtaggcagccattgtagttttttaaagagagaatatgggctgggctctgtggcccacgcctgtaatcccagcactttgggaggccgaagtgggtggatcacgaggtcaagagatcaagaccatcctggccaacacagtgaaaccccttctctactaaaaatacaaaaattagctggataggtggtgtgcacctgtagtcccagctacttgggaggctgagacaggagaatcgcttgaacccaggaggcggaggttgcagtgagctgagatcacgccactgcattccagcctggcgacagagtgagactccatttcaaaaaaaaaaaaagaatatggccagacactgagctgagatagacagtgcggcagtgtctggtattaactgtaataaactctactgtcagaagcaggtggtttatacttaagtttattgagagaattggatatggataagagataaactcttgggaaatggggagaaatataaattctgttgtaaagcctgtaaaaaattgagattactagtggttagaattttggaagtgaagtgcagtgaaatattgagtacctgagaggttacttgttagtgaaaacacaatagcagtagtacgtagctacagtttggctccaaaggaagaactgtttttactatagtttgtaatggcttcagaatcttcaatttgagatatccagttattaaaagagaatcaattgcagttgaaatgcattagttaagtattttaaagtgctttagcaagctacatttaaaaagtgcttattatagaaaatatacccaaaataaccaatgatgttactgtcttgtgcttattttttctagacctatttttatacatagttaagattatacaatatgaatatttctgaaatctatatttaacattataacatatgtatttttccatgttctttctttttttttttttttgagactgggtctcatcctgtcacccaggctggagtgcagtggtgctatcttggcttactgcagccttgacctcctgggctcaagtgatcctcccgcctgaaccttctgagtagctgagactacaagcacatgccaccatgcctggctaattttatttttactttttggagagatgagggtctcactattttgcccaggctggtctcgaactccttgggtcaagcaattctctcaccttgacctcccaaagtgctgggattacaggagcgagccaccgccctcagccccatgttcttaaaaaccttttgtgaacgacatttaaaatagttgcagattttttcccctgtctttggaagtgttacaacatccaaccatttcacagttactaatttaccatcattctggtttttgtccttgaaaataaggcaaggctgaataatgaacatctttgtggctaaagtttttttctttactttgagttgttaccttcctttagcttagttcagtggttttttctttttcttttttgagatggagtcttgccttgttgcccaggctggagagtagtggtgtgatctcggctcactgcaacctccgcctcccaggttcaagcagttctcttgcctcagcctaccgagtagctgggattataggcgtctgctgccatgcccagctaattttttgtatttttagtagagacagggttttgccatgttggccaggctggtcttgaactcctgacctcaggtgatccacccgcctctgcctctccaagtgctgggattacaagtgtgagccaccatgcccagccagttcagtgattttcatatttgagtgtgtcagccttgcctggaagccttgttaaacacagactattggatcccactgggcggatttctgtttgagcaggtctgaggggagacctgagcatttgcatttttaacaaattcccagttgatgatgatgctgctggtttgggaactacactttgagaactactgggctatattattgacaatgaaactataatgttgaggttaagttcctaagtcagtaggagtgattatgatcttgaatgaaactgagttcatgtaccaacctgtatcagggaaattgaagaactaaaggaccatattgcatttcagcactgagaattcgtgcagtttgtgaacatgtgagtgctgatatgtgcaaggtttttgctgagtattgtgaggcaaggatgttgtaatgaataaaaaatagccctttttggctttttttttcttcttttgagatggagtcttgctctgtcgccaggctggagtgcagtgatgtgatctcagctcactgcaacttccgcctcccaggttcaagcgattcttctgcctcagcctcatgagtagctgggactacaggtgcccgccaccacgcctggctaattttttgtattttggtagagactgggtttcaccatgtttgccaggatggtctccatctcctgaccttgtgatccccctgccttggcctcccaaagtgctgggattacaggcgtgagccaccgtgcccagcccggccttttttcccccgcctagagatggagtcttgctctgtcgcccaggctagagtgtagtggtgcaatctcagctccctgcaacatctgcctcctgggttcaagcgattctcctgcctcaaactagctgggattacaggcatgcaccaccatgcccggctaattttgtatttttagtagagacagggtttcaccatgttaatcaggctggtctggaactcctggcttcaggtgatccttggcctcccaaagtgctgggattacaggtgtgagccaccatgcatggcctcatttgggaaacttttgatatcagaatcttaggtttttcattagagattgtcagatttccatattcctctggaaggtaaaggcctaattgctagcattctggaagccagttagggtaggagggtaggagggtagggtattgggtagaggataaagaaggggtttgggaaaggtggggggtgtctcttggcagttgtatggttaaattgagtttttgttttatttagtgatatgtgttttttgggtacatgtgatattttgatacctgtgtataatatgtagtgatcaaatcagggtgattgggatacccatcatttgaaacatcttttctgtgttaggaatattacaagtcttctagctgttttgaagtatacaataaattgttaactataatttctgtactgtactatcaaatattagaacttactaatcaaactgtatttttgtaacactaaccactttctgttcatctccaccactcccacttcccttctcagcctctggtaaccaccattctgctgtctacctccacgagatccacttttttagcttccacacatgagtaagagtctttcttttaaaactggttttgtgagcatatttaacatcagtagcaataaacttgtattttaagctcctgttgctgtattttgaggaccttctaagtccattggaaggattttgaataccatagtgtctgcagtgatagttgttgaaagaaagggaaggcatcagtgcaaatatttttagacagtttttaaagagactcaagtcacccaatttgtcttctaaaaatcctgattttggaagaggcagtggagtttctgttgataaaaaatgatttatagtttgtgcttggcacttcctaatggattacatcaggaaagatttattgtctggcactctcattttaacgatactacaattgattattaggtttagatgctaataccttttttacctttatttcagagaagcttgattctttgctctcagactacgatattctctctttatctaatatccagcagcattcggtaagaaaaagagatctacagacttcaacacatgtagaaacactactaactttttcagctttgaaaaggtaatttgaattattcatggaataatgttggggcactgggggcttggtttggcaaaaacaaaaaagtaagggtatctactgaaatcttgggaaattacattttaaagatttgtaattaatttccagtataatgcttattctaaaattcatactggggctgggtgcagtggctcacgcctataatccgagcactttggggggccaagacatgtggattgcttgagctcaggagtttgcccaagctcagcctgggcaacatggcaaaaccccgtctctactaaaagtacaaaaattaggcatggtgacacgtgcctgtaatcccagctacttgggaggctgaggcaggagaatcacttgaaccagggaggtggaggctgcactagccgagatggtgccactgcactccagactgggcaacagagtgagactctgtctcaaaaaataaataaataaaataaataaagttcatactgatgagtatttttaaaaaagtaaatagatattgcagaggtgttaatgatggtaacgatgtttagaaaattctaacataatttaaattaattgaatgcttataaaaccttttgtttttggtgctactttataaccatcaatcatgtgctaaatattatctttatatatgaagagataaagattttgttcaggaccccacagcctggtggtgagctgggtctagattttactgttctatttatttatttagctaactagttacttagtttccaggattctttaacctgcttcatatttatttatttttaaaaacagggtcttgccatgttgccaaggctgatcttgaacttctgggctcaggtggtctttccatcttggcctcccaaagtgctgggattacaggtgtgagccaccatgcctggcccaaatttaatattctttctacattgagttcctcttacttcttagcataaattgatggatatgttctatttcagtagtaattttaataccacgtattgttttgcacattgaaatgttaaataattgcaggcctctttttaaagtctttaggaagctttattcagtatcaaaaaacagacacatggagaattgactgaattattctttatttatttatttttttgagagtcttgctctgtcgtccaggctggagtgcagttgtgtgatcttggctcactgcaacctctgcctcctgggttcaagcgattcttgtgcctcagcctctcaagtagctgggactacaggtgcacagcaccacgcctgggtgatttttgttatttttagtagagacagagtttcaccatgttggccaggctggtcttgaactcctcacctcaagtgatccacgatctcggcctcccaaagtgctgggattacagacaggggccactgcatctggccatctttattctttatataggacaagccttctcaactatgttaaaaaataaaaggaatatgtgcgtctggtttaaaaaacaagccatggaggatatgcaaagtttttacttctaactcagttagacttctcagacccagagaggtttcctttgtaaacttccaattttttgttttgttttgttttttgttttttgagacagagtttttgctcttgtcgcccagactggagtgcaatggcacgatcttagctcactgaagcctccacctctcgggttcaagcagttctcctgcctcagcttcccgagtagctgggattacaggagcccactgccatgctcagctaatttttgtatttttagtagagatgaggtttcaccatgttggccaggatggtcttgaactcctgacctcaggtgatccacctgcctcaggctcccaatgtgatgggattacaggtgtgagccaccgtgcccgacccaaaatattttaatgcatgttttttgcctataggtctctgtgtgtgtataggtgatatagatagcatatttacctcattttaaacagctgcataaatattcctattgcatagaattgtaacaacatactgactaatacactacagatggatattgtttaaccaaagtgatttttttaatacaacaaacagtgctctagtgagtatctttgtaaatgtgtaccttgatgaggtgtttttataggatatattcctggaaggagaattactgggtcaaggatatgtatactatgtttattgatattgctctttcctcccaaagagatttgacaaatttattcttccagcagcaatatatgagtttacctgtttcctgttatctttgccaatagtaggtttatcagcctttaactgtcacccctctaaagggcatggcattttatagttgttttgattttcattttgtgtgacattgagcatctttttatatatttgtaagtaatttgttttatatttctgtaaactgcctttttatctcttttgactatttttctattgaatttgtctttctaactactgaattgtagcagtgcttagtatattaaggagattggttcattgtcatgtggttattttaggcaaatttttaatgcaaattaatttttcctagctattgcaattatccttaggttattttttaatgacttctttttattcgattttatgtcagaatattatagtattggttattagctttcaacttacaccaaatttgagcagattggtaatattaatagctacagttaatcaggtacttattttctgtaatttactggcattttacataagttatctctaaaagtgattccttttttgaaggaacaaaaaaaaaaaaattaaggcttagacagcttagtaacttgcccaagattactcagctagtaaatgacagatacaagatttgaacaaaggttggactccaaaacttgtgttatttctgctatactggtggagagtttggtgaagaagtggatatagtagcaagaaataagtaggagcgaaggaagagtgaggaaactataaaatgaaaagaactcaaagtttagctttttgggtttctttggatttgaagtggcctgtagaatccgtattctagaggcaaaaacttccatagccttacatatttctctttcaagtttcgtagatgacattgattccctaagaaaatattaaatcgtagccacttgttatcttttctctgtgtaagaaagcagggaagtatgtaatttattttacaaagtttccatactaaatatttaatgggaaatttatctaacagtctatggaattttataccaggtgttttaaaataggttatttcctttaatccccaaaaccgttcagttattaggtgatattatttccatttgtagataaatacttaggattcaaagattgaggccaaggtcggacagtgagtaaatgaaagtaggacttaagccaagtttgtcagactccaaagcccataccctttcttttctatcatattgcgtcattaaagtttaaaacaagaacaaaaacaaagatagctgaagtaatcagtttgtatcagggctgaattaactctatgaaacccctcattacttgatggtaaatgagaagattccgtttttcgatagcagtggaaggcaaagtaatttaaaccaagatcattgcattaaatttggatgtaactattagaggttgaaaaagcatagaaacactgagaggttgtatgaagagttgaagtaacttaagaaaaaaagaaacttgtttaaaatttgccttacaagtttcatttcctttttgttataaatcaagaaattatcagctaggcgtggtgactcacacatgtaatcccagcactttgggaggccgagctggatggatcatgaggtcatgaggtcaggagatcgagaccatcctggctaacacggtgaaaccccgtctctactaaaaatacaaaaaattagccaggcgtggtagcaggcgcctgtagtcccagctatttgggaggctgaggcaggggaatggcgtgaacccaggaggtggagcttgcagttagccgagattgcgccactgcactccagcctgggcgacagagtgagactccgtctcaaaaaaaaaaaaaaatcaagaaattatcttatttttaaataacgaaaaagctgcggagtatatactgttttgatacttttttgatgttgcctgaatttttttggaaaaagttaaatgtttctcctaaaagtgaaatatatcagattacttgagaaggtctagaactgataaagaaatgaaagtgatatacctgactaaatggaccattaaaaatggttagggtaataatgttaattcaaactggttagctggtctttagttactgtaaattcttaagtcaaaagtcagaaagataaaacgttaaagaaatctgtaagaaaatgacttcacataattttgggaggataaagtaaaagaaattttgacattctgttggacgttttataactcaaaagctaatattggaaaatcaaaaaacatgaattttataatcgcttggtctttatctttagaaaagattcttaatgtagcaaatgaaaaatgcaattccactgatttctttctgaaaagaacattaagtaatgttgcaactcttagctttaaaacaaaataataagacatttataataagtatgcttttgaaagttctcagcataactggagggaaaaatcataactgagaatgtgtgggaagatatgttttaggatagcagaagaaaatgttccaaggatttacgaaataatgttctattgtcttttccctttgaccattaaaaaaccacaagcaaactaaaattaccttgttatgctcaaaaagttaaaaatatttgttgccatggagatagtcccagtctagatttctttccggtagtttaaagacttttgcaatcccatggggaagtaatatattttcagtacaacagctgacaaaatttgtttctgtgggtgagatgaataatatacctttctttgtctttggtgttcatggacacattgaaagactataaataatacttgagaaagtcttgctcaccactcctagttttcatgtaaggatggaaagtcatagaaaacaaaaagaatagtaagccaattaaagaactggactgaaactcaacaaaaagaatagtaagcccactaaagaactgaagtgtataccccctcccctctcctcccctcccttcccctcccctcccttcccctcccttccccttcccttcccctctcttccccctccccttcccctctcctccccctctcctcccctctcctccccctctcctcccctcccctcccctcccctcccctcttttcctgtcttctggtgccaatggagtctatattctaatgtctgtcttagataccttgtatttattttcctaactgtaattgtgggttacttttttgcaagatatgttgttttgaggaggaaaaaaagcacgagtactttttttttttcttattttgagcgggagtctcgcgctgtcaaccaggctggcgatctcggctcacagcaggctccgcctcccgggttcactccattctcctgcctcagcctcccaagtagctgggactataggcacccgccaccatgcctggctaatttttgtatttttagtagagatggggtttcgctgtgttagccaggatggtctcgatctcctgacctcgtgatccgcccagctcaacctcccaaagtgctgggattacaggcgtgagccactacgcacggccgcatgagtacttttaaatatagaaagcagcatttattaattttgcacagcaataagaattttctcatagtccacccagcttgatagagacagcatagtacagggttttgaaataaaccaggtttatttcccagtttcaccatttactagctgtgtaactttgagtaggttgattagcttccaagcctcaatttgtacttgtgtgaagtggggataatagatgcatagtacctaacaccaagtaggtgttcaataaatggtatataataggattagtttttgataataatttttttagataatcaggattccaacttaactacgcagtcatgtgtgtttccttattcttcagtgttttccaggagagatgaatgtataagttctttgaatatctttaccctagtgtgagtttattgtgatctgctgtttttatagctaaataaattagttcatttgtcgttacaggagatatattgctctaagtacctaataagactttagttgtaacttgcatagtgttttattaatgtcaatgcttctggctttttaagaaagtttaattatgtgaaaatgagacttaaaatttgtgtgcttagagtaaaatatgaatgcatttttcttcaggcattttaaattatacctgacatcaagtactgaacgtttttcacaaaatttcaaggtcgtggtggtggatggtaaaaacgaaagcgagtacactgtaaaatggcaggacttcttcactggacacgtggttggttagtatggagcttgttggtttgcccctgtgtctggtgtattaggtctccaaatctaacttgattgcatattcttttctggtgcaggatagtggggacggggtgtcatagaagtgctattctttgacttttctttgaggtatataagtttagaggcaggaacattctaatagaaggaaatgagtattatctaaatgtcatactagctggctggtttaatgattaaaattaaattcttcttaagtgataggaatttaacctttcttttcctcagtgactgtaagctttctttatgatattttaaacagggaagcttggagataaaatacttggtgatcctattacgtatgtatttgagaaaatttatcaaacaagcaattgcagtttactttttgacctttttctgcaatgagaaaaaaaaatgtcattgaaatccacaaatagtatagttcctaggcctgtacattctaaatcatgctttctgtctctcttagttcttcctttacctagaagtagataaaattattccagaagaaaatcttagcagttttgtttgttttgggaaagggataggtttcaagtgactaaacttgaggctaccccttaggagttgagattatctagcttctttctggagcctttgtttcttgttttgcagagctctcacagtactaggcaaattccaccctgaaggatttaatttttattgagagtaatgcatagtttcttatttgatgtaagtatttttaaataataattttttttttctcttaaggtgagcctgactctagggttctagcccacataagagatgatgatgttataatcagaatcaacacagatggggccgaatataacatagaggtaaatttatatgtgaattttttttcagtagcttatatctctgattttcaaaaagctgctcagttctgcaaaggtgaaaagtaattatacttatttctttcctcttcgtatttgaagttttttactaggaaagtagactttttaaaaaaggataatctctaagaagctgtgttatgatacaccctgtatttctaagtaccataattgagagagttacatgtgggatggataataggaagagaaaactttctttccctcctgactcattttttaattctttctcaaataataaatgtaaacatcctcagaaatgaaaagtgaagtattatttttcaatttctctgtttttctgctagacacactggaaatgctagatcaatgaaaggtggtagttcatagtctgagaagttaaagaggaagctaggaaagtcaggctgtggtcactcttccattgaaagagtagcaatagaaatcaagaccacagtggctgcattggttaagacacatatctatctgtcagatattagtctacaaaacaaaacgtttcctcataattgtgaattgaagttgattctgtgtttcctgaaaaatgagaagactctgggtggtggtggtgatatcactaaaatagatcacctgtgggaaaactgagtaagattggtcaaaatgaaatgttcaggtgtatttgagtgcttaataggggtaaaacagtctgctggagctatatatactatatgttttaattatatccaatctacatgactgttagtcctttgactgtccattattgtgaaaaagaaacctatggccttgcagtatgttatagtttgttaatgtttaagctatttaatgtcaatgttttgaggagtctggcctaccagaaagagtcagaaatttagtagaaagtaaaggaactaatattataaatgcattcattctagaataggcaaagcatcactggaatgtcttaaatttgcctgttctttcaaatcaatttattttttaagaatacctttattttaaaatatatgctcattgcaaaattcggaaaatagattatctgtacttggacagataactactattgacattttgacagacatccttccaaatttttttttctatgtgtaaatacacaaataaatatagttatacccactattttttcctgcaaaactaggaccatacaatatgtacagtttgtcttcacacatttttcgtttaacaatatgattatgaaccttttcgtgttaatatagatctaaattagggttttgtttgtttgtttgtttgttttttgagacggagtcttgctctgtcacccaggctagagtgcaatggcgtgatcttggctcactataacctctgcctccccggttcaggcgattctcctgccttagcctcccaagtagctgggactgcaggtgtgcgccatgatgtccggctaattttttttcttttttttgagatggagtatcactctgtcactcaggctagagtgcactggcgtggtctcggctcactgcaacctctggctcctgggttcaggcggttctcccgccttagacccttgagtagctcagactacaggcacatgctacctcacctggctaatttttgtatttttagtagagacggggtttcaccatgttggccaggatggtctcgatctcctgacctcatgatctgccagcctcggcctctgaaaagtgctgggattataggcgtgagccactgtgcctggcctcaactgttttgtttctaacttttgaaataaaaggtattgtagtgaacagccttgggcacaccttttggtgcatgtgtttagttggaatagtctggatgataggtaatagtctgggaagttaaatgaagaaactgtaggaagctctgtctaggctgtgcgagggcttcagataaactcccatagctgagtagcttaacacaagcaaagttttttcttactctcctgtggcttgatgtgggttaggtggttctcctctactttgtggctttgacttttggacacatgtcctctgtagttctcacagaaagaaaacagagctagagaattatacaggatattaagggccaggcttggaaatggccttccgttcaatacattctagaacactttatctctgacctgctacaaaggagaatggaaaagatagtcgtaatttgagctcagaaagagaaaatagtgtggtaaatgcacagcattgtttttgctgcagtgcatatgtctgcttatttccttagaataatttattcttttttgtttttttgagactgagtctcactctgttaccaggctggagtgcagtggcgtgatctcagctcactgcagactctgcctcctgggttcaagccattctcctgcctcagcctcccgagtagctgggattacaggtgcgcaccaccacacccagctaatttttgtatttttggtagagacagggtttcacaatgttggccaggatggtctcgatctcctgacctcatgatctgccagcctcggcctctgaaagtgctgagattaaaggcgtgagccactgtgcctggccagcttattaattcttaagccaaaatatgtgtctttaggatccaagttaaatttgctcagattacatttttttttttttaagatggcatctcgccctgtcacccagactggagtgcaatggcgcgatctcggctcaccacatcctctgcctcccaggttaaagcgattctcctgcctcagtcccttgagtagctggaattacaggcgtgtgccaccatgccccgttaatttttgtagttttagtagagatggggtttcactgtgttggccaggctggtcttgaactcctgacctcgtgatctgcccatcttggcctcccaaagtgctgagattataggcatgagccaccacgcccagctagattactcatttttttcaaatacttccttttggaaaaataggaattctgtttccatccatacctttgtttcactaagtacaaaaatgagtataactaatatttcattgtaagatatttacttagccaggcacagtggctcacacttgtaatcagcactttgggaggctgaggcgggtggactgcttgagcccaggaatttgagaccagcccaggcaatatagggagaccttgtctctactcctccacaaaaaaaaaaaaaaaaaaaaaattagctgggcatggtggcacatgcctgtggtctcagctacttagaatgctgaagcagtaggatcagttgaattcggaaggcggagactgcagtgagctgagattgtactgctgcactccagcctgggtgacagagcgagaccctatctcacacatacacacacacaaagatgtttacttacaagtatactcatcagataccttgagggacttttgcatgaaattaataatgtttattgaaaaaatgatttactacttacaggggtgattttcatactctttataattcttttgatacttttatagttcataagtgtggtgattggctgttcacacacacatatgagatgtaccaccctagaaccttgttacaatgttagcacattaccagtctgacatgaaaaaaaataattctttacacttaccttgatgcaaaaacattgtctatctgcactaatatcttaggaatataagtgagcaggaaaaaatatatatcttatttttaacacatcatcattaaatattttgtttatgacagtcttacttggtcactcaggctgaagtgcagtggtgccatcatagctcactgcagccttgacctcctgggctcaaacaatccctcttttctgcctcctgagtagctgggactacaggtgcatgccaccatgcccaactaatttgttaaatttttgtagagtgtatcagatttttgatgaggtctcactgtgttgcccaggctgatctcaaatgtctgactgtaagcaatcctcttgcttggcctcccaaagtgctgggattacaggtgtgagccactgtgcgcagccgttaaatattttaaaccgtcactgactttaccatagcttactatttatataaataatcctgggttaaacttgcatagtgagataatatttcccccaacttttatttatttatttgagatggagtcttgctctgtcgcccaggctggagtgcagtggcgcaatctcggctcactgcagtctccgcctcccaggttcaagcatttctcctgcctcagcctcccaagtagctgggattacaggcacacgccactgtgcccggctagtttttatatttttggtagagacagggttttgccacgttggccaggctggtcttgaactcctggtctcaggtgatccacccgcgtcggcctcccaaggtgctgggattacaggcatgagccactgcatccggcctaatttttgtatttttagtagagacggggtttcaccatgttagtgaggctggtcttgaacttctgaccttgtgatctgcccacctcggcctcccaaagtgctgggatgacagacgtgagccaccatgcttggcctcccccagcttctagttttaaaaatgttcagctggtgcagtggctcatgcctgtcatcccagcactttgggaagctgaggtgggtggatcacttcaggccaggagttcgaggccagcctggccaacatggtgaaacctcgtctctactaaaaatacaaaaattagccaggcttggtggcttgcgcccgtaatcccaactgctcgggaggcctaggtgggagaatcgcttgaacctgggagacagaggttgcagtgagctgagatcgctccactgtactccaatgtgggtgacagggtgaaactctgtctcagaaaaaaataaaaaagaaaatgtgcaaatctacagaaagattaaaaagtaccctgtagttacagaaagatttttttaaaaaataccctgtagcccttaaacaatttctaacataatgtcctgttagctttctctctttttttcgtgaatcatatgaaaatcatttgcaaacatcatgacccttcacccctaaatacttctgtatgcatccttaggaataaaggcactcttttctatagctgtaataaaagtaacatacctgagaaaatgacaagaattctacaatattatctaataatcatgccatagtcaaaatctctagtcatcctcaaaatctcctttgtagattttttttggttttccagtccaggatccaatccagttttctgccttttagtcaattactcatcaaattattttttccagcaacttactagtaataatggtaatagccttagcttttattaataacaaccacttttcttttgaaatgttaatataaaactagatttattacctacataatcttcataatcttcaagttaggtattatcactactttacctaatgagggaggttatgctcagggtacttgtccaaggcacatagtgaggtatggttgaggtttgaactcagatatatctgatcccaaagccagctgtctttttctgtgctggactgactatactaggaaacaatcaatgtgaacttagaaatgtttgacccaaaagaaaaaaaatttcactcctattcataggctaaatgaactttactaaatatggaagattcctgtagcccggaagttgggttagttaacttttgagatctctgccaaccctgaaattctgtaacccttgtttcttacatctgcctcatacatggattaccaaagatgtatatgcatataatatttaacagttttattgagataaaattcacatactatattattcacccacttaatgtatacaattttgtagttttgtgtgtgtgtgtgtgtgtgtgtatttttgagatggagtctcactctgtcacccaggctggagtgcagtggcacgatcactgcaacctctgcctcctgggttcaagtgattctgtggcctcagcctgttgagtagctgggattacaggcgcccaccaccatgcccggctgatttttgtgtttcagtagagatggggtttcaccgtgttggtcaggctgttctcgaactcctggactcaagttatctgcccaccatggcctccccaaagtgctgagattacaggcgtgagccatcgcgcccggcagttttcgtatattgatggagttgtgcaaacaccacctcattcaattttagaacatttttatcacctgaaaaagaaacgctgtatcctttagccatacttcccccttcctccctaactcccccagctctaggcaaccagggatctactgtctatttagatttgtctgtttgggtcatctcatataaatggaattacataacatgtcttttgtgtgtggcttcaatttttttatttttttgagatggagtcttgctctgtcacccaggctggagtgcagtggcatgatctcagctcactgcaacttttgcctcctgggttcaactgattctcttgcctcagcctcccaggtagctgggattacaggctcctgccaccatgcctgactaatttttgtattttttactagagtcggggtttcactatgttggccaggctgttctcaaactcctgacctcaagtgatccacctgcctcggcctcccgaagtgctgggattaaagacatgagccaccacgcccagcctgtgtgtggcttctttcacttagaataatgtttccaaggttcatctgtgttgtagcatgtatctgtatcttatttatttttattgctgaatagtattccattgtatggataaactgcattttgtttattcattgattagttgttgatggacatttgggttgtttccactttttagctatatttacattactgcttgtgttttcatttctcttggttatatactaggagcagaattgctgggtcatatggtacttctacttttaacctttgaggacctgccagactgttttctaaagtggttttaccattttacattctcatcagcatatgtgagggttctggatttctctacatcctcaccagtatttgtctttgatcatagtcatcctagtgggtatacaggggtgtctcattgtgggggtttttttccccattggggttttgatttgcatttccctgatggagataaatatattttttgtgtgtccccccacaaactgcctggttctgatgagaccagtgttcttacagagaataactttgctttgaaacaaaacaaacaaacagccttttgacttgggtaacctttggagtatgttaattgtgatttactctggccttgtaacattgtaagtggagattttgtttaaaaactgcgttcgctgaaacaagtaataaggttcagacctattgttacaagttctgagttttctttcatataaatatgtttgttcttttgtgtggataaaacctaacgtggcaaaaaggtgtcaaacacctaagtattaaggaaactaaaatgaaaatgctgcatgaacagaaaccttgtccaattttcattactatagcaccatcacctataacagtgccagtgtacagtagatattacataatatttttgaatgaatgagtggaaaatgatatgcatttttctcttctgcatcctctgaaagatttcacaacgtgcaaagtatgtaaggctttatttatatacagataaaataatcagagtttataatctatgtatttactttcctgcatagaaactccatatgattaaaaattgagattatttattttaataacatgactaatcagtttacttaacctagaaatgaatgttatctaagaacaagcaaagaatgttagaagaatttagtgtttaggaattattattgttttccatctcagtcgtatatattttctgttttagccactttggagatttgttaatgataccaaagacaaaagaatgttagtttataaatctgaagatatcaagaatgtttcacgtttgcagtctccaaaagtgtgtggttatttaaaagtggataatgaagagttgctcccaaaagggttagtagacagagaaccacctgaaggtaagacttaaagagtgtatttcaaataagaaacaaacatactacaattgacttcagtaggggtggttgttatttgttaaaaaataacatgattgtcaagtaactatagtatttggcatgaaaataagaggtttgttccagaaattttcatcttcttttgtttataatgtaagagttgaaaactctggaaaataatgggaacaacagagattagactttaaaaaagattagggaaaagggaaatggagtgatctgagggaaaatattcctgcagatatttagaaatgataaaataatatggtggaaagacaatctttagagtttataagaaattaattggtagtaggagggacctatatatatactgcttagaatacaagaaggttatatccatcttgggacaatccatttagggtcatttaaaaaacgtaaccatcttggaattttactgcccaaaacacctctggttaggttttttgttttgttttgttttgttttgtttgcagcgcgatctcggctcactgcaacctttgacttccaggttcaggtgattctcctgcctcagactcctgagtagctggattataggcatgtgccaccaggcctggctaatttttgtatttttagtggagatggggtttcaccatgttggtcaggctgttctcaaactcctggcctcaagtgatctgcccacctcagcctcccaaagtgttgggattacaggcgtgcaccaacatgcccggccaaagacggttatgttattaaaattatatattagcattttaatatataaataaagaaattcttaatttatttcacaagaaagttgtcctattaaactaattttcaatgtgaatatcttgacatttttactgttacattggttaattcataaacttcttgttgtagaatatgactgacagcttcatagcccagcattaggtgactgttttactctgttgagcactatttatttatttatttatttagagatgaagtctcacttttgtcgccctggcttgagtgcaatggcacaatcttggctcactgcaacctccgcaccctgggttgaagtgattctcctgcctcagccttacaagtagctgggattacaggcgggtgccaccatatctggctaatttttgtatttttaatagagatggggtttcatcatgttggccaggctggtctcgaactcccgtcctcaggtgattcacccaccttggcctcgcaaagtgctgggattacaggcctgagccaacatgcccggccttactctgttgagcactttttaaagtttctgtattggaaaaattaaagaggcacttgtccttggttttgaattctacagtgttttaactttatgttacttttcacttttctgtcttcctccaaattattttttgttgttgttcagaatcctttagtgatattaagctcacataatgtttgtttcaaaaatatgttagatttaaagtgttaccataaaactccttgttttggtgaattttgatttaatagtgcatacaaattcatattagagcttgttcatcgagtgaaaagaagagctgacccagatcccatgaagaacacgtgtaaattattggtggtagcagatcatcgcttctacagatacatgggcagaggggaagagagtacaactacaaattacttagtaagtatttgatattgcatcgagtaattgaaaaaaaaatttgggtgggtacattccatgaaacttaatgcaaccagatctgttccagatactctgttatttccctaaaatatttgagggatattctctgaggtttttatgttactgtatggaaattatagtttcaaatttgtgacaacccattttacccttgaactaatattttctgcatgttagaatttatgcatatagggtttgggagaggttataatgtagtccttcctccttgatataagtgagttctttaaaaacatcactgctatcatggtagtgaacctgtggtgtcacatgtgaatgtaaaaatatgtatttgcatgaacccatgtttttcttttgcttatatgtatatttcagagaggaaggcgagttttgtttgtcatgttaaagacctaatcattggacttcacttgaaataggtgggactttcatggtcataactagttctagggcacagaagtgaaggaaagatgtaagaagtgatgatactggatttttaagtatgaactattatgatttttgaagtctggggaatcatttttcattgacattttttgctagtgtgacttcattcgtcatgattacttggcactgaccaaaatgttgttactgagggaataatggagaatgcagctattcatgaagcaagaagaagctggtgcagtaaagatgtctttctcattgccttgcttttcccatgctgtccattttattcataccctcccaacttctttcccttccctttcatgtcaagtggatttttttttttttttttcaacacagagtctcactgtgtcgcccaggctggagtgcagtggcacaatctcagctcactgcaacccccacctcctgggttcaagcaattctcctgcctcagcatcacaagtagctggaattacaggcgtgaaccacagcactcggccccatatcaagtgaatttattatgaggctagtaagagtcactgtgattcttgttcctaaataagagagatttttactttaaaaagcttctctcttaatctgggttttatattaaggggctcctcttattttacttctttgttcattgcactataaatatgaatataatgagagatctagtcttaaaaattgtatttttttacaacttcttaggcataacttgtttcacagttgctagaacaaacctcatcaacccagtttttgaacagtagaatattctctttgagaaaaagataggtaattagcattttgttctttctcatgtcattttccttggaaactatactgccttccttctccagttttcccaaatcagagaacaaaagaaggagggttgctgaaatgaaccttgttctttctggctgtcttcttacccattcctcagtgctgaactttttggggtgagagtgggggaatagggttggcagttgtctgccacggccccttacttgtttctggggaagacattcgaggtactcaccaagagatagagtgaagatggaattctttttagaagggaatacagttgacccaggaacagtgcgggggtgtggttagaagcactgaccttcttccctctgcagtcgaaaatcctcacgtgactttttttttttaaggctctgtcgcccaggccggagtgcagtggtgaaatcatagcttgctgcagcctctattgcccgggccaaagcaatcttcccacctcagcctcctctagctgggacaacaggtgttcacccttcctggctaagttttttgatttttagtagagatggagaatttcccaggatggtctcaaacttctaagcttaagcaatcctcctgcctcagcctcccaaggtgctgggattacaggcatgagccactatgcccggccactgtataactttgattctccaaaaatttaactactaatagtctactgttgaccagaagccttaccaataaaataagttgattaacacatttttaaaatatgtattattactgtgttcttacaatcaagtaagctagagaaaggaaaatgttatgatgaaaatcataaaaaaaaaaaaaagcccggcatggtggtgtgtgcctgtagtcttctgttactcaggaggctgaggtgagaggattgcttgagtccagaaattcaggctgtagtgagctatgatcgtgccgctgtactgcacccctggtgacagagcaagaccttgtctcttgaaaaaaaaaaaagaaaatcataaggaagagaaaaatacatttactattcactaagtggaagtggatcatcataatggtcttcatgttgagtaggctgaggaggaagaggaagagttgatcatattgtctctggtgacagaggctcaaggaaatccatatgtaagtggacacttgaagttcaaatctgttgttcaagggtcaactgtatttcaggtatactgattgacttttaaatttaatttttattattggctgaaacggtagttttaaaaaagcctgttacttgtcattttggttccatgtgcaattgagtacctgaaatttaggttaaactataccattgttttattctggtaacagcactttaagtttggggccaaaggttgggaatactctgatacagtaacatctcaatgctagtttttgcgaaagtagaaacttttgcaatggcctctaaactgagattttttctttccccatagattttatattgcattgccaggagaggtaaagagttacataatgtcttttttcttttttaaatacacacagatagagctaattgacagagttgatgacatctatcggaacacttcatgggataatgcaggttttaaaggctatggaatacagatagagcaggtatttatcaatagatatggcttatattacttaagttttgtaatgtaaatatttgtcacttgtattcaaaacctaaaaacttgtccttaacaataattgtaaataagttttctcagatgccaatgattttttatgatgaattgtgcagtatttttgatgttaattagttctagattgtgaagttttctgtccttagtctcgctttaggtagaaagccttttatgctgctgtgctttgttccttctttgaattcatggcctttatattctctgtagttttcttcccccctccgattatgcttaagtctttagttaaaactctggcatgcaccattgaatccttagtcagaaaatttactaaaaaatactgtgtacctttgcaaggctgtatttatatatacagaacctttaggttctttcctctcagatatctccttctgatttcttgtaatctgttaacagagtgtgtctagtaatgttatattaatgtcatcttaataatagctcatattaaaagttatttcaaattgctaggactaattaaaaaggcttctgacaaagggtattgctttgggcagagagacattttgatatgtaaattatataaattgttatctctatttttttccaagctttttgtagtaaaccatatttttataagttatatagtatagaatttagaggttgaaaaaatttttaaaaatcattcaccatgtttataaatgttaaactttgatattacttgtataaaactaagagaattatttttcccttttcattctctttcactgttacgcattttctttttaagttattatttgaataggtaacatgtacacagtacaaaagccagtgaaaagtaagtctctgcagcctgtttattgtcaaaccagttcctttccccaaagacattcatgtcactagtttcatatgtatctttctagagatgtcgtatgcaggtatagtgtatgtatatgtctgtatttgacacaacggtgctatgcagtacacttttacaccttgctttttcatttcacagtatgttggagagtacttcatgttcatgcatgtaaagctgcttcacttgttttattataaatagctgcatcatgtttgagtttcagggaacctgtaaattttctttttgctttaggcatttggaaccagtcgaagaaacaggaataatataggagattaaaacattaacttctttacatctgatgaaggatggattggagggtgtggtttagatgtgtatcatggtgggcttctaagtagttctatcccagatttgaccttgaccagccaccatcaaaactgcagagtccaccccagtaaacttaccacacagtggcagaggagaccagaatgggccttctctgcaggcaggcaggcaggcaggcaggcagagagactcacagaaactctgagctgagcatggtttccttctttatctcacacttactaatgggagcctttgttacttttttttttcttctttgcaggtttaatatgaatttgtctgaaatgcctgtataaggagaagactctattcttagccttttattcctttgatgcacaaagagatgtatattttattattctttcctgagttgtcgactgtagtcgtaataaatattttaggctcctgtaacccaagttcttattttttcaaaataaacatggaggatatgaaaatttaagagtacatttataatattataaataattcattgacatatgttttccataccatatgcttctctgtttgtttcaaacattgaatattggtactgaagaatttatgaattttggttttaaaatgttttttttctagaacgattctttttttgaacagataaaataatgcagtattcagagccttctgacttattttggaagtgttctaagtatatgatctctttaagtatagattcgcattctcaagtctccacaagaggtaaaacctggtgaaaagcactacaacatggcaaaaagttacccaaatgaagaaaaggatgcttgggatgtgaagatgttgctagaggtaggtcttagaatcctggatatggtgctaacaccactttgtcatttctgatatgtggattgtatgtgttttaatgaaggagcatgttagaaaagatggacacccagaagcagtctcctccagctgatccagcagtaaccccatcccatgtagcagcatagacaacaaataacaaaaactctatgaaaaagaaaaacgctataaagcaatgcttccttttttttttttttttttttttgagacagagtttcactcttgttgccctggctggagggcaatggcgtgatcttggctcaccgcaacctccatctcccaggttcaagagattctcctgcctcagcctcccaagtagctaggattataggcatgcaccaccacggccggctaatttttgtatttttagtagagacagggtttctccatgttggtcaggctggtcttgaactcccgacctcagatgatccgtctgcctcggcctcccaaagtgctgggattacaagtgtgagccaccatgcccggccaaagcagtgcgtcttaaccttaatatctttgaggatctaatgagacaatcagtggatcttctctagaaaataacatggatacccaatatatagagtttttgcacactgtttcattagttctgcacacttagttcagctctctctgaagcttatcaatttatcttttagggcagtaattatcaaacaggttatgaacatgtattggagagtagaaatatagcttggagatctgaaagttctctacaggaatttaaaatttttgtgtttttattctggcgattaatctaaagatggctaacttaatcattttatgtcatttggagtcttgccgtataacagggtgctgccatgtgattccagtgtcttgagtttgtgtgtgctattactttggtgtagaatgactttatatgaagcgatagtttttatcttttaatgtgttggcaagtttattagtttcttgttgttgctttaattatcacaagtggagcagcttagaacaacacttatttatcccatagtttgcatgggctagtccaggtatggtgtggctcatctggattcttgtttagggtctcatgaggctgaaatcaagttttcaaagcttcaatagaattaaaggatattataactattcatccagatggagaagcataatgtgcagcacctgtgtggtactcattcataccttgtctaatttgatctgctgagcaccctgagaggttggttgagacagcatccttgtgaggaggctcagcaagtgttactgtttattccagctgacatgacaaagcagcataggctgggggacttaaacaacagaagtttgggttttcacagttctggaagctggaagtccaaaatcaaggggtcagcagggttgatttcttctgaggccaaggtacttgtggtgtagatgctgtcttctccctgtgttctcacatggtccttccctcagtgtgtgtgtatattctgatctccttatcaggacaccagccatattggattaaggcccacccatatgacctcagtgtaccttaattacctccttaagggccctgtttccagatagagtcacattctggggtactgttgagggttaggacttcaacatttgaattgtggggtggcacaattcagccagtagcaggaagattaaatgacttgtctgattagtcatacaactggtgatggcagaggttgaattgagcacagatctcctgactcctagaacagctgaaccactgcgcctgtctgcttttctgtgagcctccagacagcccatggcaggggaggaaccaaagagaaaaatgacttatgttgacagatggtcctctccagttttcttccctaagcctcctagaatattcttagaagcctcatccttttaccacggaactatcagaatccccatgtaaccacacttcattcctcatatagggctctctggcctctcatttaaagcattttaaacattgagggttttggctaggcatggtggttcatgcctgtaatcccagcactttgggaggctgaggatgaggcagtggattgtttgagcccaggagttcaaggctagcttgggcaacatgttgtacaaaaaatacaaaaattagccgggcatggtgaggcacgcctttggtaccagcttcttgggaggctgaggtgggaggttcacttgagcctgggaggtcgaggctgcagtgagctgtgattgcgtcactgcattccagcctaggtgacacagcgagaccctgtctcaagcaaaataaatcaaaccccccccccaaattaaggtttttttaaacttggagacgctggacggttatggtagaggtttttaaagtaatgtatgaagcccttttaaattaagaaaaaaaaaatcctctcaaacctgcagtgttgatttaaatggatgtaaaatctttattttagtaacataaaactgggtatgtatgcttttctataagtgtatatttatataaatgacaatatattatgaagctcaaaaaagtttaagattaaaatttctataaaaccaattgaatccttgaaatacttgagagggatctgttttggcctggagtgctgcaatccccttatcgaattggagcatctctagtcctgggctgtatgtcttcagaacagccctcggaggagcagtgagttagttctgaagagctggagcaagctcccgaactattcccttttgtgtcccttgtcagatgacagtgtgtgcctctcacctgtgcaggtggagaagcactttagggaaagagcaaagcactgcacgaggttgtgattgctggtgctgagctgcatgccatcatagttctgttctggaatgtttagttgatttagattacatcttttagtctgatgtaattgttaatctaagaatgcttttttttttttttttttttttggtctttcaaagcaatttagctttgatatagctgaggaagcatctaaagtttgcttggcacaccttttcacataccaagattttgatatgggaactcttggattagcttatgttggctctcccagagcaaacagccatggaggtgtttgtccaaagggtaagtttttccatttcttgtgtgaatatgctgctgggattattaagatgattggattatattataattctgtatttaataagcaatttatctctgtttccttttgactttagcttattatagcccagttgggaagaaaaatatctatttgaatagtggtttgacgagcacaaagaattatggtaaaaccatccttacaaaggtatgttcttttatttctaaaagaatagtgttagagtttattgtagtagaacctcagttatatatttatgtaggtatttttttaaaaaatgtaatatatactgttttttaaatttctgcctaaataaaatttatgtatttttgtgggatatatgaaaattaaagcataaagaagaaaataaaaatggcctgtcagccttcttttgaaacatgtgaggaccactgcttttctcgaaccctctgtcctggacccctctgacctgcagcaactcttagagctccctgtctcctagtcctgcagtgcagctgtcattcaaggcatcccacaccctcttattttcagaaccccatggtctccctctttctcagtgccatcattttggtgtagtgtatcttgcaggagcttcctaagaaaacgtagatgacctgcatattgttgggatttcatatatctgaaaatgtctttattccactcttaagcctgattgataattttggctgagtatattcttagttctcatgttctctatggtcttctgtgcatgttgcttctaaagaatctgaagtcattttgagttcttatctttgtttgtcacctgtttttttctctggaatatcttaagatcttgtttttctccagctatgtctgttaaaatgtgtttgactacaaataacagaaaattaaataagcagtggtttaaataaggggtttatttgtctcagtcaacaagaagttcagggatagcattttctgggtggtacagcaactcagaggtaccctcagtggctcaagaacaagcaggaagtctttgtcctcatggatgtcacctcatggttttaagatggttctcttctgtgttggagaaaggaggagaaagagaacatggctagcctagtctggcccttctaaaaagcttctctggaggccccatcctggcttttgtttatatgttactggacagcactgggtcccgtggctgcccttagcctcaacggaatgtggaaagctggctattttagctgagtatattgctgtcctgggcaaaattagggctcattaagtaaggaagaaggggagagagatgttggtaggacatattagtatctgatatactgatttttaatttttatttaatttttattttttttgagacagagtcttgctctgtggcccagtctggagggcagtggcaccatcttggctcactgtaacctctgccttctgggttcaagcagttctcctgcttcaacctcctgagtagttgggattacaagcacctgtcaccacgcctggctaatttttgtatttttgttttagagacagggtttcaccatgttggccaggctggtctcatgaacccctgacctcaagtgatccactcaccttggcttcctaaagggctggttggtatactgattttttgactatgatgttatacttggtgtagggtatgggaaaacatttgcaaaagacacatctgagaaaagactgctatctgaaatatacaaagaggccgggcatggtggctcattcctataatcttcggcactttgggaggccgaggcaggagaatcacttgagcccaggagtttgaaactaacctgggcaagatggtcagaccctgtctctacaaaattaaaaataaataaataaataaaaatttccatatgtataaagaactgttaaaattcaacaataagaaaatgaacaacctaatttaaaaacagacaaaagagcagaacagatacctccaaagatatacagatagcagagaagcatatgaaaagatgctcagcgtcatatgtcattaggaaattgcaaattaacaatgaagctggttgtaggggtacatgcctgtagtcccagttgcttgggaggctgaggtgggaggattgctcgagcccaggagtttgagacccatcctgggcaacattagtgagatcctatttctataaaaaactttaagaaacccaacaacaatgtgctattactagtagcttattagaatggctaaaatcccaaacactggcaacacaattccaacaaggctatggagcaacaggaactctcattaattgctagtgggaatgcaaaaatggaacagccactttggaaggcagttggcagtttcttttctttttcttttttcttttttttttttttttggagacggagtttcactcttgtcacccaggctggagtgcaatggcgccatctcggctcactgcaacctctgcctcccaggtttaagcaattctgcctcagtctcctgagtagctgggattacaggtgcccgctgccactcccagctaatttttgtatttttagtagagatggggtttcaccatgttgtccaggctggtctcgaactcctgacctcaggtgatccgcctgcttcagcctcccaaagtgctgggattacgggtgtgagccactacgcccagccataagaatgtttatggcagcttaattcataattgataaaacttggaagcaaccaagatatcctttagttggtaaatggataaactggcacatccataaaatgagaaaaaaataaaaagctattaagccatgaaaagacatagaggaaccttaaaagcatactactaagtaaaataagccagtctgaaaggctacatactatatgattccaaatatatgacattctagaaaagacaaaaccatgcagactataaaatgatcagtgattgctagatgctgggggagggagggatgaataggtggagagcagggtaattactctgtatgatacttcaacagtcagtataagacattatgcatttgttgaaacacatagaatatacagcacaaagagtggaccctaacataaactgtggactttgggtgatttaaaaacaggtggtggcaggagcctatagtcccagctacgcgggaggatcacttgaggccaagagttagaggctgtagtgtgataaatgcaactgtgaatacccgctacattccagcctgagcaacttagcgagatcctccttttcttttttgagatggagtctcgctgtgtctcccatgctggagtgcaatggcatgatcttggctcactgcaagctctgtctcctgggttcatgccattctcttgcctcagcctcccaagtagctgggactacaggcacccccaccaccacgcccggctaattttttgtatttttagtagagacggggtttcactgtgttagccaggatggtctcaatctcctgaccttgtgatctgcccgccttggcctcccaaagtgttggaattacaggcgtgagccaccgtgcctggcctgagaccctgtctctttttatttatatatatatatatatatatatatatatatatatatatatatatatatatttatattttaaatttaagttctaggatacatgtgcacaacgtgcaggtttgttacatatgtatacatgtgccatgttggtgtgctgcacccattaactcgtcatttacattaggtatatctcctaatgctatcccttcccccttccccctccccccaccccacgacaggcaccggtgtgtgatgttccccttcctgtgtccaagtgttctcattgttcaattcccacctttgagtgagaacatgcggtgtttggcttttgtccttgcgatagtttgctgagaatgatggtttccagcttcatccatgtccctacgaaggacatgaactcatccttttttatggctgcatagtattccatggtgtatatgtgccacattttcttaatccagtctatcattgttggacaatgttgaacaataatgtagagtggtatgagaaaagaaaaagacactaattagcttttgggaatcttttaatttctttttttcttttcttttttttttttttgagatggagttttctcttgttgcccaggctggagtgcaatggtgtgatcttggctcactgcaacctccgcctcccggattcaagcaattctcctgcctctttctcctgagcagctgggattacaggcatgcgccatcacgaccagctaattttgtatttttagtagagatggggtttcttcatgttggtcaggctggctctcaggtgatccgtctgcctcggcctcccaaactgctggattacaggcgtgagccaccgtgcttggccttaatttctaaatttatttttttcttatggtactttgttttaggggaaaaaatctctcaaactgtgttttccctctattctcacatcacaaccatcatcatcaacacagaagacttgtgtgaccagaccaaacgtgtggggatttccccctacatatcaagcagtagacatcagctaggtgtcctccaattcaattcaaacactctccacccggaaatagtatcagatctcacagtttgagggcccagtcccacaagactgactgttccctcctccccaccagttacaagtctgagcctccagaacttctgaccaactggcttcaagttggggtttccacattctcctctttgggtctgattaatttgcttaagtggctcacagaactcagggaaaagcttaacttagtttatgggtttattacataggatattttaaaggatacaaagaagctgggtgcggtggctcacgcctgtaatcccagcactttgggaggccgaggtgggtagatacctgaggtcaggagtttgagaccagcctgaccaacatggtgaaacctcgtctctactaaaaatacaaaaattagccaggtgtggtggtgcatgcctataatctcagccactcgggaggctgaggcaggagaagtgcttgaacctgggaggcagagattgcagtgagctgagattgcgccactgtactggtcaacagagggagtctttgtctcaaaaaataaaaaaaaaagaaaggatacaaagaaatagccaaatgaagggatacatagggcgaggtctggaagggtcccgagtacaggagcttctgtccccatggagttgggatgtacctccctcctggcacacgaatgagttttgcaccttcctgtcaacctccatgtattcaaaatgctctctggaagctctctgaatcctgttttttgagattttatggaggcttcattacataagcacgaatgacaactgtgtagaaatgtgattggacaaaatgggtatgttctcatactaaccgactgagtggggaagcccaccaaggcctgtccagattctccttgacctctctgtgcagcattcctccctccacagtaaagggcaggaccctctctagaatgagaatgagaatgaggatctctggacccacaatcagattagagtcttgccttggatcaggtaaaaggaggacaggagaaggtcagagagagagattctgtttcctgaggattgctcctgagccctaaagcaccccaacattataacagaagaccgtaaccagggctacggagggttgtaagccaggagccatggacagaaacatacatgtgtgtacagtagctcacgcttttacttttttggagtcacaacttcttaatggcttgatttcatgacatattttctttggtcttccagaactttcctcttaaaaaaacacagcaaaaaaacaaaatttgatttgaaatttttgagatttttttttaagagtcattagcaaatccactaatgaattttccccaagcagttaggagatatttctcttcattacacctttgggatttgagtgcttttgctaaaaatttaagttttttttcccactacggttttaatatgaacatgtggaaagacttcttgtatagaaaaatgacttgcaaaatattattttttcaggttctatggagtgatttcccccccttaggaaaaaagaactcaggaattttaagtttatatgtatatatatttattttattttattttatttatttattttaagacagactctcactcttttgcccaggctgggggttcagtggcctatctcggctcacagcaacctccgcctcctgggttcaagcaattcttctggctcagcctcccaaatagctgcgattacaggcgcccaccacaatgcctggctaggttttatatttttagtagagacagggtttcaccatgttggccagtctggtctggaactcctgacctcaagtgatccagctgccttggcctcccaaagtgctggaattccaggcgtgagccactgtgcctggcctttaagtttgatattttattcagataaatatggaaaaaaaattttagctttattggcaaaatttattattcatatagaaatcatctgataatctgatagattaagtacagccctgcaactggattctaataaaccaagtcctctaggtcattaagattgttattggacatgaattcagtcattgagaaaataaaacattgttttgttgttcctcagttgtggtttttgttttttttttaagatagagtttcactcttgttgcctaggctggagtgcaatggcatgatctcagctcactgcaacctccgcctcctgggttcaagtgattttcctgtctcagcctcccgagtagccgggattacaggcgtgcgccaccacacccagctaattttttgtatttttagtagagatggggttttactatgttggccaggctggtctcgaactcctgacctcaggcgatcaacccaccttggcctcccaaagtgctgggattacaggtgtgagccactgcgcctatccgtactgttttttttaccccttgctttttttttcctttctgctgagatgctttaggttttaacagacatgtgattgggccgaggggcatgtgaggaggctggacaattaactacagttagcttattgcatttatcagcaccagattgtgtgtggttgaaatggccaaggtttgatgttttgttatgaatgttccagtatatcttataaattacattttcttaaattgatttgttactacttacaataatgtttgatagtattaaataaaatcctacttattctgttaaattcatataattggtagaagaatcatagtccggttattactcttttttgagacaaagtcttactctgtcacccaggctggagtgcagtggtgtgatcatagatcactgtagcctcagcctcctgggttcaggtgatactctcacctcagcctcccaagtagctgggaccacaggtgtgcaccaccatgcctggctaatttttttttttttttttttgagacgaagtctcgccctgtctcccaggctggagtgcaatggcgtgatctcagctcactgcaacctccgccccctgggttcaagcagttctcctgcctcagcctcccgagtagttgagattacaggcgcgtgcctccatgcccagctaatttttgtatttttagtagagacagggtttcaccatgttggccaggctggtctcgaactcctgacctcgtgatccacctgcctcagcctcccaaagtgctgggattacaggcgtgagccaccatgcctagcccacctggttaatattttttattatttttgtagagatagggtctccctgtgttacccaggctggcctcaaactcctagagtaaagtaatcctcccatctcagcctcctaaagtgctggtattataagcatgcagttcttattctcttgttgatctgattataaggctctatttaagacagcataggcccaactggcagaagtaggtgatggctggatattgagaaataatgttttctttgcatgatccttaaggaagctgacctggttacaactcatgaattgggacataattttggagcagaacatgatccggatggtctagcagaatgtgccccgaatgaggaccagggagggaaatatgtcatgtatcccatagctgtgagtggcgatcacgagaacaataaggtatgtgtgtgtcgagaattttttatgtggtttggaaagaggctgtgtataatgatcataatgagagctcagaaacgtattccattcctaggcgtttccctagggatggatgtgcaaattacaaagtaccttgaaacgtggttgtgtgttttggggtgaagcacggttcatctaaatctggttaaaactatcatttggactttgttgtcaagcttaatggtgtagatttgagctctaggaaaaattactaataataatggctttttttggagttctggatttcagggtctggtgggctcaggctttatgttaaaaatttgtcatttcatttacaagttgtcattcattttaactctacaatttacatgtacagtttacacgtttttattaacttttgcagttaaacacatagtttgcctgactacaagcctcatgggagaaaggcccttccttgtctgtcttattcatagctctatcttattcatagctctatctccagtgcctagtaggagtatctggcatgtaacaaatatttgttgaataattaatggaatcatttactattgggggtttctgatagagaatactagttgatttgtgatactgtaaaacactttcagagactttaagagtgccgtgactaactcttagagtctgaactaaaagttgtgttaataaatatctggttctttcattttatttgaagttaaacagcataaagcagtgtgaggaaaacaatagttgcactgctgagttaaagagggtcggtggggagagcttaaaggagtctgattctaatcacaaaagattgtgaagtatttgtcctgactcctattttgagcttggctgtgggctaatgtgcaagccttccctggacacagagggcaagattacttctgcttttccctggctctgacaccctgctttctgaaatttctgcctcctgttctttttgtgatctttgattgttgcatctcatttttttttggctttttatgtatattttctgcatctcattttctttggctgttatgtgtaaacagttcctctgttactttgcatgttatgttttatttttcctctgcttgacaacttgtgccagagaaacatttttctacccctttttgtctactcttccaacctgtcaaactgttgaattttccttctcttttcatagtctctgcatttctaatcatgttcactatagttcagtgctgcccaatagaactttctgctgcggggcgggggatgttttgtgtctgctctgcccagtatagtagccactagcccagtggagcaattgaaatgtggctagaaactgaggaactgaattgtaaattctattttatttaaatttttaataatgtttgcctgtgatgggagacgggaatgggcattaactgtaaaaggacatgagtgagattactggaaggatggaaatgtcctaaaattgacttatagcaatggtttcaacacttggtaaagttattagaaatcactgagttatatacttgaaatggatcaattttgtgatatgtgaaatatgtcttaataaagttgttaataagccaacaaacaaaaacagcagtgtgggagcagaggaaaagtagcgcggatgtagaggagctgtgaagtcataagttgattattgttgaagctggtgaggggcacgggggcattcatgataccatcctgtctacttcatagatgcttgaatatttctgtaatagaaactgtaaaatatgtgactaggaacaaaatttaagtagccacatatggttggtggctaccatattgcatactgtttctctaagtaataggtcatatgcttcttggttatgaggatagtgtcagaacttgggagcaaaatgttttactttgcagactgcctgggtggacatgcatgctgctgactcttcctgctgccagttctggggctcttcaaaacagccctgtaagaacttgccagtgaggcatggtggctcacacctgtaatcccagcactttgagaggccgaggtgggcagatcacttgagcctaggagttcaggatcagcctggacaacatgtgaaactccatctctacagaaaatacaaaaattagctgggcatagaagcacatgcttgtagtcccagctactcaggaggctaaggtaggaggaacccggggagttcaaggcggcagtgagccaaggttgtgctactacactccagcctggatgacagagtgagactttatctcaaaaaaaggaaaaagaaaaaaaagaacttgctaatgagaatggggcctgggaagaactttttttttctggagctgccagtctgtatcaatgaagaacaatttatttattttgtcctgagcacatcatatttagtctgtgtttttctagtttggttgcccaagtaggagtccccttgtaagaagataatgtgcatcttctatgttttatttatttattattatttattatgattttttgagtggagtctcactctgtcgcccaggctggagtgcagtggtgtgatctctgctcactgcaacctccacctcccaggttcaagcgattctcctgccttagcctcctgagtagctggggttacaggtgcatgccaccacacctggccaatttttgtagttttagtaggatggggtttcaccatgttggccaggttggtcaactgactggtcaacaaactcctgacctcaggtgatccacctgcctcgacctctcaaagtgctgggattacaggcatgagctgctgtgcccagcctatgttttaaatgaattccttaataaaaatatttttaactgatgaaaagggcttacaggacaaaaataaagtagttccttgacctagaaagacagaacccatcaccctctactaggcaagcctatgaagagcagtttgccacaggtggacttctctgtggacagatgacattagtgaaaaggaatgtaggacctttgagattgtaacttcttaggaaggtttgctgaacggaagaggaagtcttatgacaaggatgcaaacagaagctgccagatcttcagggatgtgtaggcagaaagccagagttgcgggttggtccttttatcgttagtgctctccagctgcttgggagttgtaactctgacaaatcagtgaagaggtcttcttatctgttcactgtgaattttaactccattttaacctgataaaatggaacccagagatacatgatgttgatgaataaacccaccaaaatgacaactgcctgaggccccgattagaataaccagaccccttagacatctgtactgtaacgacagatttgggccgggcgcggtggctcacgcctgtaatcccagcactttggagaccgaggtgggcagatcatgaggtcaagagatcgagaccatcctggtcaacatggtgaaaccctgtttctacaaaaaatacaaaaattagctgggcgtggtggcatgcacctgtagtcctagctactcaggaggctgaggcagaagaatcacttgaacccgggaggcggaggttacaataagccaagattgtgcctctgtagtccagcctggtgacagagcaagactccatctaaaaaaaaaaaaaaaaaaaaaaaaaaacagatttgaagatgttttttaaaaagccagttagtatttctgtgtaagatgaggtctttgctatctttctgaaagtagctcctttggtgtctgatttggtggttacaggcacctttggagggtctcatacacttggctctcaggggcttcatgattgttgtctggggtgaaagtgaagccattttggcatctgcagagcactttggagaccccgacctaagaagtaactatgctcagttttccctaagcctcttctttttttgataacttcaggaggtctggaaaatgaccgcagttttagagctcctgataaaaccctcagccttaaaagggagttatcctagtggttctgtactccagggtgggaaggtagtgtagagactttttgagacactggtcttgctggttgatgaaaatgtttaggtaacaattggggatttaatttatataaaatgtactattatgcctattactaagctcaaatatttaaacaactttaaacttggatcatccatataagtagccaaagaaggagaagaaaccccttctcctgcatttctgaattgttttgtctgggacaacattaacctacagaggttcttaattcttgtcactgcatgagtggcatgcctgaggtgaggagatttcaagtctgatggagctacgagctctctgttgtgctattctgcttgtccttaagtgggctttgactgggatgtttggtctcagtatttgtatagcttgcttaccttcgtaagaagaattatagatccttaaccaagttcacatcagccatttagcattctatggagggaggttcccagttccatatcagtggcctttggaggagactgtggtggccttgccataactccagggtggctctgatggtggttttacattaagagtttgtctctagagaagacacaaacattgcatgggaatacatttttatgatattattttgggtccttattgccttttttctctcaagatgttttcaaactgcagtaaacaatcaatctataagaccattgaaagtaaggcccaggagtgttttcaagaacgcagcaataaagtttgtgggaactcgagggtggatgaaggagaagagtgtgatcctggcatcatgtatctgaacaacgacacctgctgcaacagcgactgcacgttgaaggaaggtgtccagtgcaggtgaggagtctctccacagggattttgggaagttggtataacaagatgtccaaaataagagaagactgaacttgcaggggctttagaatcaactgaaaggggtgtgagtgtgtttgtttacatctacctcttttgcccttcacagcaagaaattgctttctgggcctggcacggtggctcactcctgtcatcccagcactctgggaggctgaggtgggagaaatgcttgagaacagcctgggcaacatagtgagacactatctcttaaaaaacaaaaaacaaataagaaaagaagaagctttctggaaagcagtgtgacattatgtaacaaaatccttgaccttgcatgctccttggtttagcagtcctatagttaaaagaatcttttttttttttttttttcctgagacagagtcttgctctgtcgccaggctggagtgcagtggcgcgatcttggcttactgcaatctttgtctcccgggttcaagtgattcccctgccttagcctcctgagtagtgggactacaggcacgcaccaccatgcccggctaattttttgtattagtagagacgaggtttcactacggtggccaggatggtctccaactcctgaccttgtgatccatccaccttggcctcccaaagtgctgggattacaggtgtgaggcaccgtgcctggcaaaataatcttttttatttaatttaatttatttatttattttgagacggcgtctcgctctgttgccaggctggagtgcagtggcgcgatctcagcgcactgcaatctccgcctcccaggttcaagcgattcccctgcctcagcctccccaataactgggactacaggtacgcaccatcacgcctggctgattttttgtattttagtagagacggagttttagcatgttggccaggatggtctcgatctcctgacttcatgatctgcccaccttggcctcccaaagtgctgggattacagaggggagccaccgtgcctggcctttattttctttttgagacagggtctcagtctgttgcccaagatggagtgcagtggcatgatcatggctcactgcagcctcaacctcccaggctcaatcagtccttccacctcagcctcccggatagacaggactacaggtgtgtgccacctggctaattttttttgtattttttatagagatggggttttgccatgttgcccaagcttgttgtaaagtcctgggctcaagtgatccacccttctaagcctcctaaagtgtggagattctaggtatgaggcaccatgcctggcccaaataatcttttatttctttttttttttttttgagacggagtcttgctctgtcgcccaggctggagtgcagtggcgtgatcttggctcactgcaacctccgcctcctgggttcaagccattcccctgcctcagcctccccagtagctgggattacagtgtgcaccaccacgcccagctaatttttgtgtttttagtagagatggggtttcaccatgttggccaggctggtctcgaactcctgacttcgtgatctgcctgcctcagcctcccaaagtgttgggattacaggcgtgagccactgctcctggctgcccaaagaatcttttgggcaacagagataagatttaacaagggtataagatttaacaaggtttttttatggctacatcctaatagcaaaattttggaaacaatcaaaatgacagtcttgggatatgaatgttatcatgattctatatactggaatagtgtggaggaagtaggttacaagttagaaagttacccaggttttcattttttatatacactgatagaccagtgcctggcttagaagtaaaagggttaaacttcagttttctggtgaataattgagatttaactggatacagtgcatattaacgctgtaaatactgatggggagtagagttctggctgccgagtgtcttagctatggattgccttgtggccccaccttgtcttttttttttttccttgtctttttttttttttttgagagagtctcgccctgttgaccaggctggagtgcagtggcgcgatcttggctcaccgcaacctctgccttccaggttcaagctattctcctgccttagcctcccgagtagctgggattacaggcatgtagcaccatgcccggctaattttttgtatctttagtagagacggagtttcaccatgttggccaggctggtctcaaacccctaacctcgtggtccacctgcctcatcttttttttttttttttttttttttgagacagaatttctctcttgttgcctaggctggagtgcagtggtgcgatctcggctcactgcaacctctgtctccggggtccaggcgattctcctgcctcagccttctaagtagctgggattacaggagcgcaccaccacgcccagctaatttttgtatttttagtagagatggggtttcaccatgttggccaggctcatctcgaactctcctgacctcaggtgatccacccacctcggcctcccaaagtgttgggttgggattataggtgtgagccacctcgcccagcccatcttgtcttttttaaattaatgcgttaaatgaatgaaaaccaagggcaccaagatgtttcacaggtgattgctgtgttcccattcttttctcctatagtgtggcatttatgtgacctcacgcacattaggaagggacaaagtgtgtgcaggtagctctagcagcggagatgtctgatgatgtaggagtgggtgacggagccaggaggtcttccccggtgatcttcaggtcactgtaacgtaactgtagcgtttgatttgatatggggccataatttgaattgctctgttcctgtctgctgttcttctccagtgacaggaacagtccttgctgtaaaaactgtcagtttgagactgcccagaagaagtgccaggaggcgattaatgctacttgcaaaggcgtgtcctactgcacaggttcgtgttcttgttgcttccttggaatgctgtgggtcaagtgtgtgtgtgtctttgaaaaacaagattatgttttgttcagatgagagacaccttatttttaatctcatatgccgggttgagtttctggcactccttagtttgtgacacttggctttggtgggtttaagacctgtttctatttctctttcatttccatcactctcctctttctcctcacagacatccactctactgtggttaatatttgcctggatatgtgtatatccttgaaagatcatatagtgttattttgtgcatgtatgtgtttttaatgtgccaaaatgatattctaccttaaatttacttttaaaaaattcagtatcatgttttaaagaattacccatattgtgctacagataatataacaaggtttttaatggctacatcctaatagcaaaattttggaaacaatcaaaatgacaatcttgggataatgaatgttatcatgaatctatgcactggaatagtgtggaggaagcaggatacaagttagaagggtaaccagtttttctatatgtatctatatgtatttcactgttggggacacctacatattgtttagttatatgattggctgtgttttacttacaagtcaccaagtggtagctacttccattgccttcatccccttgatattccagataggacacagatcacatcctcctacgtcccttcaggaacctgtgtgtttctctgggtactgaggagtgtcattgtgtagtcacagaggcaggatgtgctggtctctagagcaccactgctaggttgcctgtgtctgaggactccttatcctgacgttctggccaacgcttggaattaccctgctgtcctattagcatgatgagtataaagtaatctcttgttcttacttttttttttaacagcccttgtcctaatgcacttacttacatttttcttgagcatctctttatatttttcagctattcagatttctcctgtgaatagccagttcatatatttggttcattttttaaaaattgggtttcatgttatttcactactgtgaatttggaggagttcttatgtaatcatccatttgggcatacgtctcctatctgttgccattctcagaacagaaatctttaacgtaatcaaatccatcattttgttgtgtgtgtgtattttttaaacacatggttcagaaaagccatggcggatggttaaaaagatattttccacagctgcttctattagcttcataagttgtccttttacattcaggacttgaatctttctggagctaacctttccaggtgtccagtatcttttgttcggtcaattgttgctttaaaaatttcaaagctatgttattactaggtatataaacggacatatctctacatctttatctgctgttccttaccagtatataatgttccttttttacccttgcgatgttttttgacttaaattgtcaaaaagcaatattcagtttgctattctagtttttttgttcctctgatatatctatctgtcccattcttatatttttcaaaatttgtctctcttggttggttggtttgattttgtaatagctttattgatacataattcacactcatgtagtttgcccatttaaagtgtacagtttaatgatttttagtatattcagatttatgcagtcatcacaattaattttagaacatttacattactccagaaagaaaccctgtatcctttagctatgatcctccaatccccccattccccacaactcagagcaaccactaaccaccctattctttatggagttgtctgttttgaacatttcatataaatggaattatacaatatggtttcgtgaccacatattgtatgactggcttctttcactgaacatagcatttttaaggttcatgtatgttgtagcatgtatcagtacttcatgtacttttattgctgggtaaattccattgcatggatatgccacattttgtttattcattcattggttgatagacatttgggttgcttccacttttttgctataacaaataatgctgctgtgaacatttatctatgagtttttgtgtggacagttcctttggatattattcaggaatagaatttctgggtcatgtggtaactatgcttaatcttttgaggagctgtcagactgttttccaaaatggctacaccattttacagtctcagcagcattgtatgagggtcccagcttctccatatcctcaccaacacttgttatcttttttattgtaactatcctaggttttgtgataaggatgcaaacagaaagctggaggtcttcagggacctagtgaatgaagttgtgtcctattttggcttgattttggttttccgtgtgcatagtatgacatgttgcccatgtttttatcttttgggatctgtcactatcacattactttgccaaatgttaggaacctgatggcccggcacagtggctcacacctgtaatcctagcactttgggaggccgaggtgggcagatcacgagatcaggagatcgagaccatcctggctaacacggtgaaaccctgtgtctactaaaagatacaaaaaattagctgggcgtggtggcgggcgcctgtagtcccagctacttgggaggctgaggcaggagaatggcgtgaacccgggaggcggagcttgcagtgagccgagatcacgccactgcactccagcctgggcaacagagcaagactccatctcaaaaaaaaaccaaaaaaacaaatgttaggaacctgaatatctaaatcaagctttaaagaagcatttgctagctatgctcaatgtttcatcttcactgtaataataaaatagattgagaaaaatgctttcttttaaataaacgtaagtaaaacaatttgaaaacgtttgttcttatcaaacagccttttgttcccttgatattttatacaaaatagtagatagcagaggataagttcctgataaggaatcagtattttctagcaggaaaagctagagaacaacaacctcaaaaaaaaaaaaaaaaaagaagaagaaagaaaaaaagcaattagcatttcacaaccagcagcagcagcatcacctgggagcttattagaaatggaaattgtcagtcccctccctggatctactgcatcaaaaaatgtgggaagggaggccagcagtctgtgctgtgtaaccttctgtcaggtgatttccatgcatgctaaactttggggaccatgctagatagatgataccattttcagaattattttcctacctgtctaatactctgactttagtcttttaagaacagatgctcaacagatatttattgagcattttttaatgtatcagggcagtatcatataccaaaaatacaataatgatccacaatataaaccttccctgagctcactggacatcatactttcagtaatagtttgttaaatgactgttgacatgatgaatgcccagtgctcatgaaaggttttatgagaaccagaggcaaagtgcctggttatctgttgggtacttaataaaccatcacttttgtttgaaactggccagattttctgtacattttgtgttactgctctgaaaccctctaagtcagaattcttttgattggcttcattcttcagctgaaaggccagtccagagctgtggatatatagtccattgctttcataaagtgttttttttctcctcctctatttgtgttgacttttagctacttgtgctattcattttccagaatgattcactcattccatcctgtctctcccagtttaactttctttggtgggttttctttggcattattggcctgggcacagtggctcatgcctatcattccagcacttggaaggccaaggtgggaggatcccttgagcccagcagttttacaccagcatggtcaacacagggagatctcgtctctcaaaaaaaaagaaagaaaattagccaggtatggtggcgtacgcctgaaatcctaggtacttgtgaggctgaggcaggaggattgccggaacctaggagtttgaggctgcagtaagctatgatcacacccctgccttccagcctgggtgacagactgagaccctgtctcaaaagaaaaataaaaagaataattgatttatttaagaaatatttgtagtatacctataatatgatagggattggagataacttaatagatttgatcattgctgtcatggggctttccagtctagtagagggaaaacagaaaataacattaaatatatatatataaattgcaaaacatatgcaatgaaggagagaaggagtgtgatagtgcataatggaagtgggaggccacatcaacttagcatcctcagggatatctcagaaaacctttgagacaaaacttaatccataagaaaagccagctaattgccccaaaagagtggaaacaccagcattccaggtagaaggaatagtatctgttaatattgaaggaactgaatggaggttgtcatagccaaagcagtgggctgtgggagagttgtgtgcgatgaagtcagggccagatagggaaggccgtggagttcttttaagccttcatacaaagtttgcaatttattctaagtaatagcacataggatattcttttatatatgactgtgagatgcagaagtggagaccatgcattctaactggggcttgggaggccagggactcatgcagcctagcctggcacatagccaggcactcccatttaaatgctgattgctggtgagatgcaggctcttgtcctagctctgtaggtcactttttgcttttgcaaggtaagatgctcacttgtatgagaaacagcgtattatgcacctgtagaactggtggacctgtgactcattctttttgttatgactggtgtttgcttccaggtaatagcagtgagtgcccgcctccaggaaatgctgaagatgacactgtttgcttggatcttggcaagtgtaaggatgggaaatgcatccctttctgcgagagggaacagcagctggagtcctgtgcatgtaatggtgagcagttttattcccagtccagcagcaggagaaaacatggcctttgtctgccaggctcccttcctccatttggaggttgtgcgaatgacagcagtggtgagatccaagccgaggatgaggggatggggaagggcagggtggtgtctggagacaggcatctctgcatgcagatccaccatacctgggagacctatcctgttggtgtttcttcttgctgcagtttcaggccatatggcaggctttgaggtgggagaggagggaattttgttgggggtgagtgggtgggtaggtagaggtgtgtcctagccttcctctgctccatatcatacaaaccacaaaagcagcagtagctatctacattacattggcatggaactaggatactcctgcaacaactccaccagagagagctgattccaggacctaaccccactagatgaggatttttgcagttatcaagaaggctgggtctgctcccctctgatctcttagagcagcctggggcaggagcctctctcctgctggcctgtcagttttccttaggtttctgtgctattttggaacccctgggtttgagggcatcctcatggactggtcagggactggctggactctgcttcccaccccacttaaaccatgggagtcgatgagggagttctcttgctttcaaaatagacagagagccaggtgtggtgactcacacctgtaatcccatcactttgggaggccgaggtgggcagatcacttgaggtcaggagtttgagagcagcttggtcaacatggcaaaacgctgtctctactaaaaataaaaaaaattagccgggtgtggtagcgtacacctgtaatcccagctgctagggaggctgaggcaggagaattgcttgaacccagggggcggaggttgctgtgagctgagattgcgccgctacactctagcctgggcaacagagcgagactccatttcaaataaataaataaataagtaaaaaataaaataaataaaagacaaagaacccggtagttaaataaaatcactgggttggaagctcaccatccatacagtggagtgaggaactcttccaagttcaataatgtgtaggtaaagaagataggttgagggcagtgtctcacatctataatcccagcactttgggaggccaaggtgggtggatcacttgagctcaggagttgtttgagaccagcctgggcaacattgtgaaacctcacctcttaaaaaaaaaaaaaaaaaaggtaacacgtagcagatgccaaataaatctgttgtgttgaatgccaagaggcttggggtgctctggaaggacagagcccgacacagtaaaagtccaagaaatattttataaattagtgaatgatgaaaaggttttctttttttttttttgagatggagtctcactctcgcccaggctggagtgcagtggcgcgatctcaggtcaccgcagcctccgcctcccgggttcaagtgattctcgtgcctcagcctcctgagtagctgggactacaggcaagcaccaccacatctggctaattttttttatttttagtagagatggggtcttgccatgttggccaggctgttctcgaactcctggcctcaagtgatctgtccgccttggcctcccaaagtgctgggattacaagcgagagccactgctcccggccttttctgaaaaggttttctttttgcttgtttttgtgttctagttgatttctttttctcctaagtatggtttaattttctggcatttctgccattcttatgtatgcccacatggctcacagatgcccggtgttttatcctgtgacctgtcagagctgttcttgggaggagttgtggagctttggctgcagggctcatgctcctggggtcactgagctccccacccaagggtggacagttgtgtcccagctgctctcgctttcagggagccagtgtgggccctgaggggcacactttagactgaaaaaccaaggattgaagtcagcagggtgacaagaaagttgggacaaagggaagcatttagaagagcattgtgaggggcttgaaggggagagaatagttagactttgaagagaggtcttgaatctagaatggatttttctctgcatttttttttaaaccttgtggcctctgtcactgaaggctgaggagtgtgacctcagaaactactccttggtgggggctatggatagtattagctatttaaataaaaaataaatgtgatttcttacctctttgggagcatggtcagggaggaaagaggaggcaggaggagaggcaggtctcagaacaatccagctgtcaatgcgtgttctctgttccagaaactgacaactcctgcaaggtgtgctgcagggacctttctggccgctgtgtgccctatgtcgatgctgaacaaaagaacttatttttgaggaaaggaaagccctgtacagtaggattttgtgacatgaatgtgagtatttatgtacagctttttctgtaacagccagataggaagtttttattttgtaagtacttgattttgcagatgaaaacaaatcaaaacacaagtggggctacatccttctggcccattgttatctacgggtattacttaggaggagaagacggagtgctttcaggtccctgcctgtagtttccttctgtggtgggaggctttgagcccagagactgagaaggactggggtggggactttatggtaaagttggttggtttcaggcagtgggtcctaattatgttttcctagattacttacagaactgactaagattgcaaaattattcagggtgtgattttgaaacaggtgctgaatgagtaggaaagacctagaaggctgcttgacttacttaagccagacccttttgttctctagagaagcataatttttctcatgcagaatgatgggagagggttttaagatttacgaggcttcacagggagtctggctgtgttgttcactgtccactgtgtatgtgtagagtccttactggaatgcctcatctttagcaaactggtttccttgatttttgtctcctggtaattctaaatcacttgtaaaaatggagtaattatgaaagtgttaatgacagatgttctactttcttgggtactcattacgcggaagttattgccttgtgtcaaagatgggaaaacgtttgattttaatgaagccctttacatgtcagttatttttataaagctacattgcttctgaatacattgtgtttgggaatgatgctgtatgtatgttttttcttcatagggcaaatgtgagaaacgagtacaggatgtaattgaacgattttgggatttcattgaccagctgagcatcaatacttttggtaggtgatttccccagattacttactgagagctgagtcaatttctgtgatgacattagaaaagtgtgctttcagagtgatgtgctttaattctgcagtagaaggtggaactattcacagctttagttatgaaacaactttgttggctagaataaaatgaactcatagatagtctgtccccgtggagcttggatgcacagattttctgacaagggaaataaagtcaaaatactggcttccttctttacccaaaaatatccatgtgattagcataagcatagtttaatgctatagactgaatcctgattgatgtaagagtgtttatttgactgaatgctatatactgaatcctgcttgatgtaaaagtgagcctcatattttgcagaagcagggtatatcatgttgtcacgagtccataatttaatcacaaaaataatatccaggtaacaaaaactttgtcttcttaagcatttactagtagtagcattccatattaatctgttgacacagctactccaggtaacatgttgaatattctgcaatctcttcctgtcagccagtatatgagggctatttctttaaaagcacttggtatggagagatggtgtggtgtaatacaggcagcacagacattctgctctcggtagtatgtctagccagcagctctggcatttgacacaatggtaatatcctaagagcatttcactttagatttgtgaagtacttggtcaagacattaactgtttggaattgttcacaggaaagtttttagcagacaacatcgttgggtctgtcctggttttctccttgatattttggattcctttcagcattcttgtccattgtgtggtaagtcatcaacttttaagtaattaaatgttttatttaaattttgatcaactccaaccatgtaatctctggaaaaggtaaaacttgttcttagcaaagtttggcctgatatttccaatagctttttttgttgttattcctaggggaacatgtcttgtagaaagcttaactaatggtcttttaaaaaaaatactatttttgtgtgttggtgttttaatatataaatttcttaggaattttatacttttaagcataggagactgtttaactggatttgtccaggtcctttgatgagtaaagcccttattgaagagcattttcaggctgacttcgttgcaatagagcaaatatcaaacatcggcatttcagatgttccccatatatcatgtagattattggcagcagatggctatgtcttcagccttctgcacaaataggatgtagggactggggcccagctgtcatatagagtatttacatcttccccaaaaaataagagtaagcagtcttttctgttctcattcagaatcagtaacagctacaagttgaattgggctttgactaaggaactcctggtcctttataaatttgaggccctttttcataaatgttcttacgaatccattcacttgcatctgtggggaatggggatttgtctgctgtagagatgagaaagtcacacccaggcttccagacttgttttcccaaactctttcatagtggccttcctatgagcatttaaaaattccagcacaactctgatgacaaaggagtttttcctactgcctccttcctttcctttcctgctggcttctcctgcctaggggccatctcacagagcagctcttcctcagggtggtgagcatgatgggtataggaagatctctagggagcacttgtgctgaagaaagctgaaggtgacgtgcttgaagctttgacagatgtctctggatgacagtgccatccatcacgattgcttctattggaggatggaacctattttgtttacagggaagttgcacatgtggacaaggcacgacccttgatttcagagcaaagcctccgataggagggagggccatggcttgtttttggtcatagaatgcattgatggcacccagacaggaagcctagtcctggattcttggtccttgccctctgtcacctattatgcttcagccacaggcagggatggggcagcagatggccatgtggttagccttctgcagaagtaggatgtagggattgaggcccagttcctccagcagagcatggtccacagaaactgtggagacagctaagagagtgaggccatgggccggggcagtgcgaagaatgctgcaggcccagccacctgggtcttcctaccagttgcccttccagtcagtgcggtcctggtgtacccagcatctgggacatttgtcatttcatgcacaggaagatgcctttattattcccctgcccacagagggataaatttctcagaaaacatagcacttaaaccttgcctctttctgtacttaacgccaaaatgtatttcctttgagtgcaaaggaaacacttctagactggtggcataactaaagcttgggtgagaaatggattgtcatctgttgagcctgctatcactttctacaactcaggttctaagttcttcagttagtgttaggaatagcctgtgatgaaatagtactcactaactgaattgtatttgtagggaatgaccttcttgctgtttctttctaggataagaaattggataaacagtatgaatctctgtctctgtttcaccccagtgtaagtataccatatgaaagaaacataatcttcgcctggtctgaggccctgttaggcaaagaccttcacctgacccagcaagagctttcactggctgatggaaggtcatgttgcagcaggaagggtctaggttggaatgtttacccttctgacaacagtgatggtgaacttcgattagttgcatggatggacatttaaagagctgtgctgtccccttcccaagccataaggagtgatttagccattcaacacttagttaatattttgagttcaatttctctcttgggatcttaccttgagaggtttgaatcctcttttgggtcttcaaatggtaagtaagttttcaggatgcttgaaagctagtaattactgtttttgccattaaaagtaatggcattaattacttttgcaccaacctagtattttttagtcacttaggttgagtgagcctcacctagcacttttttcttagcatcacagtgccaacagaataagaggctgtttgatgggtaagggtggagctgtgaggacctccgattcatcttttattcctatcaatcaattgaacccatgtctttgcagaacgtcgaaatgctgagcagcatggattctgcatcggttcgcattatcaaaccctttcctgcgccccagactccaggccgcctgcagcctgcccctgtgatcccttcggcgccagcagctccaaaactggaccaccagagaatggacaccatccaggaagaccccagcacagactcacatatggacgaggatgggtttgagaaggaccccttcccaaatagcagcacagctgccaagtcatttgaggatctcacggaccatccggtcaccagaagtgaaaaggctgcctcctttaaactgcagcgtcagaatcgtgttgacagcaaagaaacagagtgctaatttagttctcagctcttctgacttaagtgtgcaaaatatttttatagatttgacctacaaatcaatcacagcttgtattttgtgaagactgggaagtgacttagcagatgctggtcatgtgtttgaacttcctgcaggtaaacagttcttgtgtggtttggcccttctccttttgaaaaggtaaggtgaaggtgaatctagcttattttgaggctttcaggttttagtttttaaaatatcttttgacctgtggtgcaaaagcagaaaatacagctggattgggttatgaatatttacgtttttgtaaattaatcttttatattgataacagcactgactagggaaatgatcagtttttttttatacactgtaatgaaccgctgaatatgaggcatttggcatttatttgtgatgacaactggaatagttttttttttttttttttttttttgccttcaactaaaaacaaaggagataaatctagtatacattgtctctaaattgtgggtctatttctagttattacccagagtttttatgtagcagggaaaatatatatctaaatttagaaatcatttgggttaatat

SEQ ID NO: 15377 - DNA, 66093 bp, Homo sapiens
gggatctgaactttggtggaagtaagtttgcgtgaacttttagtgtattttaaaatccttttatctttcaaaaattgacgtgtaagatactttaattagtaataaagtgtgaaataatgttttcccagtgtgtgaaattgtaggcttgcatggttgtactggttcccaaatttcaccatgataccatgtgtagtattttttttctttatatttagtggacagaaattgtaatggattggtatggatactaaaggtgttgagagtgttatcacttgaacagctgtcttatgattctttccgattgaaatggattacaagtgactaatgaaaggcaagggatcttgttaggaagtgctgagaagtggtaagtcagtacaaattgaaggacattttgaggtaggattgtggttaggatggagggatagggtaagggtcttcattttaaggataaatgttagtaaaaagaataaatatgtattttgagatattaaaattatatttgcaccaccctgacacaactgtttcacttatgttattaatctgttgttcgtaggtaaaaataagcatgagtcccaaggaagcatacagtttaaagagaaacattactttctagatcaattcataacatttgcagatcgtaaggttttttagaccattttttttttccaagacagagtcttgctctgttgcccaggctggagtgcagtggcgcgatctcagctcactgcaacctccgcctcccggggttcaagcagttcacctgccttagcctcctgagtagctgggattacaggcatgtgccaccacgcccagctaatttttgtattcctagtagagacggggtttcaccatgttggccaggctggtctagaactcttgacctcgtgatccgcccacctgggcctccctaagtgctgggattacaggcatgaaccaccgctcctggcccatgtgtttgttttttatttgcaaaatgcagaccacctgtgccagaagaatgcatagacttttcttttttcttttcttttctttttctttctttttttttttttttgaggcagtgttttgctcttgttgcccaggctggagtgcaatggcgtcatctcagctcaccacaacctccgcctcccgggttcaagcaattctcctgcctcagcctcccaagtagctgggattacaggcatgtgccaccacgtccggctaattttttgtatttttagtagagatggggtttctccatgttattcaggctggtctcgaactcctgacctcaggtgatcagcacacctcggcctcccaaagtgctgggattaaaggcttgagccaccaggcccggcctctttttttttttttaaacgaaatatttgaaggacacacaagtattatacgtggcattggaaatacaaagatcagacgatatccatcttcaaatggttatagcatagggaaatagacattcatttaggacacttctaaaacagcatagaggagagtgctagagtacgttatagcaagtgttatcaccaaatgaatcttagagatcaagtctagttttcaaataaaggaggaggaaaatgagtctcaggaagatgctgtcagttgtcaatgatgaacataggccttgtgggtatttttcttttgaagaatgactttttttttcagtttgtttgacagcttacaatataatttgttacttaaccttaccattagattgagttggtcaagactagcaaatagtttcatagttgaaaaacatgctttattatttattttttatgtttattgtcctacaaatactactatattgcagtactcaatatcgattaggcatatgacaacatttttctgaaaggcaaaaaatacctaataaaatgaagcctggtttttagagtcctctatgggtcaccaaaaatgatttcaattgaactgttatgaattgcataatttaggaaagttatgagtcatatgagcttagtcatgatgatatcttgttgaagttgcagctggggtgtataagtctcactttgatttcaaaatcgttttccctttgtgttacttttaataaaagaggatgtagtgggtgggaggaaaaaatataggtcacagatgagggatgagaaagtttgtatctgaaacatgtattttcaaatttaccttgaggttattggcatggggattctccatattgcagtgctgatttcattattgacagcaccattttactcagtattttgacatctggctttctcttttgatgttaattttgcttactggctgcattcctttgaaacctaaatgcttaactgccctaactgctccaagggagatttaatgtaactctgctttatattagtctaagagataaaccatatttcaagagtagaatggagaggaattaagcagataattgtgatggggaaactggagagatccttttgactttcacaggatttcctagaacattaaatataggtttcctccaaggccaattgtggttgatttttggatccttcaccattttctatttgtgagataataagtgtatacagctggaagtgtaatgtgaagaaagtctgaaaaagattgataggaaaggaggacaggaatgggcttcattgaggtaacggaagtgaaatgaaaggcttttcatatatgggttgagcatccctaatctgaaatgctccaaaatttgaaactttttgaatgctggcatgacagcacacattacccctaacacacgattttttcactgttagtggtatattttttactgtgtagtacttatgtgtgaataggtataacaaaacgattacttattgtagcatgtaaaatcagtcaggaatgatggtgatgccagacaaccacagattatttatgtgggtggccgagacagtgacacctttgctttcgaatgcttcgttgtacacaaactttttttcatgcaaaaaaagttacttaaaaatattgtttaggccaggcgcggtggctcatgcctgtaatcccagcactttgggaggccgagctgggtggatcacgaggtcaggagatcgagaccatcctggctaacatggtgaaaccctgtctgtactaaaaatacaaaaaattagccaggtgtggtagcaggcgcctgtagtcccagctactcgggaggctgaggcaggagaatggtgtgaacctgggaggtggagcttgcagtgagccgagatcgcgccactgcactccagcctgggcgacagagcaagactccatctcaaagtaagtgaataaatgaaacataaatgaattttatatttagacttgggtcccatccccaagatacctcattatgtatatgcaaatatttcaaaatttaaaaaattctgatgaatgaaacacttctggtctcaagcattttggataagggatgctcaatctgtatctctttatttactcctaaaatcagccaaggaaatgggcatctctccgttcccccccttccttttttttttttctttgttgttacatgagttgtactggtttcacttcatttgacagtgttctgctaatgactagacgtgtatctctgacctggacttgttctctggagttcatattcagctgcccatttggcacttcaaatataacatgtccaaaattagttaccttttttttttttttgagacagagtctcactgtcacccaggctggagcgcagtggcgcaatcttggcttactgcaacctccacttcccaggttcaagtgattctcgtgcctcagcctcacgaatagctgggattacaggtgtcccccaccacgcctggctaattttttttttttttttttttttgtatttttagtagagatggggtttcatcatattggacaggcctgtgttgaactcctgacctctggtgatccacctgcctcagcctcccaaagtgctgggattacagacgtgaaccactgccccagccagttacctattcttttgattacaagaatgagtagctggacacagtggcttacacctatagtcccagcactttgggaggctgaggccggcggatgacttgaggccaggagttcaagaccagcttgaccaacatggtgaaacctgtctctactaaaaatacaaaaattagccaggcgtggtggtgcgtgcctgtaatcccagctactggggagactgaggcaggagaattgcttgaacccgggaggcagaggttgcagtgtgccaaggttgagccactgcagtgcagcctgggcagcagagtgagactccatctcaaaaaaaaaaaaaaaaaaaaaaaagaatgagtatcggatacaggtttagcctaggactaggcagggctgctggtaattgtggaagtagtctcattgcctaacctgaaacttgcatcctggttactggtcttgctggagagtcttggctcaggttacgtcccaggtctgttgaggagctcttgatagggaattagttgaagcagctcatactctatcctcctttactggtataaatccataaaattgtttagttcccaggctctggggtccctggcctagcagagagcactgctccctttttctcattccttagtcccaacaacccgcacctgacacttactacacgtggcctgcttccctgtcctgtgtgttttggggggtgctgaagaggaaggctcctgtgtcttcagcacaaacacaataaacacttcacagcagtactggctttatgttttccatttctgatatcagaagtaggagcatgacattgatagtgtcattttgggggaacttttcgtacttcatgcagcagagcagtgaagagtgagctgagtgccttggggttctgcagtacactctcaagtagtattttaggaaaatgcaatttgctgaaaaaataaaagaaattaatgtaaaaaatccacaagctgggcgcggtggctcacgactgtcatctcagcattttggaaagctaagggggaaggatcacttgagcccaggagtttgagaccaggctgggcaacatggcaagaccttgtctctacaaaaaaatagaaacaaaaattagccaggtgcggtggcatgtgcctgtggtcccagccacccggaggattgctcatgcccaggaggttgaggctgcagtgagtggtgattgtgccctgcactctagcctgagcaacagagcgagaccctgtctcaaaaacaaaacaaaacaaaaacccacacgtttccagaaccttctcatataacactttatttacattgttcttaaatacgtgtgggacggttatatacataccactatacttatgtgtatatatgttgatatacacacaaaattatatacataatttttgtttgtttgtttttgagatggagtctcactctatcacctaggctggagtgcagtggcgtgatctcagctcactcactgcaacctctgccacccgggttcaagcgattctcctgcctcaggcttctgagtagctgggattacaggtgcctgccaccgcgcctggctaatttttgtatttttagtagagactgggttttaccatgttggccaggctggtcttgaactcccacccttgtgatccacccacctcggcctcccaaagtgctgggattacaggtgtgagccactgtgacctgccatatacataattttttaaagtttcacgattagttttagcttaaaaatgtcagctctgggcttaatgaagaaaatatggatatactttatgtcaatgcattaaagtgaatggccataaaagcttatcccagagacaaaacaattcagatataagagaagtgggagagtggaaggtttatctaatcttctgtaggcaactccacagctacaaccagaaggccattttgttacaggcctgaaagccccgttttctttttattcttctttgaaacctttagaaggaacaaagtattggctactttttaccgctgatgtcagtgttaagaatcttgtgataacatagatttactctccctgctgaaaatcactatgtggctcatcagtaacacaactagacatgatgacttaatgcaaaggaagtcctatgtaaatgagcaatgaaattgcaactgtgtataaggaacaaaatagaatatgaaactccagaatcttttgttttcatttctgtttctcccaaggctctatcattcaaaactccagaatctttcagcatgcaattgtctcctgatatcagcccctctcttgttttgttttcttttttttttttttaatcacagtgagccacaacctaggagtcttttagtggtttctacttggtttgctctgcagcctaccagcagatttcctacattccggtcttgttcccctctagcccattctccacactgcagtcataatgaaatttctttcttttttgggggggatggagtctcactctgtcacccaggttggagtgcagtggcatgatctcggctcactgccacctttgcctcctgggttcaagcgattctcatgcctcagcctcccaagtagctgagattatacgcacctgctaccacgcccagctaatcttgtatttttagcagagacagggttttgccacgttggccaggctggtctctaactcctgacctcaagtgatcgcccaccttggctttctctctctttttttttttttggattttgagacaggatctggcctcgttgcctaggctggagtgcagtggcacgatatcagctcactgcaacctctgcctcctgagctcaagccatcctcccacctcagcctcctgagcagctgggactgcaggtgtacaccaccacgcctggctaatttttgtattttattttatttatttttttggtagagacggggttttgctgtgttgcccaagcttgtcttgaactcctggggctcaagcgatctacccatcttggcctcccaaggtgctgggatgacaggcatgagccaccacagctggcctataatgaaatttccaacttacagctattgccattatccaaagcccagaatccctgatttccttccatagcccttcatggcctgaccagtgcctgactctccagcctcacacttcatattctctctgtactgctctgcactgtagcctcattgagttgctttcacgtctttaagtgttgtgttctattttttgtggaattcagcatatgttatgcccttgacctaaggcctctcctttcttttccttctctggggtgctgcctcatccttctggtcttcaaaaccgtttccctgggaaaacatctttgactcagcaggcagggatcatgcccctgctgtgtctgtgcataactttctgtggctacttctgtcttggtctgtgatgtactttataataattttggtctttcctccagtgtcacaatactggaagtctgtttctttttctctgtgttgtatccttagtgcctgaaaggtaggaggttctcaataaatatttgttaaataatcaagtaaatggagtctggtggaaaagagaaaaaataagtgtagaatgtgtgtgcaagaaaggaggggtagggggatgaaaaagataacaaaagcacataacaaaacaacaaaaagcaaaaacaacaaaaaatgcagatgacaaaaaagataacaaaatgatgactgctgtggcaacttgtagaaagtaaggaaggtgctctcattctagagagaagtaggcagccattgtagttttttaaagagagaatatgggctgggctctgtggcccacgcctgtaatcccagcactttgggaggccgaagtgggtggatcacgaggtcaagagatcaagaccatcctggccaacacagtgaaaccccttctctactaaaaatacaaaaattagctggataggtggtgtgcacctgtagtcccagctacttgggaggctgagacaggagaatcgcttgaacccaggaggcggaggttgcagtgagctgagatcacgccactgcattccagcctggcgacagagtgagactccatttcaaaaaaaaaaaaagaatatggccagacactgagctgagatagacagtgcggcagtgtctggtattaactgtaataaactctactgtcagaagcaggtggtttatacttaagtttattgagagaattggatatggataagagataaactcttgggaaatggggagaaatataaattctgttgtaaagcctgtaaaaaattgagattactagtggttagaattttggaagtgaagtgcagtgaaatattgagtacctgagaggttacttgttagtgaaaacacaatagcagtagtacgtagctacagtttggctccaaaggaagaactgtttttactatagtttgtaatggcttcagaatcttcaatttgagatatccagttattaaaagagaatcaattgcagttgaaatgcattagttaagtattttaaagtgctttagcaagctacatttaaaaagtgcttattatagaaaatatacccaaaataaccaatgatgttactgtcttgtgcttattttttctagacctatttttatacatagttaagattatacaatatgaatatttctgaaatctatatttaacattataacatatgtatttttccatgttctttctttttttttttttttgagactgggtctcatcctgtcacccaggctggagtgcagtggtgctatcttggcttactgcagccttgacctcctgggctcaagtgatcctcccgcctgaaccttctgagtagctgagactacaagcacatgccaccatgcctggctaattttatttttactttttggagagatgagggtctcactattttgcccaggctggtctcgaactccttgggtcaagcaattctctcaccttgacctcccaaagtgctgggattacaggagcgagccaccgccctcagccccatgttcttaaaaaccttttgtgaacgacatttaaaatagttgcagattttttcccctgtctttggaagtgttacaacatccaaccatttcacagttactaatttaccatcattctggtttttgtccttgaaaataaggcaaggctgaataatgaacatctttgtggctaaagtttttttctttactttgagttgttaccttcctttagcttagttcagtggttttttctttttcttttttgagatggagtcttgccttgttgcccaggctggagagtagtggtgtgatctcggctcactgcaacctccgcctcccaggttcaagcagttctcttgcctcagcctaccgagtagctgggattataggcgtctgctgccatgcccagctaattttttgtatttttagtagagacagggttttgccatgttggccaggctggtcttgaactcctgacctcaggtgatccacccgcctctgcctctccaagtgctgggattacaagtgtgagccaccatgcccagccagttcagtgattttcatatttgagtgtgtcagccttgcctggaagccttgttaaacacagactattggatcccactgggcggatttctgtttgagcaggtctgaggggagacctgagcatttgcatttttaacaaattcccagttgatgatgatgctgctggtttgggaactacactttgagaactactgggctatattattgacaatgaaactataatgttgaggttaagttcctaagtcagtaggagtgattatgatcttgaatgaaactgagttcatgtaccaacctgtatcagggaaattgaagaactaaaggaccatattgcatttcagcactgagaattcgtgcagtttgtgaacatgtgagtgctgatatgtgcaaggtttttgctgagtattgtgaggcaaggatgttgtaatgaataaaaaatagccctttttggctttttttttcttcttttgagatggagtcttgctctgtcgccaggctggagtgcagtgatgtgatctcagctcactgcaacttccgcctcccaggttcaagcgattcttctgcctcagcctcatgagtagctgggactacaggtgcccgccaccacgcctggctaattttttgtattttggtagagactgggtttcaccatgtttgccaggatggtctccatctcctgaccttgtgatccccctgccttggcctcccaaagtgctgggattacaggcgtgagccaccgtgcccagcccggccttttttcccccgcctagagatggagtcttgctctgtcgcccaggctagagtgtagtggtgcaatctcagctccctgcaacatctgcctcctgggttcaagcgattctcctgcctcaaactagctgggattacaggcatgcaccaccatgcccggctaattttgtatttttagtagagacagggtttcaccatgttaatcaggctggtctggaactcctggcttcaggtgatccttggcctcccaaagtgctgggattacaggtgtgagccaccatgcatggcctcatttgggaaacttttgatatcagaatcttaggtttttcattagagattgtcagatttccatattcctctggaaggtaaaggcctaattgctagcattctggaagccagttagggtaggagggtaggagggtagggtattgggtagaggataaagaaggggtttgggaaaggtggggggtgtctcttggcagttgtatggttaaattgagtttttgttttatttagtgatatgtgttttttgggtacatgtgatattttgatacctgtgtataatatgtagtgatcaaatcagggtgattgggatacccatcatttgaaacatcttttctgtgttaggaatattacaagtcttctagctgttttgaagtatacaataaattgttaactataatttctgtactgtactatcaaatattagaacttactaatcaaactgtatttttgtaacactaaccactttctgttcatctccaccactcccacttcccttctcagcctctggtaaccaccattctgctgtctacctccacgagatccacttttttagcttccacacatgagtaagagtctttcttttaaaactggttttgtgagcatatttaacatcagtagcaataaacttgtattttaagctcctgttgctgtattttgaggaccttctaagtccattggaaggattttgaataccatagtgtctgcagtgatagttgttgaaagaaagggaaggcatcagtgcaaatatttttagacagtttttaaagagactcaagtcacccaatttgtcttctaaaaatcctgattttggaagaggcagtggagtttctgttgataaaaaatgatttatagtttgtgcttggcacttcctaatggattacatcaggaaagatttattgtctggcactctcattttaacgatactacaattgattattaggtttagatgctaataccttttttacctttatttcagagaagcttgattctttgctctcagactacgatattctctctttatctaatatccagcagcattcggtaagaaaaagagatctacagacttcaacacatgtagaaacactactaactttttcagctttgaaaaggtaatttgaattattcatggaataatgttggggcactgggggcttggtttggcaaaaacaaaaaagtaagggtatctactgaaatcttgggaaattacattttaaagatttgtaattaatttccagtataatgcttattctaaaattcatactggggctgggtgcagtggctcacgcctataatccgagcactttggggggccaagacatgtggattgcttgagctcaggagtttgcccaagctcagcctgggcaacatggcaaaaccccgtctctactaaaagtacaaaaattaggcatggtgacacgtgcctgtaatcccagctacttgggaggctgaggcaggagaatcacttgaaccagggaggtggaggctgcactagccgagatggtgccactgcactccagactgggcaacagagtgagactctgtctcaaaaaataaataaataaaataaataaagttcatactgatgagtatttttaaaaaagtaaatagatattgcagaggtgttaatgatggtaacgatgtttagaaaattctaacataatttaaattaattgaatgcttataaaaccttttgtttttggtgctactttataaccatcaatcatgtgctaaatattatctttatatatgaagagataaagattttgttcaggaccccacagcctggtggtgagctgggtctagattttactgttctatttatttatttagctaactagttacttagtttccaggattctttaacctgcttcatatttatttatttttaaaaacagggtcttgccatgttgccaaggctgatcttgaacttctgggctcaggtggtctttccatcttggcctcccaaagtgctgggattacaggtgtgagccaccatgcctggcccaaatttaatattctttctacattgagttcctcttacttcttagcataaattgatggatatgttctatttcagtagtaattttaataccacgtattgttttgcacattgaaatgttaaataattgcaggcctctttttaaagtctttaggaagctttattcagtatcaaaaaacagacacatggagaattgactgaattattctttatttatttatttttttgagagtcttgctctgtcgtccaggctggagtgcagttgtgtgatcttggctcactgcaacctctgcctcctgggttcaagcgattcttgtgcctcagcctctcaagtagctgggactacaggtgcacagcaccacgcctgggtgatttttgttatttttagtagagacagagtttcaccatgttggccaggctggtcttgaactcctcacctcaagtgatccacgatctcggcctcccaaagtgctgggattacagacaggggccactgcatctggccatctttattctttatataggacaagccttctcaactatgttaaaaaataaaaggaatatgtgcgtctggtttaaaaaacaagccatggaggatatgcaaagtttttacttctaactcagttagacttctcagacccagagaggtttcctttgtaaacttccaattttttgttttgttttgttttttgttttttgagacagagtttttgctcttgtcgcccagactggagtgcaatggcacgatcttagctcactgaagcctccacctctcgggttcaagcagttctcctgcctcagcttcccgagtagctgggattacaggagcccactgccatgctcagctaatttttgtatttttagtagagatgaggtttcaccatgttggccaggatggtcttgaactcctgacctcaggtgatccacctgcctcaggctcccaatgtgatgggattacaggtgtgagccaccgtgcccgacccaaaatattttaatgcatgttttttgcctataggtctctgtgtgtgtataggtgatatagatagcatatttacctcattttaaacagctgcataaatattcctattgcatagaattgtaacaacatactgactaatacactacagatggatattgtttaaccaaagtgatttttttaatacaacaaacagtgctctagtgagtatctttgtaaatgtgtaccttgatgaggtgtttttataggatatattcctggaaggagaattactgggtcaaggatatgtatactatgtttattgatattgctctttcctcccaaagagatttgacaaatttattcttccagcagcaatatatgagtttacctgtttcctgttatctttgccaatagtaggtttatcagcctttaactgtcacccctctaaagggcatggcattttatagttgttttgattttcattttgtgtgacattgagcatctttttatatatttgtaagtaatttgttttatatttctgtaaactgcctttttatctcttttgactatttttctattgaatttgtctttctaactactgaattgtagcagtgcttagtatattaaggagattggttcattgtcatgtggttattttaggcaaatttttaatgcaaattaatttttcctagctattgcaattatccttaggttattttttaatgacttctttttattcgattttatgtcagaatattatagtattggttattagctttcaacttacaccaaatttgagcagattggtaatattaatagctacagttaatcaggtacttattttctgtaatttactggcattttacataagttatctctaaaagtgattccttttttgaaggaacaaaaaaaaaaaaattaaggcttagacagcttagtaacttgcccaagattactcagctagtaaatgacagatacaagatttgaacaaaggttggactccaaaacttgtgttatttctgctatactggtggagagtttggtgaagaagtggatatagtagcaagaaataagtaggagcgaaggaagagtgaggaaactataaaatgaaaagaactcaaagtttagctttttgggtttctttggatttgaagtggcctgtagaatccgtattctagaggcaaaaacttccatagccttacatatttctctttcaagtttcgtagatgacattgattccctaagaaaatattaaatcgtagccacttgttatcttttctctgtgtaagaaagcagggaagtatgtaatttattttacaaagtttccatactaaatatttaatgggaaatttatctaacagtctatggaattttataccaggtgttttaaaataggttatttcctttaatccccaaaaccgttcagttattaggtgatattatttccatttgtagataaatacttaggattcaaagattgaggccaaggtcggacagtgagtaaatgaaagtaggacttaagccaagtttgtcagactccaaagcccataccctttcttttctatcatattgcgtcattaaagtttaaaacaagaacaaaaacaaagatagctgaagtaatcagtttgtatcagggctgaattaactctatgaaacccctcattacttgatggtaaatgagaagattccgtttttcgatagcagtggaaggcaaagtaatttaaaccaagatcattgcattaaatttggatgtaactattagaggttgaaaaagcatagaaacactgagaggttgtatgaagagttgaagtaacttaagaaaaaaagaaacttgtttaaaatttgccttacaagtttcatttcctttttgttataaatcaagaaattatcagctaggcgtggtgactcacacatgtaatcccagcactttgggaggccgagctggatggatcatgaggtcatgaggtcaggagatcgagaccatcctggctaacacggtgaaaccccgtctctactaaaaatacaaaaaattagccaggcgtggtagcaggcgcctgtagtcccagctatttgggaggctgaggcaggggaatggcgtgaacccaggaggtggagcttgcagttagccgagattgcgccactgcactccagcctgggcgacagagtgagactccgtctcaaaaaaaaaaaaaaatcaagaaattatcttatttttaaataacgaaaaagctgcggagtatatactgttttgatacttttttgatgttgcctgaatttttttggaaaaagttaaatgtttctcctaaaagtgaaatatatcagattacttgagaaggtctagaactgataaagaaatgaaagtgatatacctgactaaatggaccattaaaaatggttagggtaataatgttaattcaaactggttagctggtctttagttactgtaaattcttaagtcaaaagtcagaaagataaaacgttaaagaaatctgtaagaaaatgacttcacataattttgggaggataaagtaaaagaaattttgacattctgttggacgttttataactcaaaagctaatattggaaaatcaaaaaacatgaattttataatcgcttggtctttatctttagaaaagattcttaatgtagcaaatgaaaaatgcaattccactgatttctttctgaaaagaacattaagtaatgttgcaactcttagctttaaaacaaaataataagacatttataataagtatgcttttgaaagttctcagcataactggagggaaaaatcataactgagaatgtgtgggaagatatgttttaggatagcagaagaaaatgttccaaggatttacgaaataatgttctattgtcttttccctttgaccattaaaaaaccacaagcaaactaaaattaccttgttatgctcaaaaagttaaaaatatttgttgccatggagatagtcccagtctagatttctttccggtagtttaaagacttttgcaatcccatggggaagtaatatattttcagtacaacagctgacaaaatttgtttctgtgggtgagatgaataatatacctttctttgtctttggtgttcatggacacattgaaagactataaataatacttgagaaagtcttgctcaccactcctagttttcatgtaaggatggaaagtcatagaaaacaaaaagaatagtaagccaattaaagaactggactgaaactcaacaaaaagaatagtaagcccactaaagaactgaagtgtataccccctcccctctcctcccctcccttcccctcccctcccttcccctcccttccccttcccttcccctctcttccccctccccttcccctctcctccccctctcctcccctctcctccccctctcctcccctcccctcccctcccctcccctcttttcctgtcttctggtgccaatggagtctatattctaatgtctgtcttagataccttgtatttattttcctaactgtaattgtgggttacttttttgcaagatatgttgttttgaggaggaaaaaaagcacgagtactttttttttttcttattttgagcgggagtctcgcgctgtcaaccaggctggcgatctcggctcacagcaggctccgcctcccgggttcactccattctcctgcctcagcctcccaagtagctgggactataggcacccgccaccatgcctggctaatttttgtatttttagtagagatggggtttcgctgtgttagccaggatggtctcgatctcctgacctcgtgatccgcccagctcaacctcccaaagtgctgggattacaggcgtgagccactacgcacggccgcatgagtacttttaaatatagaaagcagcatttattaattttgcacagcaataagaattttctcatagtccacccagcttgatagagacagcatagtacagggttttgaaataaaccaggtttatttcccagtttcaccatttactagctgtgtaactttgagtaggttgattagcttccaagcctcaatttgtacttgtgtgaagtggggataatagatgcatagtacctaacaccaagtaggtgttcaataaatggtatataataggattagtttttgataataatttttttagataatcaggattccaacttaactacgcagtcatgtgtgtttccttattcttcagtgttttccaggagagatgaatgtataagttctttgaatatctttaccctagtgtgagtttattgtgatctgctgtttttatagctaaataaattagttcatttgtcgttacaggagatatattgctctaagtacctaataagactttagttgtaacttgcatagtgttttattaatgtcaatgcttctggctttttaagaaagtttaattatgtgaaaatgagacttaaaatttgtgtgcttagagtaaaatatgaatgcatttttcttcaggcattttaaattatacctgacatcaagtactgaacgtttttcacaaaatttcaaggtcgtggtggtggatggtaaaaacgaaagcgagtacactgtaaaatggcaggacttcttcactggacacgtggttggttagtatggagcttgttggtttgcccctgtgtctggtgtattaggtctccaaatctaacttgattgcatattcttttctggtgcaggatagtggggacggggtgtcatagaagtgctattctttgacttttctttgaggtatataagtttagaggcaggaacattctaatagaaggaaatgagtattatctaaatgtcatactagctggctggtttaatgattaaaattaaattcttcttaagtgataggaatttaacctttcttttcctcagtgactgtaagctttctttatgatattttaaacagggaagcttggagataaaatacttggtgatcctattacgtatgtatttgagaaaatttatcaaacaagcaattgcagtttactttttgacctttttctgcaatgagaaaaaaaaatgtcattgaaatccacaaatagtatagttcctaggcctgtacattctaaatcatgctttctgtctctcttagttcttcctttacctagaagtagataaaattattccagaagaaaatcttagcagttttgtttgttttgggaaagggataggtttcaagtgactaaacttgaggctaccccttaggagttgagattatctagcttctttctggagcctttgtttcttgttttgcagagctctcacagtactaggcaaattccaccctgaaggatttaatttttattgagagtaatgcatagtttcttatttgatgtaagtatttttaaataataattttttttttctcttaaggtgagcctgactctagggttctagcccacataagagatgatgatgttataatcagaatcaacacagatggggccgaatataacatagaggtaaatttatatgtgaattttttttcagtagcttatatctctgattttcaaaaagctgctcagttctgcaaaggtgaaaagtaattatacttatttctttcctcttcgtatttgaagttttttactaggaaagtagactttttaaaaaaggataatctctaagaagctgtgttatgatacaccctgtatttctaagtaccataattgagagagttacatgtgggatggataataggaagagaaaactttctttccctcctgactcattttttaattctttctcaaataataaatgtaaacatcctcagaaatgaaaagtgaagtattatttttcaatttctctgtttttctgctagacacactggaaatgctagatcaatgaaaggtggtagttcatagtctgagaagttaaagaggaagctaggaaagtcaggctgtggtcactcttccattgaaagagtagcaatagaaatcaagaccacagtggctgcattggttaagacacatatctatctgtcagatattagtctacaaaacaaaacgtttcctcataattgtgaattgaagttgattctgtgtttcctgaaaaatgagaagactctgggtggtggtggtgatatcactaaaatagatcacctgtgggaaaactgagtaagattggtcaaaatgaaatgttcaggtgtatttgagtgcttaataggggtaaaacagtctgctggagctatatatactatatgttttaattatatccaatctacatgactgttagtcctttgactgtccattattgtgaaaaagaaacctatggccttgcagtatgttatagtttgttaatgtttaagctatttaatgtcaatgttttgaggagtctggcctaccagaaagagtcagaaatttagtagaaagtaaaggaactaatattataaatgcattcattctagaataggcaaagcatcactggaatgtcttaaatttgcctgttctttcaaatcaatttattttttaagaatacctttattttaaaatatatgctcattgcaaaattcggaaaatagattatctgtacttggacagataactactattgacattttgacagacatccttccaaatttttttttctatgtgtaaatacacaaataaatatagttatacccactattttttcctgcaaaactaggaccatacaatatgtacagtttgtcttcacacatttttcgtttaacaatatgattatgaaccttttcgtgttaatatagatctaaattagggttttgtttgtttgtttgtttgttttttgagacggagtcttgctctgtcacccaggctagagtgcaatggcgtgatcttggctcactataacctctgcctccccggttcaggcgattctcctgccttagcctcccaagtagctgggactgcaggtgtgcgccatgatgtccggctaattttttttcttttttttgagatggagtatcactctgtcactcaggctagagtgcactggcgtggtctcggctcactgcaacctctggctcctgggttcaggcggttctcccgccttagacccttgagtagctcagactacaggcacatgctacctcacctggctaatttttgtatttttagtagagacggggtttcaccatgttggccaggatggtctcgatctcctgacctcatgatctgccagcctcggcctctgaaaagtgctgggattataggcgtgagccactgtgcctggcctcaactgttttgtttctaacttttgaaataaaaggtattgtagtgaacagccttgggcacaccttttggtgcatgtgtttagttggaatagtctggatgataggtaatagtctgggaagttaaatgaagaaactgtaggaagctctgtctaggctgtgcgagggcttcagataaactcccatagctgagtagcttaacacaagcaaagttttttcttactctcctgtggcttgatgtgggttaggtggttctcctctactttgtggctttgacttttggacacatgtcctctgtagttctcacagaaagaaaacagagctagagaattatacaggatattaagggccaggcttggaaatggccttccgttcaatacattctagaacactttatctctgacctgctacaaaggagaatggaaaagatagtcgtaatttgagctcagaaagagaaaatagtgtggtaaatgcacagcattgtttttgctgcagtgcatatgtctgcttatttccttagaataatttattcttttttgtttttttgagactgagtctcactctgttaccaggctggagtgcagtggcgtgatctcagctcactgcagactctgcctcctgggttcaagccattctcctgcctcagcctcccgagtagctgggattacaggtgcgcaccaccacacccagctaatttttgtatttttggtagagacagggtttcacaatgttggccaggatggtctcgatctcctgacctcatgatctgccagcctcggcctctgaaagtgctgagattaaaggcgtgagccactgtgcctggccagcttattaattcttaagccaaaatatgtgtctttaggatccaagttaaatttgctcagattacatttttttttttttaagatggcatctcgccctgtcacccagactggagtgcaatggcgcgatctcggctcaccacatcctctgcctcccaggttaaagcgattctcctgcctcagtcccttgagtagctggaattacaggcgtgtgccaccatgccccgttaatttttgtagttttagtagagatggggtttcactgtgttggccaggctggtcttgaactcctgacctcgtgatctgcccatcttggcctcccaaagtgctgagattataggcatgagccaccacgcccagctagattactcatttttttcaaatacttccttttggaaaaataggaattctgtttccatccatacctttgtttcactaagtacaaaaatgagtataactaatatttcattgtaagatatttacttagccaggcacagtggctcacacttgtaatcagcactttgggaggctgaggcgggtggactgcttgagcccaggaatttgagaccagcccaggcaatatagggagaccttgtctctactcctccacaaaaaaaaaaaaaaaaaaaaaattagctgggcatggtggcacatgcctgtggtctcagctacttagaatgctgaagcagtaggatcagttgaattcggaaggcggagactgcagtgagctgagattgtactgctgcactccagcctgggtgacagagcgagaccctatctcacacatacacacacacaaagatgtttacttacaagtatactcatcagataccttgagggacttttgcatgaaattaataatgtttattgaaaaaatgatttactacttacaggggtgattttcatactctttataattcttttgatacttttatagttcataagtgtggtgattggctgttcacacacacatatgagatgtaccaccctagaaccttgttacaatgttagcacattaccagtctgacatgaaaaaaaataattctttacacttaccttgatgcaaaaacattgtctatctgcactaatatcttaggaatataagtgagcaggaaaaaatatatatcttatttttaacacatcatcattaaatattttgtttatgacagtcttacttggtcactcaggctgaagtgcagtggtgccatcatagctcactgcagccttgacctcctgggctcaaacaatccctcttttctgcctcctgagtagctgggactacaggtgcatgccaccatgcccaactaatttgttaaatttttgtagagtgtatcagatttttgatgaggtctcactgtgttgcccaggctgatctcaaatgtctgactgtaagcaatcctcttgcttggcctcccaaagtgctgggattacaggtgtgagccactgtgcgcagccgttaaatattttaaaccgtcactgactttaccatagcttactatttatataaataatcctgggttaaacttgcatagtgagataatatttcccccaacttttatttatttatttgagatggagtcttgctctgtcgcccaggctggagtgcagtggcgcaatctcggctcactgcagtctccgcctcccaggttcaagcatttctcctgcctcagcctcccaagtagctgggattacaggcacacgccactgtgcccggctagtttttatatttttggtagagacagggttttgccacgttggccaggctggtcttgaactcctggtctcaggtgatccacccgcgtcggcctcccaaggtgctgggattacaggcatgagccactgcatccggcctaatttttgtatttttagtagagacggggtttcaccatgttagtgaggctggtcttgaacttctgaccttgtgatctgcccacctcggcctcccaaagtgctgggatgacagacgtgagccaccatgcttggcctcccccagcttctagttttaaaaatgttcagctggtgcagtggctcatgcctgtcatcccagcactttgggaagctgaggtgggtggatcacttcaggccaggagttcgaggccagcctggccaacatggtgaaacctcgtctctactaaaaatacaaaaattagccaggcttggtggcttgcgcccgtaatcccaactgctcgggaggcctaggtgggagaatcgcttgaacctgggagacagaggttgcagtgagctgagatcgctccactgtactccaatgtgggtgacagggtgaaactctgtctcagaaaaaaataaaaaagaaaatgtgcaaatctacagaaagattaaaaagtaccctgtagttacagaaagatttttttaaaaaataccctgtagcccttaaacaatttctaacataatgtcctgttagctttctctctttttttcgtgaatcatatgaaaatcatttgcaaacatcatgacccttcacccctaaatacttctgtatgcatccttaggaataaaggcactcttttctatagctgtaataaaagtaacatacctgagaaaatgacaagaattctacaatattatctaataatcatgccatagtcaaaatctctagtcatcctcaaaatctcctttgtagattttttttggttttccagtccaggatccaatccagttttctgccttttagtcaattactcatcaaattattttttccagcaacttactagtaataatggtaatagccttagcttttattaataacaaccacttttcttttgaaatgttaatataaaactagatttattacctacataatcttcataatcttcaagttaggtattatcactactttacctaatgagggaggttatgctcagggtacttgtccaaggcacatagtgaggtatggttgaggtttgaactcagatatatctgatcccaaagccagctgtctttttctgtgctggactgactatactaggaaacaatcaatgtgaacttagaaatgtttgacccaaaagaaaaaaaatttcactcctattcataggctaaatgaactttactaaatatggaagattcctgtagcccggaagttgggttagttaacttttgagatctctgccaaccctgaaattctgtaacccttgtttcttacatctgcctcatacatggattaccaaagatgtatatgcatataatatttaacagttttattgagataaaattcacatactatattattcacccacttaatgtatacaattttgtagttttgtgtgtgtgtgtgtgtgtgtgtatttttgagatggagtctcactctgtcacccaggctggagtgcagtggcacgatcactgcaacctctgcctcctgggttcaagtgattctgtggcctcagcctgttgagtagctgggattacaggcgcccaccaccatgcccggctgatttttgtgtttcagtagagatggggtttcaccgtgttggtcaggctgttctcgaactcctggactcaagttatctgcccaccatggcctccccaaagtgctgagattacaggcgtgagccatcgcgcccggcagttttcgtatattgatggagttgtgcaaacaccacctcattcaattttagaacatttttatcacctgaaaaagaaacgctgtatcctttagccatacttcccccttcctccctaactcccccagctctaggcaaccagggatctactgtctatttagatttgtctgtttgggtcatctcatataaatggaattacataacatgtcttttgtgtgtggcttcaatttttttatttttttgagatggagtcttgctctgtcacccaggctggagtgcagtggcatgatctcagctcactgcaacttttgcctcctgggttcaactgattctcttgcctcagcctcccaggtagctgggattacaggctcctgccaccatgcctgactaatttttgtattttttactagagtcggggtttcactatgttggccaggctgttctcaaactcctgacctcaagtgatccacctgcctcggcctcccgaagtgctgggattaaagacatgagccaccacgcccagcctgtgtgtggcttctttcacttagaataatgtttccaaggttcatctgtgttgtagcatgtatctgtatcttatttatttttattgctgaatagtattccattgtatggataaactgcattttgtttattcattgattagttgttgatggacatttgggttgtttccactttttagctatatttacattactgcttgtgttttcatttctcttggttatatactaggagcagaattgctgggtcatatggtacttctacttttaacctttgaggacctgccagactgttttctaaagtggttttaccattttacattctcatcagcatatgtgagggttctggatttctctacatcctcaccagtatttgtctttgatcatagtcatcctagtgggtatacaggggtgtctcattgtgggggtttttttccccattggggttttgatttgcatttccctgatggagataaatatattttttgtgtgtccccccacaaactgcctggttctgatgagaccagtgttcttacagagaataactttgctttgaaacaaaacaaacaaacagccttttgacttgggtaacctttggagtatgttaattgtgatttactctggccttgtaacattgtaagtggagattttgtttaaaaactgcgttcgctgaaacaagtaataaggttcagacctattgttacaagttctgagttttctttcatataaatatgtttgttcttttgtgtggataaaacctaacgtggcaaaaaggtgtcaaacacctaagtattaaggaaactaaaatgaaaatgctgcatgaacagaaaccttgtccaattttcattactatagcaccatcacctataacagtgccagtgtacagtagatattacataatatttttgaatgaatgagtggaaaatgatatgcatttttctcttctgcatcctctgaaagatttcacaacgtgcaaagtatgtaaggctttatttatatacagataaaataatcagagtttataatctatgtatttactttcctgcatagaaactccatatgattaaaaattgagattatttattttaataacatgactaatcagtttacttaacctagaaatgaatgttatctaagaacaagcaaagaatgttagaagaatttagtgtttaggaattattattgttttccatctcagtcgtatatattttctgttttagccactttggagatttgttaatgataccaaagacaaaagaatgttagtttataaatctgaagatatcaagaatgtttcacgtttgcagtctccaaaagtgtgtggttatttaaaagtggataatgaagagttgctcccaaaagggttagtagacagagaaccacctgaaggtaagacttaaagagtgtatttcaaataagaaacaaacatactacaattgacttcagtaggggtggttgttatttgttaaaaaataacatgattgtcaagtaactatagtatttggcatgaaaataagaggtttgttccagaaattttcatcttcttttgtttataatgtaagagttgaaaactctggaaaataatgggaacaacagagattagactttaaaaaagattagggaaaagggaaatggagtgatctgagggaaaatattcctgcagatatttagaaatgataaaataatatggtggaaagacaatctttagagtttataagaaattaattggtagtaggagggacctatatatatactgcttagaatacaagaaggttatatccatcttgggacaatccatttagggtcatttaaaaaacgtaaccatcttggaattttactgcccaaaacacctctggttaggttttttgttttgttttgttttgttttgtttgcagcgcgatctcggctcactgcaacctttgacttccaggttcaggtgattctcctgcctcagactcctgagtagctggattataggcatgtgccaccaggcctggctaatttttgtatttttagtggagatggggtttcaccatgttggtcaggctgttctcaaactcctggcctcaagtgatctgcccacctcagcctcccaaagtgttgggattacaggcgtgcaccaacatgcccggccaaagacggttatgttattaaaattatatattagcattttaatatataaataaagaaattcttaatttatttcacaagaaagttgtcctattaaactaattttcaatgtgaatatcttgacatttttactgttacattggttaattcataaacttcttgttgtagaatatgactgacagcttcatagcccagcattaggtgactgttttactctgttgagcactatttatttatttatttatttagagatgaagtctcacttttgtcgccctggcttgagtgcaatggcacaatcttggctcactgcaacctccgcaccctgggttgaagtgattctcctgcctcagccttacaagtagctgggattacaggcgggtgccaccatatctggctaatttttgtatttttaatagagatggggtttcatcatgttggccaggctggtctcgaactcccgtcctcaggtgattcacccaccttggcctcgcaaagtgctgggattacaggcctgagccaacatgcccggccttactctgttgagcactttttaaagtttctgtattggaaaaattaaagaggcacttgtccttggttttgaattctacagtgttttaactttatgttacttttcacttttctgtcttcctccaaattattttttgttgttgttcagaatcctttagtgatattaagctcacataatgtttgtttcaaaaatatgttagatttaaagtgttaccataaaactccttgttttggtgaattttgatttaatagtgcatacaaattcatattagagcttgttcatcgagtgaaaagaagagctgacccagatcccatgaagaacacgtgtaaattattggtggtagcagatcatcgcttctacagatacatgggcagaggggaagagagtacaactacaaattacttagtaagtatttgatattgcatcgagtaattgaaaaaaaaatttgggtgggtacattccatgaaacttaatgcaaccagatctgttccagatactctgttatttccctaaaatatttgagggatattctctgaggtttttatgttactgtatggaaattatagtttcaaatttgtgacaacccattttacccttgaactaatattttctgcatgttagaatttatgcatatagggtttgggagaggttataatgtagtccttcctccttgatataagtgagttctttaaaaacatcactgctatcatggtagtgaacctgtggtgtcacatgtgaatgtaaaaatatgtatttgcatgaacccatgtttttcttttgcttatatgtatatttcagagaggaaggcgagttttgtttgtcatgttaaagacctaatcattggacttcacttgaaataggtgggactttcatggtcataactagttctagggcacagaagtgaaggaaagatgtaagaagtgatgatactggatttttaagtatgaactattatgatttttgaagtctggggaatcatttttcattgacattttttgctagtgtgacttcattcgtcatgattacttggcactgaccaaaatgttgttactgagggaataatggagaatgcagctattcatgaagcaagaagaagctggtgcagtaaagatgtctttctcattgccttgcttttcccatgctgtccattttattcataccctcccaacttctttcccttccctttcatgtcaagtggatttttttttttttttttcaacacagagtctcactgtgtcgcccaggctggagtgcagtggcacaatctcagctcactgcaacccccacctcctgggttcaagcaattctcctgcctcagcatcacaagtagctggaattacaggcgtgaaccacagcactcggccccatatcaagtgaatttattatgaggctagtaagagtcactgtgattcttgttcctaaataagagagatttttactttaaaaagcttctctcttaatctgggttttatattaaggggctcctcttattttacttctttgttcattgcactataaatatgaatataatgagagatctagtcttaaaaattgtatttttttacaacttcttaggcataacttgtttcacagttgctagaacaaacctcatcaacccagtttttgaacagtagaatattctctttgagaaaaagataggtaattagcattttgttctttctcatgtcattttccttggaaactatactgccttccttctccagttttcccaaatcagagaacaaaagaaggagggttgctgaaatgaaccttgttctttctggctgtcttcttacccattcctcagtgctgaactttttggggtgagagtgggggaatagggttggcagttgtctgccacggccccttacttgtttctggggaagacattcgaggtactcaccaagagatagagtgaagatggaattctttttagaagggaatacagttgacccaggaacagtgcgggggtgtggttagaagcactgaccttcttccctctgcagtcgaaaatcctcacgtgactttttttttttaaggctctgtcgcccaggccggagtgcagtggtgaaatcatagcttgctgcagcctctattgcccgggccaaagcaatcttcccacctcagcctcctctagctgggacaacaggtgttcacccttcctggctaagttttttgatttttagtagagatggagaatttcccaggatggtctcaaacttctaagcttaagcaatcctcctgcctcagcctcccaaggtgctgggattacaggcatgagccactatgcccggccactgtataactttgattctccaaaaatttaactactaatagtctactgttgaccagaagccttaccaataaaataagttgattaacacatttttaaaatatgtattattactgtgttcttacaatcaagtaagctagagaaaggaaaatgttatgatgaaaatcataaaaaaaaaaaaaagcccggcatggtggtgtgtgcctgtagtcttctgttactcaggaggctgaggtgagaggattgcttgagtccagaaattcaggctgtagtgagctatgatcgtgccgctgtactgcacccctggtgacagagcaagaccttgtctcttgaaaaaaaaaaaagaaaatcataaggaagagaaaaatacatttactattcactaagtggaagtggatcatcataatggtcttcatgttgagtaggctgaggaggaagaggaagagttgatcatattgtctctggtgacagaggctcaaggaaatccatatgtaagtggacacttgaagttcaaatctgttgttcaagggtcaactgtatttcaggtatactgattgacttttaaatttaatttttattattggctgaaacggtagttttaaaaaagcctgttacttgtcattttggttccatgtgcaattgagtacctgaaatttaggttaaactataccattgttttattctggtaacagcactttaagtttggggccaaaggttgggaatactctgatacagtaacatctcaatgctagtttttgcgaaagtagaaacttttgcaatggcctctaaactgagattttttctttccccatagattttatattgcattgccaggagaggtaaagagttacataatgtcttttttcttttttaaatacacacagatagagctaattgacagagttgatgacatctatcggaacacttcatgggataatgcaggttttaaaggctatggaatacagatagagcaggtatttatcaatagatatggcttatattacttaagttttgtaatgtaaatatttgtcacttgtattcaaaacctaaaaacttgtccttaacaataattgtaaataagttttctcagatgccaatgattttttatgatgaattgtgcagtatttttgatgttaattagttctagattgtgaagttttctgtccttagtctcgctttaggtagaaagccttttatgctgctgtgctttgttccttctttgaattcatggcctttatattctctgtagttttcttcccccctccgattatgcttaagtctttagttaaaactctggcatgcaccattgaatccttagtcagaaaatttactaaaaaatactgtgtacctttgcaaggctgtatttatatatacagaacctttaggttctttcctctcagatatctccttctgatttcttgtaatctgttaacagagtgtgtctagtaatgttatattaatgtcatcttaataatagctcatattaaaagttatttcaaattgctaggactaattaaaaaggcttctgacaaagggtattgctttgggcagagagacattttgatatgtaaattatataaattgttatctctatttttttccaagctttttgtagtaaaccatatttttataagttatatagtatagaatttagaggttgaaaaaatttttaaaaatcattcaccatgtttataaatgttaaactttgatattacttgtataaaactaagagaattatttttcccttttcattctctttcactgttacgcattttctttttaagttattatttgaataggtaacatgtacacagtacaaaagccagtgaaaagtaagtctctgcagcctgtttattgtcaaaccagttcctttccccaaagacattcatgtcactagtttcatatgtatctttctagagatgtcgtatgcaggtatagtgtatgtatatgtctgtatttgacacaacggtgctatgcagtacacttttacaccttgctttttcatttcacagtatgttggagagtacttcatgttcatgcatgtaaagctgcttcacttgttttattataaatagctgcatcatgtttgagtttcagggaacctgtaaattttctttttgctttaggcatttggaaccagtcgaagaaacaggaataatataggagattaaaacattaacttctttacatctgatgaaggatggattggagggtgtggtttagatgtgtatcatggtgggcttctaagtagttctatcccagatttgaccttgaccagccaccatcaaaactgcagagtccaccccagtaaacttaccacacagtggcagaggagaccagaatgggccttctctgcaggcaggcaggcaggcaggcaggcagagagactcacagaaactctgagctgagcatggtttccttctttatctcacacttactaatgggagcctttgttacttttttttttcttctttgcaggtttaatatgaatttgtctgaaatgcctgtataaggagaagactctattcttagccttttattcctttgatgcacaaagagatgtatattttattattctttcctgagttgtcgactgtagtcgtaataaatattttaggctcctgtaacccaagttcttattttttcaaaataaacatggaggatatgaaaatttaagagtacatttataatattataaataattcattgacatatgttttccataccatatgcttctctgtttgtttcaaacattgaatattggtactgaagaatttatgaattttggttttaaaatgttttttttctagaacgattctttttttgaacagataaaataatgcagtattcagagccttctgacttattttggaagtgttctaagtatatgatctctttaagtatagattcgcattctcaagtctccacaagaggtaaaacctggtgaaaagcactacaacatggcaaaaagttacccaaatgaagaaaaggatgcttgggatgtgaagatgttgctagaggtaggtcttagaatcctggatatggtgctaacaccactttgtcatttctgatatgtggattgtatgtgttttaatgaaggagcatgttagaaaagatggacacccagaagcagtctcctccagctgatccagcagtaaccccatcccatgtagcagcatagacaacaaataacaaaaactctatgaaaaagaaaaacgctataaagcaatgcttccttttttttttttttttttttttgagacagagtttcactcttgttgccctggctggagggcaatggcgtgatcttggctcaccgcaacctccatctcccaggttcaagagattctcctgcctcagcctcccaagtagctaggattataggcatgcaccaccacggccggctaatttttgtatttttagtagagacagggtttctccatgttggtcaggctggtcttgaactcccgacctcagatgatccgtctgcctcggcctcccaaagtgctgggattacaagtgtgagccaccatgcccggccaaagcagtgcgtcttaaccttaatatctttgaggatctaatgagacaatcagtggatcttctctagaaaataacatggatacccaatatatagagtttttgcacactgtttcattagttctgcacacttagttcagctctctctgaagcttatcaatttatcttttagggcagtaattatcaaacaggttatgaacatgtattggagagtagaaatatagcttggagatctgaaagttctctacaggaatttaaaatttttgtgtttttattctggcgattaatctaaagatggctaacttaatcattttatgtcatttggagtcttgccgtataacagggtgctgccatgtgattccagtgtcttgagtttgtgtgtgctattactttggtgtagaatgactttatatgaagcgatagtttttatcttttaatgtgttggcaagtttattagtttcttgttgttgctttaattatcacaagtggagcagcttagaacaacacttatttatcccatagtttgcatgggctagtccaggtatggtgtggctcatctggattcttgtttagggtctcatgaggctgaaatcaagttttcaaagcttcaatagaattaaaggatattataactattcatccagatggagaagcataatgtgcagcacctgtgtggtactcattcataccttgtctaatttgatctgctgagcaccctgagaggttggttgagacagcatccttgtgaggaggctcagcaagtgttactgtttattccagctgacatgacaaagcagcataggctgggggacttaaacaacagaagtttgggttttcacagttctggaagctggaagtccaaaatcaaggggtcagcagggttgatttcttctgaggccaaggtacttgtggtgtagatgctgtcttctccctgtgttctcacatggtccttccctcagtgtgtgtgtatattctgatctccttatcaggacaccagccatattggattaaggcccacccatatgacctcagtgtaccttaattacctccttaagggccctgtttccagatagagtcacattctggggtactgttgagggttaggacttcaacatttgaattgtggggtggcacaattcagccagtagcaggaagattaaatgacttgtctgattagtcatacaactggtgatggcagaggttgaattgagcacagatctcctgactcctagaacagctgaaccactgcgcctgtctgcttttctgtgagcctccagacagcccatggcaggggaggaaccaaagagaaaaatgacttatgttgacagatggtcctctccagttttcttccctaagcctcctagaatattcttagaagcctcatccttttaccacggaactatcagaatccccatgtaaccacacttcattcctcatatagggctctctggcctctcatttaaagcattttaaacattgagggttttggctaggcatggtggttcatgcctgtaatcccagcactttgggaggctgaggatgaggcagtggattgtttgagcccaggagttcaaggctagcttgggcaacatgttgtacaaaaaatacaaaaattagccgggcatggtgaggcacgcctttggtaccagcttcttgggaggctgaggtgggaggttcacttgagcctgggaggtcgaggctgcagtgagctgtgattgcgtcactgcattccagcctaggtgacacagcgagaccctgtctcaagcaaaataaatcaaaccccccccccaaattaaggtttttttaaacttggagacgctggacggttatggtagaggtttttaaagtaatgtatgaagcccttttaaattaagaaaaaaaaaatcctctcaaacctgcagtgttgatttaaatggatgtaaaatctttattttagtaacataaaactgggtatgtatgcttttctataagtgtatatttatataaatgacaatatattatgaagctcaaaaaagtttaagattaaaatttctataaaaccaattgaatccttgaaatacttgagagggatctgttttggcctggagtgctgcaatccccttatcgaattggagcatctctagtcctgggctgtatgtcttcagaacagccctcggaggagcagtgagttagttctgaagagctggagcaagctcccgaactattcccttttgtgtcccttgtcagatgacagtgtgtgcctctcacctgtgcaggtggagaagcactttagggaaagagcaaagcactgcacgaggttgtgattgctggtgctgagctgcatgccatcatagttctgttctggaatgtttagttgatttagattacatcttttagtctgatgtaattgttaatctaagaatgcttttttttttttttttttttttggtctttcaaagcaatttagctttgatatagctgaggaagcatctaaagtttgcttggcacaccttttcacataccaagattttgatatgggaactcttggattagcttatgttggctctcccagagcaaacagccatggaggtgtttgtccaaagggtaagtttttccatttcttgtgtgaatatgctgctgggattattaagatgattggattatattataattctgtatttaataagcaatttatctctgtttccttttgactttagcttattatagcccagttgggaagaaaaatatctatttgaatagtggtttgacgagcacaaagaattatggtaaaaccatccttacaaaggtatgttcttttatttctaaaagaatagtgttagagtttattgtagtagaacctcagttatatatttatgtaggtatttttttaaaaaatgtaatatatactgttttttaaatttctgcctaaataaaatttatgtatttttgtgggatatatgaaaattaaagcataaagaagaaaataaaaatggcctgtcagccttcttttgaaacatgtgaggaccactgcttttctcgaaccctctgtcctggacccctctgacctgcagcaactcttagagctccctgtctcctagtcctgcagtgcagctgtcattcaaggcatcccacaccctcttattttcagaaccccatggtctccctctttctcagtgccatcattttggtgtagtgtatcttgcaggagcttcctaagaaaacgtagatgacctgcatattgttgggatttcatatatctgaaaatgtctttattccactcttaagcctgattgataattttggctgagtatattcttagttctcatgttctctatggtcttctgtgcatgttgcttctaaagaatctgaagtcattttgagttcttatctttgtttgtcacctgtttttttctctggaatatcttaagatcttgtttttctccagctatgtctgttaaaatgtgtttgactacaaataacagaaaattaaataagcagtggtttaaataaggggtttatttgtctcagtcaacaagaagttcagggatagcattttctgggtggtacagcaactcagaggtaccctcagtggctcaagaacaagcaggaagtctttgtcctcatggatgtcacctcatggttttaagatggttctcttctgtgttggagaaaggaggagaaagagaacatggctagcctagtctggcccttctaaaaagcttctctggaggccccatcctggcttttgtttatatgttactggacagcactgggtcccgtggctgcccttagcctcaacggaatgtggaaagctggctattttagctgagtatattgctgtcctgggcaaaattagggctcattaagtaaggaagaaggggagagagatgttggtaggacatattagtatctgatatactgatttttaatttttatttaatttttattttttttgagacagagtcttgctctgtggcccagtctggagggcagtggcaccatcttggctcactgtaacctctgccttctgggttcaagcagttctcctgcttcaacctcctgagtagttgggattacaagcacctgtcaccacgcctggctaatttttgtatttttgttttagagacagggtttcaccatgttggccaggctggtctcatgaacccctgacctcaagtgatccactcaccttggcttcctaaagggctggttggtatactgattttttgactatgatgttatacttggtgtagggtatgggaaaacatttgcaaaagacacatctgagaaaagactgctatctgaaatatacaaagaggccgggcatggtggctcattcctataatcttcggcactttgggaggccgaggcaggagaatcacttgagcccaggagtttgaaactaacctgggcaagatggtcagaccctgtctctacaaaattaaaaataaataaataaataaaaatttccatatgtataaagaactgttaaaattcaacaataagaaaatgaacaacctaatttaaaaacagacaaaagagcagaacagatacctccaaagatatacagatagcagagaagcatatgaaaagatgctcagcgtcatatgtcattaggaaattgcaaattaacaatgaagctggttgtaggggtacatgcctgtagtcccagttgcttgggaggctgaggtgggaggattgctcgagcccaggagtttgagacccatcctgggcaacattagtgagatcctatttctataaaaaactttaagaaacccaacaacaatgtgctattactagtagcttattagaatggctaaaatcccaaacactggcaacacaattccaacaaggctatggagcaacaggaactctcattaattgctagtgggaatgcaaaaatggaacagccactttggaaggcagttggcagtttcttttctttttcttttttcttttttttttttttttggagacggagtttcactcttgtcacccaggctggagtgcaatggcgccatctcggctcactgcaacctctgcctcccaggtttaagcaattctgcctcagtctcctgagtagctgggattacaggtgcccgctgccactcccagctaatttttgtatttttagtagagatggggtttcaccatgttgtccaggctggtctcgaactcctgacctcaggtgatccgcctgcttcagcctcccaaagtgctgggattacgggtgtgagccactacgcccagccataagaatgtttatggcagcttaattcataattgataaaacttggaagcaaccaagatatcctttagttggtaaatggataaactggcacatccataaaatgagaaaaaaataaaaagctattaagccatgaaaagacatagaggaaccttaaaagcatactactaagtaaaataagccagtctgaaaggctacatactatatgattccaaatatatgacattctagaaaagacaaaaccatgcagactataaaatgatcagtgattgctagatgctgggggagggagggatgaataggtggagagcagggtaattactctgtatgatacttcaacagtcagtataagacattatgcatttgttgaaacacatagaatatacagcacaaagagtggaccctaacataaactgtggactttgggtgatttaaaaacaggtggtggcaggagcctatagtcccagctacgcgggaggatcacttgaggccaagagttagaggctgtagtgtgataaatgcaactgtgaatacccgctacattccagcctgagcaacttagcgagatcctccttttcttttttgagatggagtctcgctgtgtctcccatgctggagtgcaatggcatgatcttggctcactgcaagctctgtctcctgggttcatgccattctcttgcctcagcctcccaagtagctgggactacaggcacccccaccaccacgcccggctaattttttgtatttttagtagagacggggtttcactgtgttagccaggatggtctcaatctcctgaccttgtgatctgcccgccttggcctcccaaagtgttggaattacaggcgtgagccaccgtgcctggcctgagaccctgtctctttttatttatatatatatatatatatatatatatatatatatatatatatatatatatttatattttaaatttaagttctaggatacatgtgcacaacgtgcaggtttgttacatatgtatacatgtgccatgttggtgtgctgcacccattaactcgtcatttacattaggtatatctcctaatgctatcccttcccccttccccctccccccaccccacgacaggcaccggtgtgtgatgttccccttcctgtgtccaagtgttctcattgttcaattcccacctttgagtgagaacatgcggtgtttggcttttgtccttgcgatagtttgctgagaatgatggtttccagcttcatccatgtccctacgaaggacatgaactcatccttttttatggctgcatagtattccatggtgtatatgtgccacattttcttaatccagtctatcattgttggacaatgttgaacaataatgtagagtggtatgagaaaagaaaaagacactaattagcttttgggaatcttttaatttctttttttcttttcttttttttttttttgagatggagttttctcttgttgcccaggctggagtgcaatggtgtgatcttggctcactgcaacctccgcctcccggattcaagcaattctcctgcctctttctcctgagcagctgggattacaggcatgcgccatcacgaccagctaattttgtatttttagtagagatggggtttcttcatgttggtcaggctggctctcaggtgatccgtctgcctcggcctcccaaactgctggattacaggcgtgagccaccgtgcttggccttaatttctaaatttatttttttcttatggtactttgttttaggggaaaaaatctctcaaactgtgttttccctctattctcacatcacaaccatcatcatcaacacagaagacttgtgtgaccagaccaaacgtgtggggatttccccctacatatcaagcagtagacatcagctaggtgtcctccaattcaattcaaacactctccacccggaaatagtatcagatctcacagtttgagggcccagtcccacaagactgactgttccctcctccccaccagttacaagtctgagcctccagaacttctgaccaactggcttcaagttggggtttccacattctcctctttgggtctgattaatttgcttaagtggctcacagaactcagggaaaagcttaacttagtttatgggtttattacataggatattttaaaggatacaaagaagctgggtgcggtggctcacgcctgtaatcccagcactttgggaggccgaggtgggtagatacctgaggtcaggagtttgagaccagcctgaccaacatggtgaaacctcgtctctactaaaaatacaaaaattagccaggtgtggtggtgcatgcctataatctcagccactcgggaggctgaggcaggagaagtgcttgaacctgggaggcagagattgcagtgagctgagattgcgccactgtactggtcaacagagggagtctttgtctcaaaaaataaaaaaaaaagaaaggatacaaagaaatagccaaatgaagggatacatagggcgaggtctggaagggtcccgagtacaggagcttctgtccccatggagttgggatgtacctccctcctggcacacgaatgagttttgcaccttcctgtcaacctccatgtattcaaaatgctctctggaagctctctgaatcctgttttttgagattttatggaggcttcattacataagcacgaatgacaactgtgtagaaatgtgattggacaaaatgggtatgttctcatactaaccgactgagtggggaagcccaccaaggcctgtccagattctccttgacctctctgtgcagcattcctccctccacagtaaagggcaggaccctctctagaatgagaatgagaatgaggatctctggacccacaatcagattagagtcttgccttggatcaggtaaaaggaggacaggagaaggtcagagagagagattctgtttcctgaggattgctcctgagccctaaagcaccccaacattataacagaagaccgtaaccagggctacggagggttgtaagccaggagccatggacagaaacatacatgtgtgtacagtagctcacgcttttacttttttggagtcacaacttcttaatggcttgatttcatgacatattttctttggtcttccagaactttcctcttaaaaaaacacagcaaaaaaacaaaatttgatttgaaatttttgagatttttttttaagagtcattagcaaatccactaatgaattttccccaagcagttaggagatatttctcttcattacacctttgggatttgagtgcttttgctaaaaatttaagttttttttcccactacggttttaatatgaacatgtggaaagacttcttgtatagaaaaatgacttgcaaaatattattttttcaggttctatggagtgatttcccccccttaggaaaaaagaactcaggaattttaagtttatatgtatatatatttattttattttattttatttatttattttaagacagactctcactcttttgcccaggctgggggttcagtggcctatctcggctcacagcaacctccgcctcctgggttcaagcaattcttctggctcagcctcccaaatagctgcgattacaggcgcccaccacaatgcctggctaggttttatatttttagtagagacagggtttcaccatgttggccagtctggtctggaactcctgacctcaagtgatccagctgccttggcctcccaaagtgctggaattccaggcgtgagccactgtgcctggcctttaagtttgatattttattcagataaatatggaaaaaaaattttagctttattggcaaaatttattattcatatagaaatcatctgataatctgatagattaagtacagccctgcaactggattctaataaaccaagtcctctaggtcattaagattgttattggacatgaattcagtcattgagaaaataaaacattgttttgttgttcctcagttgtggtttttgttttttttttaagatagagtttcactcttgttgcctaggctggagtgcaatggcatgatctcagctcactgcaacctccgcctcctgggttcaagtgattttcctgtctcagcctcccgagtagccgggattacaggcgtgcgccaccacacccagctaattttttgtatttttagtagagatggggttttactatgttggccaggctggtctcgaactcctgacctcaggcgatcaacccaccttggcctcccaaagtgctgggattacaggtgtgagccactgcgcctatccgtactgttttttttaccccttgctttttttttcctttctgctgagatgctttaggttttaacagacatgtgattgggccgaggggcatgtgaggaggctggacaattaactacagttagcttattgcatttatcagcaccagattgtgtgtggttgaaatggccaaggtttgatgttttgttatgaatgttccagtatatcttataaattacattttcttaaattgatttgttactacttacaataatgtttgatagtattaaataaaatcctacttattctgttaaattcatataattggtagaagaatcatagtccggttattactcttttttgagacaaagtcttactctgtcacccaggctggagtgcagtggtgtgatcatagatcactgtagcctcagcctcctgggttcaggtgatactctcacctcagcctcccaagtagctgggaccacaggtgtgcaccaccatgcctggctaatttttttttttttttttttgagacgaagtctcgccctgtctcccaggctggagtgcaatggcgtgatctcagctcactgcaacctccgccccctgggttcaagcagttctcctgcctcagcctcccgagtagttgagattacaggcgcgtgcctccatgcccagctaatttttgtatttttagtagagacagggtttcaccatgttggccaggctggtctcgaactcctgacctcgtgatccacctgcctcagcctcccaaagtgctgggattacaggcgtgagccaccatgcctagcccacctggttaatattttttattatttttgtagagatagggtctccctgtgttacccaggctggcctcaaactcctagagtaaagtaatcctcccatctcagcctcctaaagtgctggtattataagcatgcagttcttattctcttgttgatctgattataaggctctatttaagacagcataggcccaactggcagaagtaggtgatggctggatattgagaaataatgttttctttgcatgatccttaaggaagctgacctggttacaactcatgaattgggacataattttggagcagaacatgatccggatggtctagcagaatgtgccccgaatgaggaccagggagggaaatatgtcatgtatcccatagctgtgagtggcgatcacgagaacaataaggtatgtgtgtgtcgagaattttttatgtggtttggaaagaggctgtgtataatgatcataatgagagctcagaaacgtattccattcctaggcgtttccctagggatggatgtgcaaattacaaagtaccttgaaacgtggttgtgtgttttggggtgaagcacggttcatctaaatctggttaaaactatcatttggactttgttgtcaagcttaatggtgtagatttgagctctaggaaaaattactaataataatggctttttttggagttctggatttcagggtctggtgggctcaggctttatgttaaaaatttgtcatttcatttacaagttgtcattcattttaactctacaatttacatgtacagtttacacgtttttattaacttttgcagttaaacacatagtttgcctgactacaagcctcatgggagaaaggcccttccttgtctgtcttattcatagctctatcttattcatagctctatctccagtgcctagtaggagtatctggcatgtaacaaatatttgttgaataattaatggaatcatttactattgggggtttctgatagagaatactagttgatttgtgatactgtaaaacactttcagagactttaagagtgccgtgactaactcttagagtctgaactaaaagttgtgttaataaatatctggttctttcattttatttgaagttaaacagcataaagcagtgtgaggaaaacaatagttgcactgctgagttaaagagggtcggtggggagagcttaaaggagtctgattctaatcacaaaagattgtgaagtatttgtcctgactcctattttgagcttggctgtgggctaatgtgcaagccttccctggacacagagggcaagattacttctgcttttccctggctctgacaccctgctttctgaaatttctgcctcctgttctttttgtgatctttgattgttgcatctcatttttttttggctttttatgtatattttctgcatctcattttctttggctgttatgtgtaaacagttcctctgttactttgcatgttatgttttatttttcctctgcttgacaacttgtgccagagaaacatttttctacccctttttgtctactcttccaacctgtcaaactgttgaattttccttctcttttcatagtctctgcatttctaatcatgttcactatagttcagtgctgcccaatagaactttctgctgcggggcgggggatgttttgtgtctgctctgcccagtatagtagccactagcccagtggagcaattgaaatgtggctagaaactgaggaactgaattgtaaattctattttatttaaatttttaataatgtttgcctgtgatgggagacgggaatgggcattaactgtaaaaggacatgagtgagattactggaaggatggaaatgtcctaaaattgacttatagcaatggtttcaacacttggtaaagttattagaaatcactgagttatatacttgaaatggatcaattttgtgatatgtgaaatatgtcttaataaagttgttaataagccaacaaacaaaaacagcagtgtgggagcagaggaaaagtagcgcggatgtagaggagctgtgaagtcataagttgattattgttgaagctggtgaggggcacgggggcattcatgataccatcctgtctacttcatagatgcttgaatatttctgtaatagaaactgtaaaatatgtgactaggaacaaaatttaagtagccacatatggttggtggctaccatattgcatactgtttctctaagtaataggtcatatgcttcttggttatgaggatagtgtcagaacttgggagcaaaatgttttactttgcagactgcctgggtggacatgcatgctgctgactcttcctgctgccagttctggggctcttcaaaacagccctgtaagaacttgccagtgaggcatggtggctcacacctgtaatcccagcactttgagaggccgaggtgggcagatcacttgagcctaggagttcaggatcagcctggacaacatgtgaaactccatctctacagaaaatacaaaaattagctgggcatagaagcacatgcttgtagtcccagctactcaggaggctaaggtaggaggaacccggggagttcaaggcggcagtgagccaaggttgtgctactacactccagcctggatgacagagtgagactttatctcaaaaaaaggaaaaagaaaaaaaagaacttgctaatgagaatggggcctgggaagaactttttttttctggagctgccagtctgtatcaatgaagaacaatttatttattttgtcctgagcacatcatatttagtctgtgtttttctagtttggttgcccaagtaggagtccccttgtaagaagataatgtgcatcttctatgttttatttatttattattatttattatgattttttgagtggagtctcactctgtcgcccaggctggagtgcagtggtgtgatctctgctcactgcaacctccacctcccaggttcaagcgattctcctgccttagcctcctgagtagctggggttacaggtgcatgccaccacacctggccaatttttgtagttttagtaggatggggtttcaccatgttggccaggttggtcaactgactggtcaacaaactcctgacctcaggtgatccacctgcctcgacctctcaaagtgctgggattacaggcatgagctgctgtgcccagcctatgttttaaatgaattccttaataaaaatatttttaactgatgaaaagggcttacaggacaaaaataaagtagttccttgacctagaaagacagaacccatcaccctctactaggcaagcctatgaagagcagtttgccacaggtggacttctctgtggacagatgacattagtgaaaaggaatgtaggacctttgagattgtaacttcttaggaaggtttgctgaacggaagaggaagtcttatgacaaggatgcaaacagaagctgccagatcttcagggatgtgtaggcagaaagccagagttgcgggttggtccttttatcgttagtgctctccagctgcttgggagttgtaactctgacaaatcagtgaagaggtcttcttatctgttcactgtgaattttaactccattttaacctgataaaatggaacccagagatacatgatgttgatgaataaacccaccaaaatgacaactgcctgaggccccgattagaataaccagaccccttagacatctgtactgtaacgacagatttgggccgggcgcggtggctcacgcctgtaatcccagcactttggagaccgaggtgggcagatcatgaggtcaagagatcgagaccatcctggtcaacatggtgaaaccctgtttctacaaaaaatacaaaaattagctgggcgtggtggcatgcacctgtagtcctagctactcaggaggctgaggcagaagaatcacttgaacccgggaggcggaggttacaataagccaagattgtgcctctgtagtccagcctggtgacagagcaagactccatctaaaaaaaaaaaaaaaaaaaaaaaaaaacagatttgaagatgttttttaaaaagccagttagtatttctgtgtaagatgaggtctttgctatctttctgaaagtagctcctttggtgtctgatttggtggttacaggcacctttggagggtctcatacacttggctctcaggggcttcatgattgttgtctggggtgaaagtgaagccattttggcatctgcagagcactttggagaccccgacctaagaagtaactatgctcagttttccctaagcctcttctttttttgataacttcaggaggtctggaaaatgaccgcagttttagagctcctgataaaaccctcagccttaaaagggagttatcctagtggttctgtactccagggtgggaaggtagtgtagagactttttgagacactggtcttgctggttgatgaaaatgtttaggtaacaattggggatttaatttatataaaatgtactattatgcctattactaagctcaaatatttaaacaactttaaacttggatcatccatataagtagccaaagaaggagaagaaaccccttctcctgcatttctgaattgttttgtctgggacaacattaacctacagaggttcttaattcttgtcactgcatgagtggcatgcctgaggtgaggagatttcaagtctgatggagctacgagctctctgttgtgctattctgcttgtccttaagtgggctttgactgggatgtttggtctcagtatttgtatagcttgcttaccttcgtaagaagaattatagatccttaaccaagttcacatcagccatttagcattctatggagggaggttcccagttccatatcagtggcctttggaggagactgtggtggccttgccataactccagggtggctctgatggtggttttacattaagagtttgtctctagagaagacacaaacattgcatgggaatacatttttatgatattattttgggtccttattgccttttttctctcaagatgttttcaaactgcagtaaacaatcaatctataagaccattgaaagtaaggcccaggagtgttttcaagaacgcagcaataaagtttgtgggaactcgagggtggatgaaggagaagagtgtgatcctggcatcatgtatctgaacaacgacacctgctgcaacagcgactgcacgttgaaggaaggtgtccagtgcaggtgaggagtctctccacagggattttgggaagttggtataacaagatgtccaaaataagagaagactgaacttgcaggggctttagaatcaactgaaaggggtgtgagtgtgtttgtttacatctacctcttttgcccttcacagcaagaaattgctttctgggcctggcacggtggctcactcctgtcatcccagcactctgggaggctgaggtgggagaaatgcttgagaacagcctgggcaacatagtgagacactatctcttaaaaaacaaaaaacaaataagaaaagaagaagctttctggaaagcagtgtgacattatgtaacaaaatccttgaccttgcatgctccttggtttagcagtcctatagttaaaagaatcttttttttttttttttttcctgagacagagtcttgctctgtcgccaggctggagtgcagtggcgcgatcttggcttactgcaatctttgtctcccgggttcaagtgattcccctgccttagcctcctgagtagtgggactacaggcacgcaccaccatgcccggctaattttttgtattagtagagacgaggtttcactacggtggccaggatggtctccaactcctgaccttgtgatccatccaccttggcctcccaaagtgctgggattacaggtgtgaggcaccgtgcctggcaaaataatcttttttatttaatttaatttatttatttattttgagacggcgtctcgctctgttgccaggctggagtgcagtggcgcgatctcagcgcactgcaatctccgcctcccaggttcaagcgattcccctgcctcagcctccccaataactgggactacaggtacgcaccatcacgcctggctgattttttgtattttagtagagacggagttttagcatgttggccaggatggtctcgatctcctgacttcatgatctgcccaccttggcctcccaaagtgctgggattacagaggggagccaccgtgcctggcctttattttctttttgagacagggtctcagtctgttgcccaagatggagtgcagtggcatgatcatggctcactgcagcctcaacctcccaggctcaatcagtccttccacctcagcctcccggatagacaggactacaggtgtgtgccacctggctaattttttttgtattttttatagagatggggttttgccatgttgcccaagcttgttgtaaagtcctgggctcaagtgatccacccttctaagcctcctaaagtgtggagattctaggtatgaggcaccatgcctggcccaaataatcttttatttctttttttttttttttgagacggagtcttgctctgtcgcccaggctggagtgcagtggcgtgatcttggctcactgcaacctccgcctcctgggttcaagccattcccctgcctcagcctccccagtagctgggattacagtgtgcaccaccacgcccagctaatttttgtgtttttagtagagatggggtttcaccatgttggccaggctggtctcgaactcctgacttcgtgatctgcctgcctcagcctcccaaagtgttgggattacaggcgtgagccactgctcctggctgcccaaagaatcttttgggcaacagagataagatttaacaagggtataagatttaacaaggtttttttatggctacatcctaatagcaaaattttggaaacaatcaaaatgacagtcttgggatatgaatgttatcatgattctatatactggaatagtgtggaggaagtaggttacaagttagaaagttacccaggttttcattttttatatacactgatagaccagtgcctggcttagaagtaaaagggttaaacttcagttttctggtgaataattgagatttaactggatacagtgcatattaacgctgtaaatactgatggggagtagagttctggctgccgagtgtcttagctatggattgccttgtggccccaccttgtcttttttttttttccttgtctttttttttttttttgagagagtctcgccctgttgaccaggctggagtgcagtggcgcgatcttggctcaccgcaacctctgccttccaggttcaagctattctcctgccttagcctcccgagtagctgggattacaggcatgtagcaccatgcccggctaattttttgtatctttagtagagacggagtttcaccatgttggccaggctggtctcaaacccctaacctcgtggtccacctgcctcatcttttttttttttttttttttttttgagacagaatttctctcttgttgcctaggctggagtgcagtggtgcgatctcggctcactgcaacctctgtctccggggtccaggcgattctcctgcctcagccttctaagtagctgggattacaggagcgcaccaccacgcccagctaatttttgtatttttagtagagatggggtttcaccatgttggccaggctcatctcgaactctcctgacctcaggtgatccacccacctcggcctcccaaagtgttgggttgggattataggtgtgagccacctcgcccagcccatcttgtcttttttaaattaatgcgttaaatgaatgaaaaccaagggcaccaagatgtttcacaggtgattgctgtgttcccattcttttctcctatagtgtggcatttatgtgacctcacgcacattaggaagggacaaagtgtgtgcaggtagctctagcagcggagatgtctgatgatgtaggagtgggtgacggagccaggaggtcttccccggtgatcttcaggtcactgtaacgtaactgtagcgtttgatttgatatggggccataatttgaattgctctgttcctgtctgctgttcttctccagtgacaggaacagtccttgctgtaaaaactgtcagtttgagactgcccagaagaagtgccaggaggcgattaatgctacttgcaaaggcgtgtcctactgcacaggttcgtgttcttgttgcttccttggaatgctgtgggtcaagtgtgtgtgtgtctttgaaaaacaagattatgttttgttcagatgagagacaccttatttttaatctcatatgccgggttgagtttctggcactccttagtttgtgacacttggctttggtgggtttaagacctgtttctatttctctttcatttccatcactctcctctttctcctcacagacatccactctactgtggttaatatttgcctggatatgtgtatatccttgaaagatcatatagtgttattttgtgcatgtatgtgtttttaatgtgccaaaatgatattctaccttaaatttacttttaaaaaattcagtatcatgttttaaagaattacccatattgtgctacagataatataacaaggtttttaatggctacatcctaatagcaaaattttggaaacaatcaaaatgacaatcttgggataatgaatgttatcatgaatctatgcactggaatagtgtggaggaagcaggatacaagttagaagggtaaccagtttttctatatgtatctatatgtatttcactgttggggacacctacatattgtttagttatatgattggctgtgttttacttacaagtcaccaagtggtagctacttccattgccttcatccccttgatattccagataggacacagatcacatcctcctacgtcccttcaggaacctgtgtgtttctctgggtactgaggagtgtcattgtgtagtcacagaggcaggatgtgctggtctctagagcaccactgctaggttgcctgtgtctgaggactccttatcctgacgttctggccaacgcttggaattaccctgctgtcctattagcatgatgagtataaagtaatctcttgttcttacttttttttttaacagcccttgtcctaatgcacttacttacatttttcttgagcatctctttatatttttcagctattcagatttctcctgtgaatagccagttcatatatttggttcattttttaaaaattgggtttcatgttatttcactactgtgaatttggaggagttcttatgtaatcatccatttgggcatacgtctcctatctgttgccattctcagaacagaaatctttaacgtaatcaaatccatcattttgttgtgtgtgtgtattttttaaacacatggttcagaaaagccatggcggatggttaaaaagatattttccacagctgcttctattagcttcataagttgtccttttacattcaggacttgaatctttctggagctaacctttccaggtgtccagtatcttttgttcggtcaattgttgctttaaaaatttcaaagctatgttattactaggtatataaacggacatatctctacatctttatctgctgttccttaccagtatataatgttccttttttacccttgcgatgttttttgacttaaattgtcaaaaagcaatattcagtttgctattctagtttttttgttcctctgatatatctatctgtcccattcttatatttttcaaaatttgtctctcttggttggttggtttgattttgtaatagctttattgatacataattcacactcatgtagtttgcccatttaaagtgtacagtttaatgatttttagtatattcagatttatgcagtcatcacaattaattttagaacatttacattactccagaaagaaaccctgtatcctttagctatgatcctccaatccccccattccccacaactcagagcaaccactaaccaccctattctttatggagttgtctgttttgaacatttcatataaatggaattatacaatatggtttcgtgaccacatattgtatgactggcttctttcactgaacatagcatttttaaggttcatgtatgttgtagcatgtatcagtacttcatgtacttttattgctgggtaaattccattgcatggatatgccacattttgtttattcattcattggttgatagacatttgggttgcttccacttttttgctataacaaataatgctgctgtgaacatttatctatgagtttttgtgtggacagttcctttggatattattcaggaatagaatttctgggtcatgtggtaactatgcttaatcttttgaggagctgtcagactgttttccaaaatggctacaccattttacagtctcagcagcattgtatgagggtcccagcttctccatatcctcaccaacacttgttatcttttttattgtaactatcctaggttttgtgataaggatgcaaacagaaagctggaggtcttcagggacctagtgaatgaagttgtgtcctattttggcttgattttggttttccgtgtgcatagtatgacatgttgcccatgtttttatcttttgggatctgtcactatcacattactttgccaaatgttaggaacctgatggcccggcacagtggctcacacctgtaatcctagcactttgggaggccgaggtgggcagatcacgagatcaggagatcgagaccatcctggctaacacggtgaaaccctgtgtctactaaaagatacaaaaaattagctgggcgtggtggcgggcgcctgtagtcccagctacttgggaggctgaggcaggagaatggcgtgaacccgggaggcggagcttgcagtgagccgagatcacgccactgcactccagcctgggcaacagagcaagactccatctcaaaaaaaaaccaaaaaaacaaatgttaggaacctgaatatctaaatcaagctttaaagaagcatttgctagctatgctcaatgtttcatcttcactgtaataataaaatagattgagaaaaatgctttcttttaaataaacgtaagtaaaacaatttgaaaacgtttgttcttatcaaacagccttttgttcccttgatattttatacaaaatagtagatagcagaggataagttcctgataaggaatcagtattttctagcaggaaaagctagagaacaacaacctcaaaaaaaaaaaaaaaaaagaagaagaaagaaaaaaagcaattagcatttcacaaccagcagcagcagcatcacctgggagcttattagaaatggaaattgtcagtcccctccctggatctactgcatcaaaaaatgtgggaagggaggccagcagtctgtgctgtgtaaccttctgtcaggtgatttccatgcatgctaaactttggggaccatgctagatagatgataccattttcagaattattttcctacctgtctaatactctgactttagtcttttaagaacagatgctcaacagatatttattgagcattttttaatgtatcagggcagtatcatataccaaaaatacaataatgatccacaatataaaccttccctgagctcactggacatcatactttcagtaatagtttgttaaatgactgttgacatgatgaatgcccagtgctcatgaaaggttttatgagaaccagaggcaaagtgcctggttatctgttgggtacttaataaaccatcacttttgtttgaaactggccagattttctgtacattttgtgttactgctctgaaaccctctaagtcagaattcttttgattggcttcattcttcagctgaaaggccagtccagagctgtggatatatagtccattgctttcataaagtgttttttttctcctcctctatttgtgttgacttttagctacttgtgctattcattttccagaatgattcactcattccatcctgtctctcccagtttaactttctttggtgggttttctttggcattattggcctgggcacagtggctcatgcctatcattccagcacttggaaggccaaggtgggaggatcccttgagcccagcagttttacaccagcatggtcaacacagggagatctcgtctctcaaaaaaaaagaaagaaaattagccaggtatggtggcgtacgcctgaaatcctaggtacttgtgaggctgaggcaggaggattgccggaacctaggagtttgaggctgcagtaagctatgatcacacccctgccttccagcctgggtgacagactgagaccctgtctcaaaagaaaaataaaaagaataattgatttatttaagaaatatttgtagtatacctataatatgatagggattggagataacttaatagatttgatcattgctgtcatggggctttccagtctagtagagggaaaacagaaaataacattaaatatatatatataaattgcaaaacatatgcaatgaaggagagaaggagtgtgatagtgcataatggaagtgggaggccacatcaacttagcatcctcagggatatctcagaaaacctttgagacaaaacttaatccataagaaaagccagctaattgccccaaaagagtggaaacaccagcattccaggtagaaggaatagtatctgttaatattgaaggaactgaatggaggttgtcatagccaaagcagtgggctgtgggagagttgtgtgcgatgaagtcagggccagatagggaaggccgtggagttcttttaagccttcatacaaagtttgcaatttattctaagtaatagcacataggatattcttttatatatgactgtgagatgcagaagtggagaccatgcattctaactggggcttgggaggccagggactcatgcagcctagcctggcacatagccaggcactcccatttaaatgctgattgctggtgagatgcaggctcttgtcctagctctgtaggtcactttttgcttttgcaaggtaagatgctcacttgtatgagaaacagcgtattatgcacctgtagaactggtggacctgtgactcattctttttgttatgactggtgtttgcttccaggtaatagcagtgagtgcccgcctccaggaaatgctgaagatgacactgtttgcttggatcttggcaagtgtaaggatgggaaatgcatccctttctgcgagagggaacagcagctggagtcctgtgcatgtaatggtgagcagttttattcccagtccagcagcaggagaaaacatggcctttgtctgccaggctcccttcctccatttggaggttgtgcgaatgacagcagtggtgagatccaagccgaggatgaggggatggggaagggcagggtggtgtctggagacaggcatctctgcatgcagatccaccatacctgggagacctatcctgttggtgtttcttcttgctgcagtttcaggccatatggcaggctttgaggtgggagaggagggaattttgttgggggtgagtgggtgggtaggtagaggtgtgtcctagccttcctctgctccatatcatacaaaccacaaaagcagcagtagctatctacattacattggcatggaactaggatactcctgcaacaactccaccagagagagctgattccaggacctaaccccactagatgaggatttttgcagttatcaagaaggctgggtctgctcccctctgatctcttagagcagcctggggcaggagcctctctcctgctggcctgtcagttttccttaggtttctgtgctattttggaacccctgggtttgagggcatcctcatggactggtcagggactggctggactctgcttcccaccccacttaaaccatgggagtcgatgagggagttctcttgctttcaaaatagacagagagccaggtgtggtgactcacacctgtaatcccatcactttgggaggccgaggtgggcagatcacttgaggtcaggagtttgagagcagcttggtcaacatggcaaaacgctgtctctactaaaaataaaaaaaattagccgggtgtggtagcgtacacctgtaatcccagctgctagggaggctgaggcaggagaattgcttgaacccagggggcggaggttgctgtgagctgagattgcgccgctacactctagcctgggcaacagagcgagactccatttcaaataaataaataaataagtaaaaaataaaataaataaaagacaaagaacccggtagttaaataaaatcactgggttggaagctcaccatccatacagtggagtgaggaactcttccaagttcaataatgtgtaggtaaagaagataggttgagggcagtgtctcacatctataatcccagcactttgggaggccaaggtgggtggatcacttgagctcaggagttgtttgagaccagcctgggcaacattgtgaaacctcacctcttaaaaaaaaaaaaaaaaaaggtaacacgtagcagatgccaaataaatctgttgtgttgaatgccaagaggcttggggtgctctggaaggacagagcccgacacagtaaaagtccaagaaatattttataaattagtgaatgatgaaaaggttttctttttttttttttgagatggagtctcactctcgcccaggctggagtgcagtggcgcgatctcaggtcaccgcagcctccgcctcccgggttcaagtgattctcgtgcctcagcctcctgagtagctgggactacaggcaagcaccaccacatctggctaattttttttatttttagtagagatggggtcttgccatgttggccaggctgttctcgaactcctggcctcaagtgatctgtccgccttggcctcccaaagtgctgggattacaagcgagagccactgctcccggccttttctgaaaaggttttctttttgcttgtttttgtgttctagttgatttctttttctcctaagtatggtttaattttctggcatttctgccattcttatgtatgcccacatggctcacagatgcccggtgttttatcctgtgacctgtcagagctgttcttgggaggagttgtggagctttggctgcagggctcatgctcctggggtcactgagctccccacccaagggtggacagttgtgtcccagctgctctcgctttcagggagccagtgtgggccctgaggggcacactttagactgaaaaaccaaggattgaagtcagcagggtgacaagaaagttgggacaaagggaagcatttagaagagcattgtgaggggcttgaaggggagagaatagttagactttgaagagaggtcttgaatctagaatggatttttctctgcatttttttttaaaccttgtggcctctgtcactgaaggctgaggagtgtgacctcagaaactactccttggtgggggctatggatagtattagctatttaaataaaaaataaatgtgatttcttacctctttgggagcatggtcagggaggaaagaggaggcaggaggagaggcaggtctcagaacaatccagctgtcaatgcgtgttctctgttccagaaactgacaactcctgcaaggtgtgctgcagggacctttctggccgctgtgtgccctatgtcgatgctgaacaaaagaacttatttttgaggaaaggaaagccctgtacagtaggattttgtgacatgaatgtgagtatttatgtacagctttttctgtaacagccagataggaagtttttattttgtaagtacttgattttgcagatgaaaacaaatcaaaacacaagtggggctacatccttctggcccattgttatctacgggtattacttaggaggagaagacggagtgctttcaggtccctgcctgtagtttccttctgtggtgggaggctttgagcccagagactgagaaggactggggtggggactttatggtaaagttggttggtttcaggcagtgggtcctaattatgttttcctagattacttacagaactgactaagattgcaaaattattcagggtgtgattttgaaacaggtgctgaatgagtaggaaagacctagaaggctgcttgacttacttaagccagacccttttgttctctagagaagcataatttttctcatgcagaatgatgggagagggttttaagatttacgaggcttcacagggagtctggctgtgttgttcactgtccactgtgtatgtgtagagtccttactggaatgcctcatctttagcaaactggtttccttgatttttgtctcctggtaattctaaatcacttgtaaaaatggagtaattatgaaagtgttaatgacagatgttctactttcttgggtactcattacgcggaagttattgccttgtgtcaaagatgggaaaacgtttgattttaatgaagccctttacatgtcagttatttttataaagctacattgcttctgaatacattgtgtttgggaatgatgctgtatgtatgttttttcttcatagggcaaatgtgagaaacgagtacaggatgtaattgaacgattttgggatttcattgaccagctgagcatcaatacttttggtaggtgatttccccagattacttactgagagctgagtcaatttctgtgatgacattagaaaagtgtgctttcagagtgatgtgctttaattctgcagtagaaggtggaactattcacagctttagttatgaaacaactttgttggctagaataaaatgaactcatagatagtctgtccccgtggagcttggatgcacagattttctgacaagggaaataaagtcaaaatactggcttccttctttacccaaaaatatccatgtgattagcataagcatagtttaatgctatagactgaatcctgattgatgtaagagtgtttatttgactgaatgctatatactgaatcctgcttgatgtaaaagtgagcctcatattttgcagaagcagggtatatcatgttgtcacgagtccataatttaatcacaaaaataatatccaggtaacaaaaactttgtcttcttaagcatttactagtagtagcattccatattaatctgttgacacagctactccaggtaacatgttgaatattctgcaatctcttcctgtcagccagtatatgagggctatttctttaaaagcacttggtatggagagatggtgtggtgtaatacaggcagcacagacattctgctctcggtagtatgtctagccagcagctctggcatttgacacaatggtaatatcctaagagcatttcactttagatttgtgaagtacttggtcaagacattaactgtttggaattgttcacaggaaagtttttagcagacaacatcgttgggtctgtcctggttttctccttgatattttggattcctttcagcattcttgtccattgtgtggtaagtcatcaacttttaagtaattaaatgttttatttaaattttgatcaactccaaccatgtaatctctggaaaaggtaaaacttgttcttagcaaagtttggcctgatatttccaatagctttttttgttgttattcctaggggaacatgtcttgtagaaagcttaactaatggtcttttaaaaaaaatactatttttgtgtgttggtgttttaatatataaatttcttaggaattttatacttttaagcataggagactgtttaactggatttgtccaggtcctttgatgagtaaagcccttattgaagagcattttcaggctgacttcgttgcaatagagcaaatatcaaacatcggcatttcagatgttccccatatatcatgtagattattggcagcagatggctatgtcttcagccttctgcacaaataggatgtagggactggggcccagctgtcatatagagtatttacatcttccccaaaaaataagagtaagcagtcttttctgttctcattcagaatcagtaacagctacaagttgaattgggctttgactaaggaactcctggtcctttataaatttgaggccctttttcataaatgttcttacgaatccattcacttgcatctgtggggaatggggatttgtctgctgtagagatgagaaagtcacacccaggcttccagacttgttttcccaaactctttcatagtggccttcctatgagcatttaaaaattccagcacaactctgatgacaaaggagtttttcctactgcctccttcctttcctttcctgctggcttctcctgcctaggggccatctcacagagcagctcttcctcagggtggtgagcatgatgggtataggaagatctctagggagcacttgtgctgaagaaagctgaaggtgacgtgcttgaagctttgacagatgtctctggatgacagtgccatccatcacgattgcttctattggaggatggaacctattttgtttacagggaagttgcacatgtggacaaggcacgacccttgatttcagagcaaagcctccgataggagggagggccatggcttgtttttggtcatagaatgcattgatggcacccagacaggaagcctagtcctggattcttggtccttgccctctgtcacctattatgcttcagccacaggcagggatggggcagcagatggccatgtggttagccttctgcagaagtaggatgtagggattgaggcccagttcctccagcagagcatggtccacagaaactgtggagacagctaagagagtgaggccatgggccggggcagtgcgaagaatgctgcaggcccagccacctgggtcttcctaccagttgcccttccagtcagtgcggtcctggtgtacccagcatctgggacatttgtcatttcatgcacaggaagatgcctttattattcccctgcccacagagggataaatttctcagaaaacatagcacttaaaccttgcctctttctgtacttaacgccaaaatgtatttcctttgagtgcaaaggaaacacttctagactggtggcataactaaagcttgggtgagaaatggattgtcatctgttgagcctgctatcactttctacaactcaggttctaagttcttcagttagtgttaggaatagcctgtgatgaaatagtactcactaactgaattgtatttgtagggaatgaccttcttgctgtttctttctaggataagaaattggataaacagtatgaatctctgtctctgtttcaccccagtgtaagtataccatatgaaagaaacataatcttcgcctggtctgaggccctgttaggcaaagaccttcacctgacccagcaagagctttcactggctgatggaaggtcatgttgcagcaggaagggtctaggttggaatgtttacccttctgacaacagtgatggtgaacttcgattagttgcatggatggacatttaaagagctgtgctgtccccttcccaagccataaggagtgatttagccattcaacacttagttaatattttgagttcaatttctctcttgggatcttaccttgagaggtttgaatcctcttttgggtcttcaaatggtaagtaagttttcaggatgcttgaaagctagtaattactgtttttgccattaaaagtaatggcattaattacttttgcaccaacctagtattttttagtcacttaggttgagtgagcctcacctagcacttttttcttagcatcacagtgccaacagaataagaggctgtttgatgggtaagggtggagctgtgaggacctccgattcatcttttattcctatcaatcaattgaacccatgtctttgcagaacgtcgaaatgctgagcagcatggattctgcatcggttcgcattatcaaaccctttcctgcgccccagactccaggccgcctgcagcctgcccctgtgatcccttcggcgccagcagctccaaaactggaccaccagagaatggacaccatccaggaagaccccagcacagactcacatatggacgaggatgggtttgagaaggaccccttcccaaatagcagcacagctgccaagtcatttgaggatctcacggaccatccggtcaccagaagtgaaaaggctgcctcctttaaactgcagcgtcagaatcgtgttgacagcaaagaaacagagtgctaatttagttctcagctcttctgacttaagtgtgcaaaatatttttatagatttgacctacaaatcaatcacagcttgtattttgtgaagactgggaagtgacttagcagatgctggtcatgtgtttgaacttcctgcaggtaaacagttcttgtgtggtttggcccttctccttttgaaaaggtaaggtgaaggtgaatctagcttattttgaggctttcaggttttagtttttaaaatatcttttgacctgtggtgcaaaagcagaaaatacagctggattgggttatgaatatttacgtttttgtaaattaatcttttatattgataacagcactgactagggaaatgatcagtttttttttatacactgtaatgaaccgctgaatatgaggcatttggcatttatttgtgatgacaactggaatagttttttttttttttttttttttttgccttcaactaaaaacaaaggagataaatctagtatacattgtctctaaattgtgggtctatttctagttattacccagagtttttatgtagcagggaaaatatatatctaaatttagaaatcatttgggttaatatggctcttcataattctaagactaatgctctctagaaacctaaccacctaccttacagtgagggctatacatggtagccagttgaatttatggaatctaccaactgtttagggccctgatttgctgggcagtttttctgtattttataagtatcttcatgtatccctgttactgatagggatacatgctcttagaaaattcactattggctgggagtggtggctcatgcctgtaatcccagcacttggagaggctgaggttgcgccactacactccagcctgggtgacagagtgagactctgcctcaaaaaaaaaaaaaaaaaaaaaaaattcactatctacaaacctagaatatttaaaatacaaagattgcctgttttcaaacactattgaataagagggtgagatatttcttaacaacaacaacaacaaaaaaaacaggttgttttgaatgtgatgagccagccaggagatagaatactacctgcccttagggttgggggctgtccccacaagacttgatacttcagaaaccctttttattgacccacaagcagatatttgaattacttcttactttattgctccaggattctggatgggctgcatttactgtgtgaaggataaaaatcattagcctggattctgatttctataaattgccattaaaagctttttttcccctaagaactgaaatgtgctcaccagccaaaacattttaacttgtaaattttgagggcagttaaccaaacctgtgactaatcatatctcctcctaccccccatttccaaggacatttgttactcagatacttgttatactaatacttgaacttgtaccttatggtatttgctatcttttaactagtcatgatattcttatactttagttacacttttggaatttgatacaaggttgagtggggtgtgtgggtgtatgtatgagtgaaacag

SEQ ID NO: 15378 - DNA, 67338 bp, Homo sapiens
cactaaactatacagagctaaaatcatgcaaaagattgcaaaacaaactgccttgggaaatttccagtctaagctaaatggaccaagtataggattgaattttaagaagttggtgggaagattccagctcttgtactcacaggtaaggtcctaggattctatttgttgaagtgtctgcagaccctctccctacagcaggggcgtggagcaaatgtgcattcaggaagtgcttattagtccccccaaaacctttttcgtgacgacagacggatggaggcctcagacgactccggcagtaggaccctgaaccaaatgcctgagctgcgctcgaaaggctcgtctcgcaggagctggcgagtggcacgggcttcggtggccgggctcggggctcggggctcggggcccggggccggggggggcggggggtccgtgcccagggcactctgtggctcgattcatgtccccgccctcccacctgagcacactgggcagagagcctgcggcatcgggccagtcgcgcctcctcgtccgccctgggcaggtcgctgggccccaggccgctttctacagctcctttaataaaatggacagcaggggtcctaaccagacgtgggcatcaagacaaaggaggcggccagacgcgcttgagggcctgctcgctagctcccgcccccccattccgcggtcacccggggacagaggccaggccggactgggtggagttgggactcatacgtctgcgtccaggaaggcgccgggcgagccccagctagacgtgacgggcggggccgaacacggcagcggaccagaggcccgcggcgcaccggcgtggggcggggcaagcggagcctcccgggatgccgcgcggcagccggcttccggctgtgggtggtgcgggggacagcggcggccggaagctggctgagccggcctttggtaacgccacctgcacttctgggggcgtcgagcctggcggtagaatcttcccagtaggcggcgcgggagggaaaagaggattgaggggctaggccgggcggatcccgtcctcccccgatgtgagcagttttccgaaaccccgtcaggcgaaggctgcccagagaggtggagtcggtagcggggccgggaacatgaggcagtctctcctattcctgaccagcgtggttcctttcgtgctggcgccgcgacctccggatgacccgggcttcggcccccaccagagactcggtaaagacccaggggagttggcttaggccggcgcctggagcgctcgtttgagggaagagcaggggagctgggtctatcaggtgtttgggggcggggtattggcgatggtggcgcgtccctaagttttcagtgtagaagggggtgtggctctcggagtttggggaaagaataaaggagatgggcctgtctctgagtgggaaagggctactggacgggctccatgtagtgactgagcgcctgagaggggtttgctccctagctttgtgttcggggagggtgttgggaaagcggtaaggagtagggtggctggatcttgtttggagagggagatgtggtcagggttcttgccttagtagggaacaaatctagtgttgtgtgttcctaccagagccagaaaggaagggcccaaagctccagaattcttcctggtcctcgaaggagggaactagaatttctgctgtaggaggtacttatgcagtaatctcgttgggaggcggagactggagttggagtcttaagagttgtgtttttgcgaacatcctaagcacgttcttggttatttcaattgtagcttattggaggtgcttgggagatggggggaggcggaaacctggtaagccaactcgtgatgctgccactatgaatgctttccttgcacttttaaacaaagaaattatcaagagtgacgagtttgatgaatttagaggctagaaagtagagggttcctatttcattagattttccagagagattggattttaaggatggagatgcattaagggatctgaactttggtggaagtaagtttgcgtgaacttttagtgtattttaaaatccttttatctttcaaaaattgacgtgtaagatactttaattagtaataaagtgtgaaataatgttttcccagtgtgtgaaattgtaggcttgcatggttgtactggttcccaaatttcaccatgataccatgtgtagtattttttttctttatatttagtggacagaaattgtaatggattggtatggatactaaaggtgttgagagtgttatcacttgaacagctgtcttatgattctttccgattgaaatggattacaagtgactaatgaaaggcaagggatcttgttaggaagtgctgagaagtggtaagtcagtacaaattgaaggacattttgaggtaggattgtggttaggatggagggatagggtaagggtcttcattttaaggataaatgttagtaaaaagaataaatatgtattttgagatattaaaattatatttgcaccaccctgacacaactgtttcacttatgttattaatctgttgttcgtaggtaaaaataagcatgagtcccaaggaagcatacagtttaaagagaaacattactttctagatcaattcataacatttgcagatcgtaaggttttttagaccattttttttttccaagacagagtcttgctctgttgcccaggctggagtgcagtggcgcgatctcagctcactgcaacctccgcctcccggggttcaagcagttcacctgccttagcctcctgagtagctgggattacaggcatgtgccaccacgcccagctaatttttgtattcctagtagagacggggtttcaccatgttggccaggctggtctagaactcttgacctcgtgatccgcccacctgggcctccctaagtgctgggattacaggcatgaaccaccgctcctggcccatgtgtttgttttttatttgcaaaatgcagaccacctgtgccagaagaatgcatagacttttcttttttcttttcttttctttttctttctttttttttttttttgaggcagtgttttgctcttgttgcccaggctggagtgcaatggcgtcatctcagctcaccacaacctccgcctcccgggttcaagcaattctcctgcctcagcctcccaagtagctgggattacaggcatgtgccaccacgtccggctaattttttgtatttttagtagagatggggtttctccatgttattcaggctggtctcgaactcctgacctcaggtgatcagcacacctcggcctcccaaagtgctgggattaaaggcttgagccaccaggcccggcctctttttttttttttaaacgaaatatttgaaggacacacaagtattatacgtggcattggaaatacaaagatcagacgatatccatcttcaaatggttatagcatagggaaatagacattcatttaggacacttctaaaacagcatagaggagagtgctagagtacgttatagcaagtgttatcaccaaatgaatcttagagatcaagtctagttttcaaataaaggaggaggaaaatgagtctcaggaagatgctgtcagttgtcaatgatgaacataggccttgtgggtatttttcttttgaagaatgactttttttttcagtttgtttgacagcttacaatataatttgttacttaaccttaccattagattgagttggtcaagactagcaaatagtttcatagttgaaaaacatgctttattatttattttttatgtttattgtcctacaaatactactatattgcagtactcaatatcgattaggcatatgacaacatttttctgaaaggcaaaaaatacctaataaaatgaagcctggtttttagagtcctctatgggtcaccaaaaatgatttcaattgaactgttatgaattgcataatttaggaaagttatgagtcatatgagcttagtcatgatgatatcttgttgaagttgcagctggggtgtataagtctcactttgatttcaaaatcgttttccctttgtgttacttttaataaaagaggatgtagtgggtgggaggaaaaaatataggtcacagatgagggatgagaaagtttgtatctgaaacatgtattttcaaatttaccttgaggttattggcatggggattctccatattgcagtgctgatttcattattgacagcaccattttactcagtattttgacatctggctttctcttttgatgttaattttgcttactggctgcattcctttgaaacctaaatgcttaactgccctaactgctccaagggagatttaatgtaactctgctttatattagtctaagagataaaccatatttcaagagtagaatggagaggaattaagcagataattgtgatggggaaactggagagatccttttgactttcacaggatttcctagaacattaaatataggtttcctccaaggccaattgtggttgatttttggatccttcaccattttctatttgtgagataataagtgtatacagctggaagtgtaatgtgaagaaagtctgaaaaagattgataggaaaggaggacaggaatgggcttcattgaggtaacggaagtgaaatgaaaggcttttcatatatgggttgagcatccctaatctgaaatgctccaaaatttgaaactttttgaatgctggcatgacagcacacattacccctaacacacgattttttcactgttagtggtatattttttactgtgtagtacttatgtgtgaataggtataacaaaacgattacttattgtagcatgtaaaatcagtcaggaatgatggtgatgccagacaaccacagattatttatgtgggtggccgagacagtgacacctttgctttcgaatgcttcgttgtacacaaactttttttcatgcaaaaaaagttacttaaaaatattgtttaggccaggcgcggtggctcatgcctgtaatcccagcactttgggaggccgagctgggtggatcacgaggtcaggagatcgagaccatcctggctaacatggtgaaaccctgtctgtactaaaaatacaaaaaattagccaggtgtggtagcaggcgcctgtagtcccagctactcgggaggctgaggcaggagaatggtgtgaacctgggaggtggagcttgcagtgagccgagatcgcgccactgcactccagcctgggcgacagagcaagactccatctcaaagtaagtgaataaatgaaacataaatgaattttatatttagacttgggtcccatccccaagatacctcattatgtatatgcaaatatttcaaaatttaaaaaattctgatgaatgaaacacttctggtctcaagcattttggataagggatgctcaatctgtatctctttatttactcctaaaatcagccaaggaaatgggcatctctccgttcccccccttccttttttttttttctttgttgttacatgagttgtactggtttcacttcatttgacagtgttctgctaatgactagacgtgtatctctgacctggacttgttctctggagttcatattcagctgcccatttggcacttcaaatataacatgtccaaaattagttaccttttttttttttttgagacagagtctcactgtcacccaggctggagcgcagtggcgcaatcttggcttactgcaacctccacttcccaggttcaagtgattctcgtgcctcagcctcacgaatagctgggattacaggtgtcccccaccacgcctggctaattttttttttttttttttttttgtatttttagtagagatggggtttcatcatattggacaggcctgtgttgaactcctgacctctggtgatccacctgcctcagcctcccaaagtgctgggattacagacgtgaaccactgccccagccagttacctattcttttgattacaagaatgagtagctggacacagtggcttacacctatagtcccagcactttgggaggctgaggccggcggatgacttgaggccaggagttcaagaccagcttgaccaacatggtgaaacctgtctctactaaaaatacaaaaattagccaggcgtggtggtgcgtgcctgtaatcccagctactggggagactgaggcaggagaattgcttgaacccgggaggcagaggttgcagtgtgccaaggttgagccactgcagtgcagcctgggcagcagagtgagactccatctcaaaaaaaaaaaaaaaaaaaaaaaagaatgagtatcggatacaggtttagcctaggactaggcagggctgctggtaattgtggaagtagtctcattgcctaacctgaaacttgcatcctggttactggtcttgctggagagtcttggctcaggttacgtcccaggtctgttgaggagctcttgatagggaattagttgaagcagctcatactctatcctcctttactggtataaatccataaaattgtttagttcccaggctctggggtccctggcctagcagagagcactgctccctttttctcattccttagtcccaacaacccgcacctgacacttactacacgtggcctgcttccctgtcctgtgtgttttggggggtgctgaagaggaaggctcctgtgtcttcagcacaaacacaataaacacttcacagcagtactggctttatgttttccatttctgatatcagaagtaggagcatgacattgatagtgtcattttgggggaacttttcgtacttcatgcagcagagcagtgaagagtgagctgagtgccttggggttctgcagtacactctcaagtagtattttaggaaaatgcaatttgctgaaaaaataaaagaaattaatgtaaaaaatccacaagctgggcgcggtggctcacgactgtcatctcagcattttggaaagctaagggggaaggatcacttgagcccaggagtttgagaccaggctgggcaacatggcaagaccttgtctctacaaaaaaatagaaacaaaaattagccaggtgcggtggcatgtgcctgtggtcccagccacccggaggattgctcatgcccaggaggttgaggctgcagtgagtggtgattgtgccctgcactctagcctgagcaacagagcgagaccctgtctcaaaaacaaaacaaaacaaaaacccacacgtttccagaaccttctcatataacactttatttacattgttcttaaatacgtgtgggacggttatatacataccactatacttatgtgtatatatgttgatatacacacaaaattatatacataatttttgtttgtttgtttttgagatggagtctcactctatcacctaggctggagtgcagtggcgtgatctcagctcactcactgcaacctctgccacccgggttcaagcgattctcctgcctcaggcttctgagtagctgggattacaggtgcctgccaccgcgcctggctaatttttgtatttttagtagagactgggttttaccatgttggccaggctggtcttgaactcccacccttgtgatccacccacctcggcctcccaaagtgctgggattacaggtgtgagccactgtgacctgccatatacataattttttaaagtttcacgattagttttagcttaaaaatgtcagctctgggcttaatgaagaaaatatggatatactttatgtcaatgcattaaagtgaatggccataaaagcttatcccagagacaaaacaattcagatataagagaagtgggagagtggaaggtttatctaatcttctgtaggcaactccacagctacaaccagaaggccattttgttacaggcctgaaagccccgttttctttttattcttctttgaaacctttagaaggaacaaagtattggctactttttaccgctgatgtcagtgttaagaatcttgtgataacatagatttactctccctgctgaaaatcactatgtggctcatcagtaacacaactagacatgatgacttaatgcaaaggaagtcctatgtaaatgagcaatgaaattgcaactgtgtataaggaacaaaatagaatatgaaactccagaatcttttgttttcatttctgtttctcccaaggctctatcattcaaaactccagaatctttcagcatgcaattgtctcctgatatcagcccctctcttgttttgttttcttttttttttttttaatcacagtgagccacaacctaggagtcttttagtggtttctacttggtttgctctgcagcctaccagcagatttcctacattccggtcttgttcccctctagcccattctccacactgcagtcataatgaaatttctttcttttttgggggggatggagtctcactctgtcacccaggttggagtgcagtggcatgatctcggctcactgccacctttgcctcctgggttcaagcgattctcatgcctcagcctcccaagtagctgagattatacgcacctgctaccacgcccagctaatcttgtatttttagcagagacagggttttgccacgttggccaggctggtctctaactcctgacctcaagtgatcgcccaccttggctttctctctctttttttttttttggattttgagacaggatctggcctcgttgcctaggctggagtgcagtggcacgatatcagctcactgcaacctctgcctcctgagctcaagccatcctcccacctcagcctcctgagcagctgggactgcaggtgtacaccaccacgcctggctaatttttgtattttattttatttatttttttggtagagacggggttttgctgtgttgcccaagcttgtcttgaactcctggggctcaagcgatctacccatcttggcctcccaaggtgctgggatgacaggcatgagccaccacagctggcctataatgaaatttccaacttacagctattgccattatccaaagcccagaatccctgatttccttccatagcccttcatggcctgaccagtgcctgactctccagcctcacacttcatattctctctgtactgctctgcactgtagcctcattgagttgctttcacgtctttaagtgttgtgttctattttttgtggaattcagcatatgttatgcccttgacctaaggcctctcctttcttttccttctctggggtgctgcctcatccttctggtcttcaaaaccgtttccctgggaaaacatctttgactcagcaggcagggatcatgcccctgctgtgtctgtgcataactttctgtggctacttctgtcttggtctgtgatgtactttataataattttggtctttcctccagtgtcacaatactggaagtctgtttctttttctctgtgttgtatccttagtgcctgaaaggtaggaggttctcaataaatatttgttaaataatcaagtaaatggagtctggtggaaaagagaaaaaataagtgtagaatgtgtgtgcaagaaaggaggggtagggggatgaaaaagataacaaaagcacataacaaaacaacaaaaagcaaaaacaacaaaaaatgcagatgacaaaaaagataacaaaatgatgactgctgtggcaacttgtagaaagtaaggaaggtgctctcattctagagagaagtaggcagccattgtagttttttaaagagagaatatgggctgggctctgtggcccacgcctgtaatcccagcactttgggaggccgaagtgggtggatcacgaggtcaagagatcaagaccatcctggccaacacagtgaaaccccttctctactaaaaatacaaaaattagctggataggtggtgtgcacctgtagtcccagctacttgggaggctgagacaggagaatcgcttgaacccaggaggcggaggttgcagtgagctgagatcacgccactgcattccagcctggcgacagagtgagactccatttcaaaaaaaaaaaaagaatatggccagacactgagctgagatagacagtgcggcagtgtctggtattaactgtaataaactctactgtcagaagcaggtggtttatacttaagtttattgagagaattggatatggataagagataaactcttgggaaatggggagaaatataaattctgttgtaaagcctgtaaaaaattgagattactagtggttagaattttggaagtgaagtgcagtgaaatattgagtacctgagaggttacttgttagtgaaaacacaatagcagtagtacgtagctacagtttggctccaaaggaagaactgtttttactatagtttgtaatggcttcagaatcttcaatttgagatatccagttattaaaagagaatcaattgcagttgaaatgcattagttaagtattttaaagtgctttagcaagctacatttaaaaagtgcttattatagaaaatatacccaaaataaccaatgatgttactgtcttgtgcttattttttctagacctatttttatacatagttaagattatacaatatgaatatttctgaaatctatatttaacattataacatatgtatttttccatgttctttctttttttttttttttgagactgggtctcatcctgtcacccaggctggagtgcagtggtgctatcttggcttactgcagccttgacctcctgggctcaagtgatcctcccgcctgaaccttctgagtagctgagactacaagcacatgccaccatgcctggctaattttatttttactttttggagagatgagggtctcactattttgcccaggctggtctcgaactccttgggtcaagcaattctctcaccttgacctcccaaagtgctgggattacaggagcgagccaccgccctcagccccatgttcttaaaaaccttttgtgaacgacatttaaaatagttgcagattttttcccctgtctttggaagtgttacaacatccaaccatttcacagttactaatttaccatcattctggtttttgtccttgaaaataaggcaaggctgaataatgaacatctttgtggctaaagtttttttctttactttgagttgttaccttcctttagcttagttcagtggttttttctttttcttttttgagatggagtcttgccttgttgcccaggctggagagtagtggtgtgatctcggctcactgcaacctccgcctcccaggttcaagcagttctcttgcctcagcctaccgagtagctgggattataggcgtctgctgccatgcccagctaattttttgtatttttagtagagacagggttttgccatgttggccaggctggtcttgaactcctgacctcaggtgatccacccgcctctgcctctccaagtgctgggattacaagtgtgagccaccatgcccagccagttcagtgattttcatatttgagtgtgtcagccttgcctggaagccttgttaaacacagactattggatcccactgggcggatttctgtttgagcaggtctgaggggagacctgagcatttgcatttttaacaaattcccagttgatgatgatgctgctggtttgggaactacactttgagaactactgggctatattattgacaatgaaactataatgttgaggttaagttcctaagtcagtaggagtgattatgatcttgaatgaaactgagttcatgtaccaacctgtatcagggaaattgaagaactaaaggaccatattgcatttcagcactgagaattcgtgcagtttgtgaacatgtgagtgctgatatgtgcaaggtttttgctgagtattgtgaggcaaggatgttgtaatgaataaaaaatagccctttttggctttttttttcttcttttgagatggagtcttgctctgtcgccaggctggagtgcagtgatgtgatctcagctcactgcaacttccgcctcccaggttcaagcgattcttctgcctcagcctcatgagtagctgggactacaggtgcccgccaccacgcctggctaattttttgtattttggtagagactgggtttcaccatgtttgccaggatggtctccatctcctgaccttgtgatccccctgccttggcctcccaaagtgctgggattacaggcgtgagccaccgtgcccagcccggccttttttcccccgcctagagatggagtcttgctctgtcgcccaggctagagtgtagtggtgcaatctcagctccctgcaacatctgcctcctgggttcaagcgattctcctgcctcaaactagctgggattacaggcatgcaccaccatgcccggctaattttgtatttttagtagagacagggtttcaccatgttaatcaggctggtctggaactcctggcttcaggtgatccttggcctcccaaagtgctgggattacaggtgtgagccaccatgcatggcctcatttgggaaacttttgatatcagaatcttaggtttttcattagagattgtcagatttccatattcctctggaaggtaaaggcctaattgctagcattctggaagccagttagggtaggagggtaggagggtagggtattgggtagaggataaagaaggggtttgggaaaggtggggggtgtctcttggcagttgtatggttaaattgagtttttgttttatttagtgatatgtgttttttgggtacatgtgatattttgatacctgtgtataatatgtagtgatcaaatcagggtgattgggatacccatcatttgaaacatcttttctgtgttaggaatattacaagtcttctagctgttttgaagtatacaataaattgttaactataatttctgtactgtactatcaaatattagaacttactaatcaaactgtatttttgtaacactaaccactttctgttcatctccaccactcccacttcccttctcagcctctggtaaccaccattctgctgtctacctccacgagatccacttttttagcttccacacatgagtaagagtctttcttttaaaactggttttgtgagcatatttaacatcagtagcaataaacttgtattttaagctcctgttgctgtattttgaggaccttctaagtccattggaaggattttgaataccatagtgtctgcagtgatagttgttgaaagaaagggaaggcatcagtgcaaatatttttagacagtttttaaagagactcaagtcacccaatttgtcttctaaaaatcctgattttggaagaggcagtggagtttctgttgataaaaaatgatttatagtttgtgcttggcacttcctaatggattacatcaggaaagatttattgtctggcactctcattttaacgatactacaattgattattaggtttagatgctaataccttttttacctttatttcagagaagcttgattctttgctctcagactacgatattctctctttatctaatatccagcagcattcggtaagaaaaagagatctacagacttcaacacatgtagaaacactactaactttttcagctttgaaaaggtaatttgaattattcatggaataatgttggggcactgggggcttggtttggcaaaaacaaaaaagtaagggtatctactgaaatcttgggaaattacattttaaagatttgtaattaatttccagtataatgcttattctaaaattcatactggggctgggtgcagtggctcacgcctataatccgagcactttggggggccaagacatgtggattgcttgagctcaggagtttgcccaagctcagcctgggcaacatggcaaaaccccgtctctactaaaagtacaaaaattaggcatggtgacacgtgcctgtaatcccagctacttgggaggctgaggcaggagaatcacttgaaccagggaggtggaggctgcactagccgagatggtgccactgcactccagactgggcaacagagtgagactctgtctcaaaaaataaataaataaaataaataaagttcatactgatgagtatttttaaaaaagtaaatagatattgcagaggtgttaatgatggtaacgatgtttagaaaattctaacataatttaaattaattgaatgcttataaaaccttttgtttttggtgctactttataaccatcaatcatgtgctaaatattatctttatatatgaagagataaagattttgttcaggaccccacagcctggtggtgagctgggtctagattttactgttctatttatttatttagctaactagttacttagtttccaggattctttaacctgcttcatatttatttatttttaaaaacagggtcttgccatgttgccaaggctgatcttgaacttctgggctcaggtggtctttccatcttggcctcccaaagtgctgggattacaggtgtgagccaccatgcctggcccaaatttaatattctttctacattgagttcctcttacttcttagcataaattgatggatatgttctatttcagtagtaattttaataccacgtattgttttgcacattgaaatgttaaataattgcaggcctctttttaaagtctttaggaagctttattcagtatcaaaaaacagacacatggagaattgactgaattattctttatttatttatttttttgagagtcttgctctgtcgtccaggctggagtgcagttgtgtgatcttggctcactgcaacctctgcctcctgggttcaagcgattcttgtgcctcagcctctcaagtagctgggactacaggtgcacagcaccacgcctgggtgatttttgttatttttagtagagacagagtttcaccatgttggccaggctggtcttgaactcctcacctcaagtgatccacgatctcggcctcccaaagtgctgggattacagacaggggccactgcatctggccatctttattctttatataggacaagccttctcaactatgttaaaaaataaaaggaatatgtgcgtctggtttaaaaaacaagccatggaggatatgcaaagtttttacttctaactcagttagacttctcagacccagagaggtttcctttgtaaacttccaattttttgttttgttttgttttttgttttttgagacagagtttttgctcttgtcgcccagactggagtgcaatggcacgatcttagctcactgaagcctccacctctcgggttcaagcagttctcctgcctcagcttcccgagtagctgggattacaggagcccactgccatgctcagctaatttttgtatttttagtagagatgaggtttcaccatgttggccaggatggtcttgaactcctgacctcaggtgatccacctgcctcaggctcccaatgtgatgggattacaggtgtgagccaccgtgcccgacccaaaatattttaatgcatgttttttgcctataggtctctgtgtgtgtataggtgatatagatagcatatttacctcattttaaacagctgcataaatattcctattgcatagaattgtaacaacatactgactaatacactacagatggatattgtttaaccaaagtgatttttttaatacaacaaacagtgctctagtgagtatctttgtaaatgtgtaccttgatgaggtgtttttataggatatattcctggaaggagaattactgggtcaaggatatgtatactatgtttattgatattgctctttcctcccaaagagatttgacaaatttattcttccagcagcaatatatgagtttacctgtttcctgttatctttgccaatagtaggtttatcagcctttaactgtcacccctctaaagggcatggcattttatagttgttttgattttcattttgtgtgacattgagcatctttttatatatttgtaagtaatttgttttatatttctgtaaactgcctttttatctcttttgactatttttctattgaatttgtctttctaactactgaattgtagcagtgcttagtatattaaggagattggttcattgtcatgtggttattttaggcaaatttttaatgcaaattaatttttcctagctattgcaattatccttaggttattttttaatgacttctttttattcgattttatgtcagaatattatagtattggttattagctttcaacttacaccaaatttgagcagattggtaatattaatagctacagttaatcaggtacttattttctgtaatttactggcattttacataagttatctctaaaagtgattccttttttgaaggaacaaaaaaaaaaaaattaaggcttagacagcttagtaacttgcccaagattactcagctagtaaatgacagatacaagatttgaacaaaggttggactccaaaacttgtgttatttctgctatactggtggagagtttggtgaagaagtggatatagtagcaagaaataagtaggagcgaaggaagagtgaggaaactataaaatgaaaagaactcaaagtttagctttttgggtttctttggatttgaagtggcctgtagaatccgtattctagaggcaaaaacttccatagccttacatatttctctttcaagtttcgtagatgacattgattccctaagaaaatattaaatcgtagccacttgttatcttttctctgtgtaagaaagcagggaagtatgtaatttattttacaaagtttccatactaaatatttaatgggaaatttatctaacagtctatggaattttataccaggtgttttaaaataggttatttcctttaatccccaaaaccgttcagttattaggtgatattatttccatttgtagataaatacttaggattcaaagattgaggccaaggtcggacagtgagtaaatgaaagtaggacttaagccaagtttgtcagactccaaagcccataccctttcttttctatcatattgcgtcattaaagtttaaaacaagaacaaaaacaaagatagctgaagtaatcagtttgtatcagggctgaattaactctatgaaacccctcattacttgatggtaaatgagaagattccgtttttcgatagcagtggaaggcaaagtaatttaaaccaagatcattgcattaaatttggatgtaactattagaggttgaaaaagcatagaaacactgagaggttgtatgaagagttgaagtaacttaagaaaaaaagaaacttgtttaaaatttgccttacaagtttcatttcctttttgttataaatcaagaaattatcagctaggcgtggtgactcacacatgtaatcccagcactttgggaggccgagctggatggatcatgaggtcatgaggtcaggagatcgagaccatcctggctaacacggtgaaaccccgtctctactaaaaatacaaaaaattagccaggcgtggtagcaggcgcctgtagtcccagctatttgggaggctgaggcaggggaatggcgtgaacccaggaggtggagcttgcagttagccgagattgcgccactgcactccagcctgggcgacagagtgagactccgtctcaaaaaaaaaaaaaaatcaagaaattatcttatttttaaataacgaaaaagctgcggagtatatactgttttgatacttttttgatgttgcctgaatttttttggaaaaagttaaatgtttctcctaaaagtgaaatatatcagattacttgagaaggtctagaactgataaagaaatgaaagtgatatacctgactaaatggaccattaaaaatggttagggtaataatgttaattcaaactggttagctggtctttagttactgtaaattcttaagtcaaaagtcagaaagataaaacgttaaagaaatctgtaagaaaatgacttcacataattttgggaggataaagtaaaagaaattttgacattctgttggacgttttataactcaaaagctaatattggaaaatcaaaaaacatgaattttataatcgcttggtctttatctttagaaaagattcttaatgtagcaaatgaaaaatgcaattccactgatttctttctgaaaagaacattaagtaatgttgcaactcttagctttaaaacaaaataataagacatttataataagtatgcttttgaaagttctcagcataactggagggaaaaatcataactgagaatgtgtgggaagatatgttttaggatagcagaagaaaatgttccaaggatttacgaaataatgttctattgtcttttccctttgaccattaaaaaaccacaagcaaactaaaattaccttgttatgctcaaaaagttaaaaatatttgttgccatggagatagtcccagtctagatttctttccggtagtttaaagacttttgcaatcccatggggaagtaatatattttcagtacaacagctgacaaaatttgtttctgtgggtgagatgaataatatacctttctttgtctttggtgttcatggacacattgaaagactataaataatacttgagaaagtcttgctcaccactcctagttttcatgtaaggatggaaagtcatagaaaacaaaaagaatagtaagccaattaaagaactggactgaaactcaacaaaaagaatagtaagcccactaaagaactgaagtgtataccccctcccctctcctcccctcccttcccctcccctcccttcccctcccttccccttcccttcccctctcttccccctccccttcccctctcctccccctctcctcccctctcctccccctctcctcccctcccctcccctcccctcccctcttttcctgtcttctggtgccaatggagtctatattctaatgtctgtcttagataccttgtatttattttcctaactgtaattgtgggttacttttttgcaagatatgttgttttgaggaggaaaaaaagcacgagtactttttttttttcttattttgagcgggagtctcgcgctgtcaaccaggctggcgatctcggctcacagcaggctccgcctcccgggttcactccattctcctgcctcagcctcccaagtagctgggactataggcacccgccaccatgcctggctaatttttgtatttttagtagagatggggtttcgctgtgttagccaggatggtctcgatctcctgacctcgtgatccgcccagctcaacctcccaaagtgctgggattacaggcgtgagccactacgcacggccgcatgagtacttttaaatatagaaagcagcatttattaattttgcacagcaataagaattttctcatagtccacccagcttgatagagacagcatagtacagggttttgaaataaaccaggtttatttcccagtttcaccatttactagctgtgtaactttgagtaggttgattagcttccaagcctcaatttgtacttgtgtgaagtggggataatagatgcatagtacctaacaccaagtaggtgttcaataaatggtatataataggattagtttttgataataatttttttagataatcaggattccaacttaactacgcagtcatgtgtgtttccttattcttcagtgttttccaggagagatgaatgtataagttctttgaatatctttaccctagtgtgagtttattgtgatctgctgtttttatagctaaataaattagttcatttgtcgttacaggagatatattgctctaagtacctaataagactttagttgtaacttgcatagtgttttattaatgtcaatgcttctggctttttaagaaagtttaattatgtgaaaatgagacttaaaatttgtgtgcttagagtaaaatatgaatgcatttttcttcaggcattttaaattatacctgacatcaagtactgaacgtttttcacaaaatttcaaggtcgtggtggtggatggtaaaaacgaaagcgagtacactgtaaaatggcaggacttcttcactggacacgtggttggttagtatggagcttgttggtttgcccctgtgtctggtgtattaggtctccaaatctaacttgattgcatattcttttctggtgcaggatagtggggacggggtgtcatagaagtgctattctttgacttttctttgaggtatataagtttagaggcaggaacattctaatagaaggaaatgagtattatctaaatgtcatactagctggctggtttaatgattaaaattaaattcttcttaagtgataggaatttaacctttcttttcctcagtgactgtaagctttctttatgatattttaaacagggaagcttggagataaaatacttggtgatcctattacgtatgtatttgagaaaatttatcaaacaagcaattgcagtttactttttgacctttttctgcaatgagaaaaaaaaatgtcattgaaatccacaaatagtatagttcctaggcctgtacattctaaatcatgctttctgtctctcttagttcttcctttacctagaagtagataaaattattccagaagaaaatcttagcagttttgtttgttttgggaaagggataggtttcaagtgactaaacttgaggctaccccttaggagttgagattatctagcttctttctggagcctttgtttcttgttttgcagagctctcacagtactaggcaaattccaccctgaaggatttaatttttattgagagtaatgcatagtttcttatttgatgtaagtatttttaaataataattttttttttctcttaaggtgagcctgactctagggttctagcccacataagagatgatgatgttataatcagaatcaacacagatggggccgaatataacatagaggtaaatttatatgtgaattttttttcagtagcttatatctctgattttcaaaaagctgctcagttctgcaaaggtgaaaagtaattatacttatttctttcctcttcgtatttgaagttttttactaggaaagtagactttttaaaaaaggataatctctaagaagctgtgttatgatacaccctgtatttctaagtaccataattgagagagttacatgtgggatggataataggaagagaaaactttctttccctcctgactcattttttaattctttctcaaataataaatgtaaacatcctcagaaatgaaaagtgaagtattatttttcaatttctctgtttttctgctagacacactggaaatgctagatcaatgaaaggtggtagttcatagtctgagaagttaaagaggaagctaggaaagtcaggctgtggtcactcttccattgaaagagtagcaatagaaatcaagaccacagtggctgcattggttaagacacatatctatctgtcagatattagtctacaaaacaaaacgtttcctcataattgtgaattgaagttgattctgtgtttcctgaaaaatgagaagactctgggtggtggtggtgatatcactaaaatagatcacctgtgggaaaactgagtaagattggtcaaaatgaaatgttcaggtgtatttgagtgcttaataggggtaaaacagtctgctggagctatatatactatatgttttaattatatccaatctacatgactgttagtcctttgactgtccattattgtgaaaaagaaacctatggccttgcagtatgttatagtttgttaatgtttaagctatttaatgtcaatgttttgaggagtctggcctaccagaaagagtcagaaatttagtagaaagtaaaggaactaatattataaatgcattcattctagaataggcaaagcatcactggaatgtcttaaatttgcctgttctttcaaatcaatttattttttaagaatacctttattttaaaatatatgctcattgcaaaattcggaaaatagattatctgtacttggacagataactactattgacattttgacagacatccttccaaatttttttttctatgtgtaaatacacaaataaatatagttatacccactattttttcctgcaaaactaggaccatacaatatgtacagtttgtcttcacacatttttcgtttaacaatatgattatgaaccttttcgtgttaatatagatctaaattagggttttgtttgtttgtttgtttgttttttgagacggagtcttgctctgtcacccaggctagagtgcaatggcgtgatcttggctcactataacctctgcctccccggttcaggcgattctcctgccttagcctcccaagtagctgggactgcaggtgtgcgccatgatgtccggctaattttttttcttttttttgagatggagtatcactctgtcactcaggctagagtgcactggcgtggtctcggctcactgcaacctctggctcctgggttcaggcggttctcccgccttagacccttgagtagctcagactacaggcacatgctacctcacctggctaatttttgtatttttagtagagacggggtttcaccatgttggccaggatggtctcgatctcctgacctcatgatctgccagcctcggcctctgaaaagtgctgggattataggcgtgagccactgtgcctggcctcaactgttttgtttctaacttttgaaataaaaggtattgtagtgaacagccttgggcacaccttttggtgcatgtgtttagttggaatagtctggatgataggtaatagtctgggaagttaaatgaagaaactgtaggaagctctgtctaggctgtgcgagggcttcagataaactcccatagctgagtagcttaacacaagcaaagttttttcttactctcctgtggcttgatgtgggttaggtggttctcctctactttgtggctttgacttttggacacatgtcctctgtagttctcacagaaagaaaacagagctagagaattatacaggatattaagggccaggcttggaaatggccttccgttcaatacattctagaacactttatctctgacctgctacaaaggagaatggaaaagatagtcgtaatttgagctcagaaagagaaaatagtgtggtaaatgcacagcattgtttttgctgcagtgcatatgtctgcttatttccttagaataatttattcttttttgtttttttgagactgagtctcactctgttaccaggctggagtgcagtggcgtgatctcagctcactgcagactctgcctcctgggttcaagccattctcctgcctcagcctcccgagtagctgggattacaggtgcgcaccaccacacccagctaatttttgtatttttggtagagacagggtttcacaatgttggccaggatggtctcgatctcctgacctcatgatctgccagcctcggcctctgaaagtgctgagattaaaggcgtgagccactgtgcctggccagcttattaattcttaagccaaaatatgtgtctttaggatccaagttaaatttgctcagattacatttttttttttttaagatggcatctcgccctgtcacccagactggagtgcaatggcgcgatctcggctcaccacatcctctgcctcccaggttaaagcgattctcctgcctcagtcccttgagtagctggaattacaggcgtgtgccaccatgccccgttaatttttgtagttttagtagagatggggtttcactgtgttggccaggctggtcttgaactcctgacctcgtgatctgcccatcttggcctcccaaagtgctgagattataggcatgagccaccacgcccagctagattactcatttttttcaaatacttccttttggaaaaataggaattctgtttccatccatacctttgtttcactaagtacaaaaatgagtataactaatatttcattgtaagatatttacttagccaggcacagtggctcacacttgtaatcagcactttgggaggctgaggcgggtggactgcttgagcccaggaatttgagaccagcccaggcaatatagggagaccttgtctctactcctccacaaaaaaaaaaaaaaaaaaaaaattagctgggcatggtggcacatgcctgtggtctcagctacttagaatgctgaagcagtaggatcagttgaattcggaaggcggagactgcagtgagctgagattgtactgctgcactccagcctgggtgacagagcgagaccctatctcacacatacacacacacaaagatgtttacttacaagtatactcatcagataccttgagggacttttgcatgaaattaataatgtttattgaaaaaatgatttactacttacaggggtgattttcatactctttataattcttttgatacttttatagttcataagtgtggtgattggctgttcacacacacatatgagatgtaccaccctagaaccttgttacaatgttagcacattaccagtctgacatgaaaaaaaataattctttacacttaccttgatgcaaaaacattgtctatctgcactaatatcttaggaatataagtgagcaggaaaaaatatatatcttatttttaacacatcatcattaaatattttgtttatgacagtcttacttggtcactcaggctgaagtgcagtggtgccatcatagctcactgcagccttgacctcctgggctcaaacaatccctcttttctgcctcctgagtagctgggactacaggtgcatgccaccatgcccaactaatttgttaaatttttgtagagtgtatcagatttttgatgaggtctcactgtgttgcccaggctgatctcaaatgtctgactgtaagcaatcctcttgcttggcctcccaaagtgctgggattacaggtgtgagccactgtgcgcagccgttaaatattttaaaccgtcactgactttaccatagcttactatttatataaataatcctgggttaaacttgcatagtgagataatatttcccccaacttttatttatttatttgagatggagtcttgctctgtcgcccaggctggagtgcagtggcgcaatctcggctcactgcagtctccgcctcccaggttcaagcatttctcctgcctcagcctcccaagtagctgggattacaggcacacgccactgtgcccggctagtttttatatttttggtagagacagggttttgccacgttggccaggctggtcttgaactcctggtctcaggtgatccacccgcgtcggcctcccaaggtgctgggattacaggcatgagccactgcatccggcctaatttttgtatttttagtagagacggggtttcaccatgttagtgaggctggtcttgaacttctgaccttgtgatctgcccacctcggcctcccaaagtgctgggatgacagacgtgagccaccatgcttggcctcccccagcttctagttttaaaaatgttcagctggtgcagtggctcatgcctgtcatcccagcactttgggaagctgaggtgggtggatcacttcaggccaggagttcgaggccagcctggccaacatggtgaaacctcgtctctactaaaaatacaaaaattagccaggcttggtggcttgcgcccgtaatcccaactgctcgggaggcctaggtgggagaatcgcttgaacctgggagacagaggttgcagtgagctgagatcgctccactgtactccaatgtgggtgacagggtgaaactctgtctcagaaaaaaataaaaaagaaaatgtgcaaatctacagaaagattaaaaagtaccctgtagttacagaaagatttttttaaaaaataccctgtagcccttaaacaatttctaacataatgtcctgttagctttctctctttttttcgtgaatcatatgaaaatcatttgcaaacatcatgacccttcacccctaaatacttctgtatgcatccttaggaataaaggcactcttttctatagctgtaataaaagtaacatacctgagaaaatgacaagaattctacaatattatctaataatcatgccatagtcaaaatctctagtcatcctcaaaatctcctttgtagattttttttggttttccagtccaggatccaatccagttttctgccttttagtcaattactcatcaaattattttttccagcaacttactagtaataatggtaatagccttagcttttattaataacaaccacttttcttttgaaatgttaatataaaactagatttattacctacataatcttcataatcttcaagttaggtattatcactactttacctaatgagggaggttatgctcagggtacttgtccaaggcacatagtgaggtatggttgaggtttgaactcagatatatctgatcccaaagccagctgtctttttctgtgctggactgactatactaggaaacaatcaatgtgaacttagaaatgtttgacccaaaagaaaaaaaatttcactcctattcataggctaaatgaactttactaaatatggaagattcctgtagcccggaagttgggttagttaacttttgagatctctgccaaccctgaaattctgtaacccttgtttcttacatctgcctcatacatggattaccaaagatgtatatgcatataatatttaacagttttattgagataaaattcacatactatattattcacccacttaatgtatacaattttgtagttttgtgtgtgtgtgtgtgtgtgtgtatttttgagatggagtctcactctgtcacccaggctggagtgcagtggcacgatcactgcaacctctgcctcctgggttcaagtgattctgtggcctcagcctgttgagtagctgggattacaggcgcccaccaccatgcccggctgatttttgtgtttcagtagagatggggtttcaccgtgttggtcaggctgttctcgaactcctggactcaagttatctgcccaccatggcctccccaaagtgctgagattacaggcgtgagccatcgcgcccggcagttttcgtatattgatggagttgtgcaaacaccacctcattcaattttagaacatttttatcacctgaaaaagaaacgctgtatcctttagccatacttcccccttcctccctaactcccccagctctaggcaaccagggatctactgtctatttagatttgtctgtttgggtcatctcatataaatggaattacataacatgtcttttgtgtgtggcttcaatttttttatttttttgagatggagtcttgctctgtcacccaggctggagtgcagtggcatgatctcagctcactgcaacttttgcctcctgggttcaactgattctcttgcctcagcctcccaggtagctgggattacaggctcctgccaccatgcctgactaatttttgtattttttactagagtcggggtttcactatgttggccaggctgttctcaaactcctgacctcaagtgatccacctgcctcggcctcccgaagtgctgggattaaagacatgagccaccacgcccagcctgtgtgtggcttctttcacttagaataatgtttccaaggttcatctgtgttgtagcatgtatctgtatcttatttatttttattgctgaatagtattccattgtatggataaactgcattttgtttattcattgattagttgttgatggacatttgggttgtttccactttttagctatatttacattactgcttgtgttttcatttctcttggttatatactaggagcagaattgctgggtcatatggtacttctacttttaacctttgaggacctgccagactgttttctaaagtggttttaccattttacattctcatcagcatatgtgagggttctggatttctctacatcctcaccagtatttgtctttgatcatagtcatcctagtgggtatacaggggtgtctcattgtgggggtttttttccccattggggttttgatttgcatttccctgatggagataaatatattttttgtgtgtccccccacaaactgcctggttctgatgagaccagtgttcttacagagaataactttgctttgaaacaaaacaaacaaacagccttttgacttgggtaacctttggagtatgttaattgtgatttactctggccttgtaacattgtaagtggagattttgtttaaaaactgcgttcgctgaaacaagtaataaggttcagacctattgttacaagttctgagttttctttcatataaatatgtttgttcttttgtgtggataaaacctaacgtggcaaaaaggtgtcaaacacctaagtattaaggaaactaaaatgaaaatgctgcatgaacagaaaccttgtccaattttcattactatagcaccatcacctataacagtgccagtgtacagtagatattacataatatttttgaatgaatgagtggaaaatgatatgcatttttctcttctgcatcctctgaaagatttcacaacgtgcaaagtatgtaaggctttatttatatacagataaaataatcagagtttataatctatgtatttactttcctgcatagaaactccatatgattaaaaattgagattatttattttaataacatgactaatcagtttacttaacctagaaatgaatgttatctaagaacaagcaaagaatgttagaagaatttagtgtttaggaattattattgttttccatctcagtcgtatatattttctgttttagccactttggagatttgttaatgataccaaagacaaaagaatgttagtttataaatctgaagatatcaagaatgtttcacgtttgcagtctccaaaagtgtgtggttatttaaaagtggataatgaagagttgctcccaaaagggttagtagacagagaaccacctgaaggtaagacttaaagagtgtatttcaaataagaaacaaacatactacaattgacttcagtaggggtggttgttatttgttaaaaaataacatgattgtcaagtaactatagtatttggcatgaaaataagaggtttgttccagaaattttcatcttcttttgtttataatgtaagagttgaaaactctggaaaataatgggaacaacagagattagactttaaaaaagattagggaaaagggaaatggagtgatctgagggaaaatattcctgcagatatttagaaatgataaaataatatggtggaaagacaatctttagagtttataagaaattaattggtagtaggagggacctatatatatactgcttagaatacaagaaggttatatccatcttgggacaatccatttagggtcatttaaaaaacgtaaccatcttggaattttactgcccaaaacacctctggttaggttttttgttttgttttgttttgttttgtttgcagcgcgatctcggctcactgcaacctttgacttccaggttcaggtgattctcctgcctcagactcctgagtagctggattataggcatgtgccaccaggcctggctaatttttgtatttttagtggagatggggtttcaccatgttggtcaggctgttctcaaactcctggcctcaagtgatctgcccacctcagcctcccaaagtgttgggattacaggcgtgcaccaacatgcccggccaaagacggttatgttattaaaattatatattagcattttaatatataaataaagaaattcttaatttatttcacaagaaagttgtcctattaaactaattttcaatgtgaatatcttgacatttttactgttacattggttaattcataaacttcttgttgtagaatatgactgacagcttcatagcccagcattaggtgactgttttactctgttgagcactatttatttatttatttatttagagatgaagtctcacttttgtcgccctggcttgagtgcaatggcacaatcttggctcactgcaacctccgcaccctgggttgaagtgattctcctgcctcagccttacaagtagctgggattacaggcgggtgccaccatatctggctaatttttgtatttttaatagagatggggtttcatcatgttggccaggctggtctcgaactcccgtcctcaggtgattcacccaccttggcctcgcaaagtgctgggattacaggcctgagccaacatgcccggccttactctgttgagcactttttaaagtttctgtattggaaaaattaaagaggcacttgtccttggttttgaattctacagtgttttaactttatgttacttttcacttttctgtcttcctccaaattattttttgttgttgttcagaatcctttagtgatattaagctcacataatgtttgtttcaaaaatatgttagatttaaagtgttaccataaaactccttgttttggtgaattttgatttaatagtgcatacaaattcatattagagcttgttcatcgagtgaaaagaagagctgacccagatcccatgaagaacacgtgtaaattattggtggtagcagatcatcgcttctacagatacatgggcagaggggaagagagtacaactacaaattacttagtaagtatttgatattgcatcgagtaattgaaaaaaaaatttgggtgggtacattccatgaaacttaatgcaaccagatctgttccagatactctgttatttccctaaaatatttgagggatattctctgaggtttttatgttactgtatggaaattatagtttcaaatttgtgacaacccattttacccttgaactaatattttctgcatgttagaatttatgcatatagggtttgggagaggttataatgtagtccttcctccttgatataagtgagttctttaaaaacatcactgctatcatggtagtgaacctgtggtgtcacatgtgaatgtaaaaatatgtatttgcatgaacccatgtttttcttttgcttatatgtatatttcagagaggaaggcgagttttgtttgtcatgttaaagacctaatcattggacttcacttgaaataggtgggactttcatggtcataactagttctagggcacagaagtgaaggaaagatgtaagaagtgatgatactggatttttaagtatgaactattatgatttttgaagtctggggaatcatttttcattgacattttttgctagtgtgacttcattcgtcatgattacttggcactgaccaaaatgttgttactgagggaataatggagaatgcagctattcatgaagcaagaagaagctggtgcagtaaagatgtctttctcattgccttgcttttcccatgctgtccattttattcataccctcccaacttctttcccttccctttcatgtcaagtggatttttttttttttttttcaacacagagtctcactgtgtcgcccaggctggagtgcagtggcacaatctcagctcactgcaacccccacctcctgggttcaagcaattctcctgcctcagcatcacaagtagctggaattacaggcgtgaaccacagcactcggccccatatcaagtgaatttattatgaggctagtaagagtcactgtgattcttgttcctaaataagagagatttttactttaaaaagcttctctcttaatctgggttttatattaaggggctcctcttattttacttctttgttcattgcactataaatatgaatataatgagagatctagtcttaaaaattgtatttttttacaacttcttaggcataacttgtttcacagttgctagaacaaacctcatcaacccagtttttgaacagtagaatattctctttgagaaaaagataggtaattagcattttgttctttctcatgtcattttccttggaaactatactgccttccttctccagttttcccaaatcagagaacaaaagaaggagggttgctgaaatgaaccttgttctttctggctgtcttcttacccattcctcagtgctgaactttttggggtgagagtgggggaatagggttggcagttgtctgccacggccccttacttgtttctggggaagacattcgaggtactcaccaagagatagagtgaagatggaattctttttagaagggaatacagttgacccaggaacagtgcgggggtgtggttagaagcactgaccttcttccctctgcagtcgaaaatcctcacgtgactttttttttttaaggctctgtcgcccaggccggagtgcagtggtgaaatcatagcttgctgcagcctctattgcccgggccaaagcaatcttcccacctcagcctcctctagctgggacaacaggtgttcacccttcctggctaagttttttgatttttagtagagatggagaatttcccaggatggtctcaaacttctaagcttaagcaatcctcctgcctcagcctcccaaggtgctgggattacaggcatgagccactatgcccggccactgtataactttgattctccaaaaatttaactactaatagtctactgttgaccagaagccttaccaataaaataagttgattaacacatttttaaaatatgtattattactgtgttcttacaatcaagtaagctagagaaaggaaaatgttatgatgaaaatcataaaaaaaaaaaaaagcccggcatggtggtgtgtgcctgtagtcttctgttactcaggaggctgaggtgagaggattgcttgagtccagaaattcaggctgtagtgagctatgatcgtgccgctgtactgcacccctggtgacagagcaagaccttgtctcttgaaaaaaaaaaaagaaaatcataaggaagagaaaaatacatttactattcactaagtggaagtggatcatcataatggtcttcatgttgagtaggctgaggaggaagaggaagagttgatcatattgtctctggtgacagaggctcaaggaaatccatatgtaagtggacacttgaagttcaaatctgttgttcaagggtcaactgtatttcaggtatactgattgacttttaaatttaatttttattattggctgaaacggtagttttaaaaaagcctgttacttgtcattttggttccatgtgcaattgagtacctgaaatttaggttaaactataccattgttttattctggtaacagcactttaagtttggggccaaaggttgggaatactctgatacagtaacatctcaatgctagtttttgcgaaagtagaaacttttgcaatggcctctaaactgagattttttctttccccatagattttatattgcattgccaggagaggtaaagagttacataatgtcttttttcttttttaaatacacacagatagagctaattgacagagttgatgacatctatcggaacacttcatgggataatgcaggttttaaaggctatggaatacagatagagcaggtatttatcaatagatatggcttatattacttaagttttgtaatgtaaatatttgtcacttgtattcaaaacctaaaaacttgtccttaacaataattgtaaataagttttctcagatgccaatgattttttatgatgaattgtgcagtatttttgatgttaattagttctagattgtgaagttttctgtccttagtctcgctttaggtagaaagccttttatgctgctgtgctttgttccttctttgaattcatggcctttatattctctgtagttttcttcccccctccgattatgcttaagtctttagttaaaactctggcatgcaccattgaatccttagtcagaaaatttactaaaaaatactgtgtacctttgcaaggctgtatttatatatacagaacctttaggttctttcctctcagatatctccttctgatttcttgtaatctgttaacagagtgtgtctagtaatgttatattaatgtcatcttaataatagctcatattaaaagttatttcaaattgctaggactaattaaaaaggcttctgacaaagggtattgctttgggcagagagacattttgatatgtaaattatataaattgttatctctatttttttccaagctttttgtagtaaaccatatttttataagttatatagtatagaatttagaggttgaaaaaatttttaaaaatcattcaccatgtttataaatgttaaactttgatattacttgtataaaactaagagaattatttttcccttttcattctctttcactgttacgcattttctttttaagttattatttgaataggtaacatgtacacagtacaaaagccagtgaaaagtaagtctctgcagcctgtttattgtcaaaccagttcctttccccaaagacattcatgtcactagtttcatatgtatctttctagagatgtcgtatgcaggtatagtgtatgtatatgtctgtatttgacacaacggtgctatgcagtacacttttacaccttgctttttcatttcacagtatgttggagagtacttcatgttcatgcatgtaaagctgcttcacttgttttattataaatagctgcatcatgtttgagtttcagggaacctgtaaattttctttttgctttaggcatttggaaccagtcgaagaaacaggaataatataggagattaaaacattaacttctttacatctgatgaaggatggattggagggtgtggtttagatgtgtatcatggtgggcttctaagtagttctatcccagatttgaccttgaccagccaccatcaaaactgcagagtccaccccagtaaacttaccacacagtggcagaggagaccagaatgggccttctctgcaggcaggcaggcaggcaggcaggcagagagactcacagaaactctgagctgagcatggtttccttctttatctcacacttactaatgggagcctttgttacttttttttttcttctttgcaggtttaatatgaatttgtctgaaatgcctgtataaggagaagactctattcttagccttttattcctttgatgcacaaagagatgtatattttattattctttcctgagttgtcgactgtagtcgtaataaatattttaggctcctgtaacccaagttcttattttttcaaaataaacatggaggatatgaaaatttaagagtacatttataatattataaataattcattgacatatgttttccataccatatgcttctctgtttgtttcaaacattgaatattggtactgaagaatttatgaattttggttttaaaatgttttttttctagaacgattctttttttgaacagataaaataatgcagtattcagagccttctgacttattttggaagtgttctaagtatatgatctctttaagtatagattcgcattctcaagtctccacaagaggtaaaacctggtgaaaagcactacaacatggcaaaaagttacccaaatgaagaaaaggatgcttgggatgtgaagatgttgctagaggtaggtcttagaatcctggatatggtgctaacaccactttgtcatttctgatatgtggattgtatgtgttttaatgaaggagcatgttagaaaagatggacacccagaagcagtctcctccagctgatccagcagtaaccccatcccatgtagcagcatagacaacaaataacaaaaactctatgaaaaagaaaaacgctataaagcaatgcttccttttttttttttttttttttttgagacagagtttcactcttgttgccctggctggagggcaatggcgtgatcttggctcaccgcaacctccatctcccaggttcaagagattctcctgcctcagcctcccaagtagctaggattataggcatgcaccaccacggccggctaatttttgtatttttagtagagacagggtttctccatgttggtcaggctggtcttgaactcccgacctcagatgatccgtctgcctcggcctcccaaagtgctgggattacaagtgtgagccaccatgcccggccaaagcagtgcgtcttaaccttaatatctttgaggatctaatgagacaatcagtggatcttctctagaaaataacatggatacccaatatatagagtttttgcacactgtttcattagttctgcacacttagttcagctctctctgaagcttatcaatttatcttttagggcagtaattatcaaacaggttatgaacatgtattggagagtagaaatatagcttggagatctgaaagttctctacaggaatttaaaatttttgtgtttttattctggcgattaatctaaagatggctaacttaatcattttatgtcatttggagtcttgccgtataacagggtgctgccatgtgattccagtgtcttgagtttgtgtgtgctattactttggtgtagaatgactttatatgaagcgatagtttttatcttttaatgtgttggcaagtttattagtttcttgttgttgctttaattatcacaagtggagcagcttagaacaacacttatttatcccatagtttgcatgggctagtccaggtatggtgtggctcatctggattcttgtttagggtctcatgaggctgaaatcaagttttcaaagcttcaatagaattaaaggatattataactattcatccagatggagaagcataatgtgcagcacctgtgtggtactcattcataccttgtctaatttgatctgctgagcaccctgagaggttggttgagacagcatccttgtgaggaggctcagcaagtgttactgtttattccagctgacatgacaaagcagcataggctgggggacttaaacaacagaagtttgggttttcacagttctggaagctggaagtccaaaatcaaggggtcagcagggttgatttcttctgaggccaaggtacttgtggtgtagatgctgtcttctccctgtgttctcacatggtccttccctcagtgtgtgtgtatattctgatctccttatcaggacaccagccatattggattaaggcccacccatatgacctcagtgtaccttaattacctccttaagggccctgtttccagatagagtcacattctggggtactgttgagggttaggacttcaacatttgaattgtggggtggcacaattcagccagtagcaggaagattaaatgacttgtctgattagtcatacaactggtgatggcagaggttgaattgagcacagatctcctgactcctagaacagctgaaccactgcgcctgtctgcttttctgtgagcctccagacagcccatggcaggggaggaaccaaagagaaaaatgacttatgttgacagatggtcctctccagttttcttccctaagcctcctagaatattcttagaagcctcatccttttaccacggaactatcagaatccccatgtaaccacacttcattcctcatatagggctctctggcctctcatttaaagcattttaaacattgagggttttggctaggcatggtggttcatgcctgtaatcccagcactttgggaggctgaggatgaggcagtggattgtttgagcccaggagttcaaggctagcttgggcaacatgttgtacaaaaaatacaaaaattagccgggcatggtgaggcacgcctttggtaccagcttcttgggaggctgaggtgggaggttcacttgagcctgggaggtcgaggctgcagtgagctgtgattgcgtcactgcattccagcctaggtgacacagcgagaccctgtctcaagcaaaataaatcaaaccccccccccaaattaaggtttttttaaacttggagacgctggacggttatggtagaggtttttaaagtaatgtatgaagcccttttaaattaagaaaaaaaaaatcctctcaaacctgcagtgttgatttaaatggatgtaaaatctttattttagtaacataaaactgggtatgtatgcttttctataagtgtatatttatataaatgacaatatattatgaagctcaaaaaagtttaagattaaaatttctataaaaccaattgaatccttgaaatacttgagagggatctgttttggcctggagtgctgcaatccccttatcgaattggagcatctctagtcctgggctgtatgtcttcagaacagccctcggaggagcagtgagttagttctgaagagctggagcaagctcccgaactattcccttttgtgtcccttgtcagatgacagtgtgtgcctctcacctgtgcaggtggagaagcactttagggaaagagcaaagcactgcacgaggttgtgattgctggtgctgagctgcatgccatcatagttctgttctggaatgtttagttgatttagattacatcttttagtctgatgtaattgttaatctaagaatgcttttttttttttttttttttttggtctttcaaagcaatttagctttgatatagctgaggaagcatctaaagtttgcttggcacaccttttcacataccaagattttgatatgggaactcttggattagcttatgttggctctcccagagcaaacagccatggaggtgtttgtccaaagggtaagtttttccatttcttgtgtgaatatgctgctgggattattaagatgattggattatattataattctgtatttaataagcaatttatctctgtttccttttgactttagcttattatagcccagttgggaagaaaaatatctatttgaatagtggtttgacgagcacaaagaattatggtaaaaccatccttacaaaggtatgttcttttatttctaaaagaatagtgttagagtttattgtagtagaacctcagttatatatttatgtaggtatttttttaaaaaatgtaatatatactgttttttaaatttctgcctaaataaaatttatgtatttttgtgggatatatgaaaattaaagcataaagaagaaaataaaaatggcctgtcagccttcttttgaaacatgtgaggaccactgcttttctcgaaccctctgtcctggacccctctgacctgcagcaactcttagagctccctgtctcctagtcctgcagtgcagctgtcattcaaggcatcccacaccctcttattttcagaaccccatggtctccctctttctcagtgccatcattttggtgtagtgtatcttgcaggagcttcctaagaaaacgtagatgacctgcatattgttgggatttcatatatctgaaaatgtctttattccactcttaagcctgattgataattttggctgagtatattcttagttctcatgttctctatggtcttctgtgcatgttgcttctaaagaatctgaagtcattttgagttcttatctttgtttgtcacctgtttttttctctggaatatcttaagatcttgtttttctccagctatgtctgttaaaatgtgtttgactacaaataacagaaaattaaataagcagtggtttaaataaggggtttatttgtctcagtcaacaagaagttcagggatagcattttctgggtggtacagcaactcagaggtaccctcagtggctcaagaacaagcaggaagtctttgtcctcatggatgtcacctcatggttttaagatggttctcttctgtgttggagaaaggaggagaaagagaacatggctagcctagtctggcccttctaaaaagcttctctggaggccccatcctggcttttgtttatatgttactggacagcactgggtcccgtggctgcccttagcctcaacggaatgtggaaagctggctattttagctgagtatattgctgtcctgggcaaaattagggctcattaagtaaggaagaaggggagagagatgttggtaggacatattagtatctgatatactgatttttaatttttatttaatttttattttttttgagacagagtcttgctctgtggcccagtctggagggcagtggcaccatcttggctcactgtaacctctgccttctgggttcaagcagttctcctgcttcaacctcctgagtagttgggattacaagcacctgtcaccacgcctggctaatttttgtatttttgttttagagacagggtttcaccatgttggccaggctggtctcatgaacccctgacctcaagtgatccactcaccttggcttcctaaagggctggttggtatactgattttttgactatgatgttatacttggtgtagggtatgggaaaacatttgcaaaagacacatctgagaaaagactgctatctgaaatatacaaagaggccgggcatggtggctcattcctataatcttcggcactttgggaggccgaggcaggagaatcacttgagcccaggagtttgaaactaacctgggcaagatggtcagaccctgtctctacaaaattaaaaataaataaataaataaaaatttccatatgtataaagaactgttaaaattcaacaataagaaaatgaacaacctaatttaaaaacagacaaaagagcagaacagatacctccaaagatatacagatagcagagaagcatatgaaaagatgctcagcgtcatatgtcattaggaaattgcaaattaacaatgaagctggttgtaggggtacatgcctgtagtcccagttgcttgggaggctgaggtgggaggattgctcgagcccaggagtttgagacccatcctgggcaacattagtgagatcctatttctataaaaaactttaagaaacccaacaacaatgtgctattactagtagcttattagaatggctaaaatcccaaacactggcaacacaattccaacaaggctatggagcaacaggaactctcattaattgctagtgggaatgcaaaaatggaacagccactttggaaggcagttggcagtttcttttctttttcttttttcttttttttttttttttggagacggagtttcactcttgtcacccaggctggagtgcaatggcgccatctcggctcactgcaacctctgcctcccaggtttaagcaattctgcctcagtctcctgagtagctgggattacaggtgcccgctgccactcccagctaatttttgtatttttagtagagatggggtttcaccatgttgtccaggctggtctcgaactcctgacctcaggtgatccgcctgcttcagcctcccaaagtgctgggattacgggtgtgagccactacgcccagccataagaatgtttatggcagcttaattcataattgataaaacttggaagcaaccaagatatcctttagttggtaaatggataaactggcacatccataaaatgagaaaaaaataaaaagctattaagccatgaaaagacatagaggaaccttaaaagcatactactaagtaaaataagccagtctgaaaggctacatactatatgattccaaatatatgacattctagaaaagacaaaaccatgcagactataaaatgatcagtgattgctagatgctgggggagggagggatgaataggtggagagcagggtaattactctgtatgatacttcaacagtcagtataagacattatgcatttgttgaaacacatagaatatacagcacaaagagtggaccctaacataaactgtggactttgggtgatttaaaaacaggtggtggcaggagcctatagtcccagctacgcgggaggatcacttgaggccaagagttagaggctgtagtgtgataaatgcaactgtgaatacccgctacattccagcctgagcaacttagcgagatcctccttttcttttttgagatggagtctcgctgtgtctcccatgctggagtgcaatggcatgatcttggctcactgcaagctctgtctcctgggttcatgccattctcttgcctcagcctcccaagtagctgggactacaggcacccccaccaccacgcccggctaattttttgtatttttagtagagacggggtttcactgtgttagccaggatggtctcaatctcctgaccttgtgatctgcccgccttggcctcccaaagtgttggaattacaggcgtgagccaccgtgcctggcctgagaccctgtctctttttatttatatatatatatatatatatatatatatatatatatatatatatatatatttatattttaaatttaagttctaggatacatgtgcacaacgtgcaggtttgttacatatgtatacatgtgccatgttggtgtgctgcacccattaactcgtcatttacattaggtatatctcctaatgctatcccttcccccttccccctccccccaccccacgacaggcaccggtgtgtgatgttccccttcctgtgtccaagtgttctcattgttcaattcccacctttgagtgagaacatgcggtgtttggcttttgtccttgcgatagtttgctgagaatgatggtttccagcttcatccatgtccctacgaaggacatgaactcatccttttttatggctgcatagtattccatggtgtatatgtgccacattttcttaatccagtctatcattgttggacaatgttgaacaataatgtagagtggtatgagaaaagaaaaagacactaattagcttttgggaatcttttaatttctttttttcttttcttttttttttttttgagatggagttttctcttgttgcccaggctggagtgcaatggtgtgatcttggctcactgcaacctccgcctcccggattcaagcaattctcctgcctctttctcctgagcagctgggattacaggcatgcgccatcacgaccagctaattttgtatttttagtagagatggggtttcttcatgttggtcaggctggctctcaggtgatccgtctgcctcggcctcccaaactgctggattacaggcgtgagccaccgtgcttggccttaatttctaaatttatttttttcttatggtactttgttttaggggaaaaaatctctcaaactgtgttttccctctattctcacatcacaaccatcatcatcaacacagaagacttgtgtgaccagaccaaacgtgtggggatttccccctacatatcaagcagtagacatcagctaggtgtcctccaattcaattcaaacactctccacccggaaatagtatcagatctcacagtttgagggcccagtcccacaagactgactgttccctcctccccaccagttacaagtctgagcctccagaacttctgaccaactggcttcaagttggggtttccacattctcctctttgggtctgattaatttgcttaagtggctcacagaactcagggaaaagcttaacttagtttatgggtttattacataggatattttaaaggatacaaagaagctgggtgcggtggctcacgcctgtaatcccagcactttgggaggccgaggtgggtagatacctgaggtcaggagtttgagaccagcctgaccaacatggtgaaacctcgtctctactaaaaatacaaaaattagccaggtgtggtggtgcatgcctataatctcagccactcgggaggctgaggcaggagaagtgcttgaacctgggaggcagagattgcagtgagctgagattgcgccactgtactggtcaacagagggagtctttgtctcaaaaaataaaaaaaaaagaaaggatacaaagaaatagccaaatgaagggatacatagggcgaggtctggaagggtcccgagtacaggagcttctgtccccatggagttgggatgtacctccctcctggcacacgaatgagttttgcaccttcctgtcaacctccatgtattcaaaatgctctctggaagctctctgaatcctgttttttgagattttatggaggcttcattacataagcacgaatgacaactgtgtagaaatgtgattggacaaaatgggtatgttctcatactaaccgactgagtggggaagcccaccaaggcctgtccagattctccttgacctctctgtgcagcattcctccctccacagtaaagggcaggaccctctctagaatgagaatgagaatgaggatctctggacccacaatcagattagagtcttgccttggatcaggtaaaaggaggacaggagaaggtcagagagagagattctgtttcctgaggattgctcctgagccctaaagcaccccaacattataacagaagaccgtaaccagggctacggagggttgtaagccaggagccatggacagaaacatacatgtgtgtacagtagctcacgcttttacttttttggagtcacaacttcttaatggcttgatttcatgacatattttctttggtcttccagaactttcctcttaaaaaaacacagcaaaaaaacaaaatttgatttgaaatttttgagatttttttttaagagtcattagcaaatccactaatgaattttccccaagcagttaggagatatttctcttcattacacctttgggatttgagtgcttttgctaaaaatttaagttttttttcccactacggttttaatatgaacatgtggaaagacttcttgtatagaaaaatgacttgcaaaatattattttttcaggttctatggagtgatttcccccccttaggaaaaaagaactcaggaattttaagtttatatgtatatatatttattttattttattttatttatttattttaagacagactctcactcttttgcccaggctgggggttcagtggcctatctcggctcacagcaacctccgcctcctgggttcaagcaattcttctggctcagcctcccaaatagctgcgattacaggcgcccaccacaatgcctggctaggttttatatttttagtagagacagggtttcaccatgttggccagtctggtctggaactcctgacctcaagtgatccagctgccttggcctcccaaagtgctggaattccaggcgtgagccactgtgcctggcctttaagtttgatattttattcagataaatatggaaaaaaaattttagctttattggcaaaatttattattcatatagaaatcatctgataatctgatagattaagtacagccctgcaactggattctaataaaccaagtcctctaggtcattaagattgttattggacatgaattcagtcattgagaaaataaaacattgttttgttgttcctcagttgtggtttttgttttttttttaagatagagtttcactcttgttgcctaggctggagtgcaatggcatgatctcagctcactgcaacctccgcctcctgggttcaagtgattttcctgtctcagcctcccgagtagccgggattacaggcgtgcgccaccacacccagctaattttttgtatttttagtagagatggggttttactatgttggccaggctggtctcgaactcctgacctcaggcgatcaacccaccttggcctcccaaagtgctgggattacaggtgtgagccactgcgcctatccgtactgttttttttaccccttgctttttttttcctttctgctgagatgctttaggttttaacagacatgtgattgggccgaggggcatgtgaggaggctggacaattaactacagttagcttattgcatttatcagcaccagattgtgtgtggttgaaatggccaaggtttgatgttttgttatgaatgttccagtatatcttataaattacattttcttaaattgatttgttactacttacaataatgtttgatagtattaaataaaatcctacttattctgttaaattcatataattggtagaagaatcatagtccggttattactcttttttgagacaaagtcttactctgtcacccaggctggagtgcagtggtgtgatcatagatcactgtagcctcagcctcctgggttcaggtgatactctcacctcagcctcccaagtagctgggaccacaggtgtgcaccaccatgcctggctaatttttttttttttttttttgagacgaagtctcgccctgtctcccaggctggagtgcaatggcgtgatctcagctcactgcaacctccgccccctgggttcaagcagttctcctgcctcagcctcccgagtagttgagattacaggcgcgtgcctccatgcccagctaatttttgtatttttagtagagacagggtttcaccatgttggccaggctggtctcgaactcctgacctcgtgatccacctgcctcagcctcccaaagtgctgggattacaggcgtgagccaccatgcctagcccacctggttaatattttttattatttttgtagagatagggtctccctgtgttacccaggctggcctcaaactcctagagtaaagtaatcctcccatctcagcctcctaaagtgctggtattataagcatgcagttcttattctcttgttgatctgattataaggctctatttaagacagcataggcccaactggcagaagtaggtgatggctggatattgagaaataatgttttctttgcatgatccttaaggaagctgacctggttacaactcatgaattgggacataattttggagcagaacatgatccggatggtctagcagaatgtgccccgaatgaggaccagggagggaaatatgtcatgtatcccatagctgtgagtggcgatcacgagaacaataaggtatgtgtgtgtcgagaattttttatgtggtttggaaagaggctgtgtataatgatcataatgagagctcagaaacgtattccattcctaggcgtttccctagggatggatgtgcaaattacaaagtaccttgaaacgtggttgtgtgttttggggtgaagcacggttcatctaaatctggttaaaactatcatttggactttgttgtcaagcttaatggtgtagatttgagctctaggaaaaattactaataataatggctttttttggagttctggatttcagggtctggtgggctcaggctttatgttaaaaatttgtcatttcatttacaagttgtcattcattttaactctacaatttacatgtacagtttacacgtttttattaacttttgcagttaaacacatagtttgcctgactacaagcctcatgggagaaaggcccttccttgtctgtcttattcatagctctatcttattcatagctctatctccagtgcctagtaggagtatctggcatgtaacaaatatttgttgaataattaatggaatcatttactattgggggtttctgatagagaatactagttgatttgtgatactgtaaaacactttcagagactttaagagtgccgtgactaactcttagagtctgaactaaaagttgtgttaataaatatctggttctttcattttatttgaagttaaacagcataaagcagtgtgaggaaaacaatagttgcactgctgagttaaagagggtcggtggggagagcttaaaggagtctgattctaatcacaaaagattgtgaagtatttgtcctgactcctattttgagcttggctgtgggctaatgtgcaagccttccctggacacagagggcaagattacttctgcttttccctggctctgacaccctgctttctgaaatttctgcctcctgttctttttgtgatctttgattgttgcatctcatttttttttggctttttatgtatattttctgcatctcattttctttggctgttatgtgtaaacagttcctctgttactttgcatgttatgttttatttttcctctgcttgacaacttgtgccagagaaacatttttctacccctttttgtctactcttccaacctgtcaaactgttgaattttccttctcttttcatagtctctgcatttctaatcatgttcactatagttcagtgctgcccaatagaactttctgctgcggggcgggggatgttttgtgtctgctctgcccagtatagtagccactagcccagtggagcaattgaaatgtggctagaaactgaggaactgaattgtaaattctattttatttaaatttttaataatgtttgcctgtgatgggagacgggaatgggcattaactgtaaaaggacatgagtgagattactggaaggatggaaatgtcctaaaattgacttatagcaatggtttcaacacttggtaaagttattagaaatcactgagttatatacttgaaatggatcaattttgtgatatgtgaaatatgtcttaataaagttgttaataagccaacaaacaaaaacagcagtgtgggagcagaggaaaagtagcgcggatgtagaggagctgtgaagtcataagttgattattgttgaagctggtgaggggcacgggggcattcatgataccatcctgtctacttcatagatgcttgaatatttctgtaatagaaactgtaaaatatgtgactaggaacaaaatttaagtagccacatatggttggtggctaccatattgcatactgtttctctaagtaataggtcatatgcttcttggttatgaggatagtgtcagaacttgggagcaaaatgttttactttgcagactgcctgggtggacatgcatgctgctgactcttcctgctgccagttctggggctcttcaaaacagccctgtaagaacttgccagtgaggcatggtggctcacacctgtaatcccagcactttgagaggccgaggtgggcagatcacttgagcctaggagttcaggatcagcctggacaacatgtgaaactccatctctacagaaaatacaaaaattagctgggcatagaagcacatgcttgtagtcccagctactcaggaggctaaggtaggaggaacccggggagttcaaggcggcagtgagccaaggttgtgctactacactccagcctggatgacagagtgagactttatctcaaaaaaaggaaaaagaaaaaaaagaacttgctaatgagaatggggcctgggaagaactttttttttctggagctgccagtctgtatcaatgaagaacaatttatttattttgtcctgagcacatcatatttagtctgtgtttttctagtttggttgcccaagtaggagtccccttgtaagaagataatgtgcatcttctatgttttatttatttattattatttattatgattttttgagtggagtctcactctgtcgcccaggctggagtgcagtggtgtgatctctgctcactgcaacctccacctcccaggttcaagcgattctcctgccttagcctcctgagtagctggggttacaggtgcatgccaccacacctggccaatttttgtagttttagtaggatggggtttcaccatgttggccaggttggtcaactgactggtcaacaaactcctgacctcaggtgatccacctgcctcgacctctcaaagtgctgggattacaggcatgagctgctgtgcccagcctatgttttaaatgaattccttaataaaaatatttttaactgatgaaaagggcttacaggacaaaaataaagtagttccttgacctagaaagacagaacccatcaccctctactaggcaagcctatgaagagcagtttgccacaggtggacttctctgtggacagatgacattagtgaaaaggaatgtaggacctttgagattgtaacttcttaggaaggtttgctgaacggaagaggaagtcttatgacaaggatgcaaacagaagctgccagatcttcagggatgtgtaggcagaaagccagagttgcgggttggtccttttatcgttagtgctctccagctgcttgggagttgtaactctgacaaatcagtgaagaggtcttcttatctgttcactgtgaattttaactccattttaacctgataaaatggaacccagagatacatgatgttgatgaataaacccaccaaaatgacaactgcctgaggccccgattagaataaccagaccccttagacatctgtactgtaacgacagatttgggccgggcgcggtggctcacgcctgtaatcccagcactttggagaccgaggtgggcagatcatgaggtcaagagatcgagaccatcctggtcaacatggtgaaaccctgtttctacaaaaaatacaaaaattagctgggcgtggtggcatgcacctgtagtcctagctactcaggaggctgaggcagaagaatcacttgaacccgggaggcggaggttacaataagccaagattgtgcctctgtagtccagcctggtgacagagcaagactccatctaaaaaaaaaaaaaaaaaaaaaaaaaaacagatttgaagatgttttttaaaaagccagttagtatttctgtgtaagatgaggtctttgctatctttctgaaagtagctcctttggtgtctgatttggtggttacaggcacctttggagggtctcatacacttggctctcaggggcttcatgattgttgtctggggtgaaagtgaagccattttggcatctgcagagcactttggagaccccgacctaagaagtaactatgctcagttttccctaagcctcttctttttttgataacttcaggaggtctggaaaatgaccgcagttttagagctcctgataaaaccctcagccttaaaagggagttatcctagtggttctgtactccagggtgggaaggtagtgtagagactttttgagacactggtcttgctggttgatgaaaatgtttaggtaacaattggggatttaatttatataaaatgtactattatgcctattactaagctcaaatatttaaacaactttaaacttggatcatccatataagtagccaaagaaggagaagaaaccccttctcctgcatttctgaattgttttgtctgggacaacattaacctacagaggttcttaattcttgtcactgcatgagtggcatgcctgaggtgaggagatttcaagtctgatggagctacgagctctctgttgtgctattctgcttgtccttaagtgggctttgactgggatgtttggtctcagtatttgtatagcttgcttaccttcgtaagaagaattatagatccttaaccaagttcacatcagccatttagcattctatggagggaggttcccagttccatatcagtggcctttggaggagactgtggtggccttgccataactccagggtggctctgatggtggttttacattaagagtttgtctctagagaagacacaaacattgcatgggaatacatttttatgatattattttgggtccttattgccttttttctctcaagatgttttcaaactgcagtaaacaatcaatctataagaccattgaaagtaaggcccaggagtgttttcaagaacgcagcaataaagtttgtgggaactcgagggtggatgaaggagaagagtgtgatcctggcatcatgtatctgaacaacgacacctgctgcaacagcgactgcacgttgaaggaaggtgtccagtgcaggtgaggagtctctccacagggattttgggaagttggtataacaagatgtccaaaataagagaagactgaacttgcaggggctttagaatcaactgaaaggggtgtgagtgtgtttgtttacatctacctcttttgcccttcacagcaagaaattgctttctgggcctggcacggtggctcactcctgtcatcccagcactctgggaggctgaggtgggagaaatgcttgagaacagcctgggcaacatagtgagacactatctcttaaaaaacaaaaaacaaataagaaaagaagaagctttctggaaagcagtgtgacattatgtaacaaaatccttgaccttgcatgctccttggtttagcagtcctatagttaaaagaatcttttttttttttttttttcctgagacagagtcttgctctgtcgccaggctggagtgcagtggcgcgatcttggcttactgcaatctttgtctcccgggttcaagtgattcccctgccttagcctcctgagtagtgggactacaggcacgcaccaccatgcccggctaattttttgtattagtagagacgaggtttcactacggtggccaggatggtctccaactcctgaccttgtgatccatccaccttggcctcccaaagtgctgggattacaggtgtgaggcaccgtgcctggcaaaataatcttttttatttaatttaatttatttatttattttgagacggcgtctcgctctgttgccaggctggagtgcagtggcgcgatctcagcgcactgcaatctccgcctcccaggttcaagcgattcccctgcctcagcctccccaataactgggactacaggtacgcaccatcacgcctggctgattttttgtattttagtagagacggagttttagcatgttggccaggatggtctcgatctcctgacttcatgatctgcccaccttggcctcccaaagtgctgggattacagaggggagccaccgtgcctggcctttattttctttttgagacagggtctcagtctgttgcccaagatggagtgcagtggcatgatcatggctcactgcagcctcaacctcccaggctcaatcagtccttccacctcagcctcccggatagacaggactacaggtgtgtgccacctggctaattttttttgtattttttatagagatggggttttgccatgttgcccaagcttgttgtaaagtcctgggctcaagtgatccacccttctaagcctcctaaagtgtggagattctaggtatgaggcaccatgcctggcccaaataatcttttatttctttttttttttttttgagacggagtcttgctctgtcgcccaggctggagtgcagtggcgtgatcttggctcactgcaacctccgcctcctgggttcaagccattcccctgcctcagcctccccagtagctgggattacagtgtgcaccaccacgcccagctaatttttgtgtttttagtagagatggggtttcaccatgttggccaggctggtctcgaactcctgacttcgtgatctgcctgcctcagcctcccaaagtgttgggattacaggcgtgagccactgctcctggctgcccaaagaatcttttgggcaacagagataagatttaacaagggtataagatttaacaaggtttttttatggctacatcctaatagcaaaattttggaaacaatcaaaatgacagtcttgggatatgaatgttatcatgattctatatactggaatagtgtggaggaagtaggttacaagttagaaagttacccaggttttcattttttatatacactgatagaccagtgcctggcttagaagtaaaagggttaaacttcagttttctggtgaataattgagatttaactggatacagtgcatattaacgctgtaaatactgatggggagtagagttctggctgccgagtgtcttagctatggattgccttgtggccccaccttgtcttttttttttttccttgtctttttttttttttttgagagagtctcgccctgttgaccaggctggagtgcagtggcgcgatcttggctcaccgcaacctctgccttccaggttcaagctattctcctgccttagcctcccgagtagctgggattacaggcatgtagcaccatgcccggctaattttttgtatctttagtagagacggagtttcaccatgttggccaggctggtctcaaacccctaacctcgtggtccacctgcctcatcttttttttttttttttttttttttgagacagaatttctctcttgttgcctaggctggagtgcagtggtgcgatctcggctcactgcaacctctgtctccggggtccaggcgattctcctgcctcagccttctaagtagctgggattacaggagcgcaccaccacgcccagctaatttttgtatttttagtagagatggggtttcaccatgttggccaggctcatctcgaactctcctgacctcaggtgatccacccacctcggcctcccaaagtgttgggttgggattataggtgtgagccacctcgcccagcccatcttgtcttttttaaattaatgcgttaaatgaatgaaaaccaagggcaccaagatgtttcacaggtgattgctgtgttcccattcttttctcctatagtgtggcatttatgtgacctcacgcacattaggaagggacaaagtgtgtgcaggtagctctagcagcggagatgtctgatgatgtaggagtgggtgacggagccaggaggtcttccccggtgatcttcaggtcactgtaacgtaactgtagcgtttgatttgatatggggccataatttgaattgctctgttcctgtctgctgttcttctccagtgacaggaacagtccttgctgtaaaaactgtcagtttgagactgcccagaagaagtgccaggaggcgattaatgctacttgcaaaggcgtgtcctactgcacaggttcgtgttcttgttgcttccttggaatgctgtgggtcaagtgtgtgtgtgtctttgaaaaacaagattatgttttgttcagatgagagacaccttatttttaatctcatatgccgggttgagtttctggcactccttagtttgtgacacttggctttggtgggtttaagacctgtttctatttctctttcatttccatcactctcctctttctcctcacagacatccactctactgtggttaatatttgcctggatatgtgtatatccttgaaagatcatatagtgttattttgtgcatgtatgtgtttttaatgtgccaaaatgatattctaccttaaatttacttttaaaaaattcagtatcatgttttaaagaattacccatattgtgctacagataatataacaaggtttttaatggctacatcctaatagcaaaattttggaaacaatcaaaatgacaatcttgggataatgaatgttatcatgaatctatgcactggaatagtgtggaggaagcaggatacaagttagaagggtaaccagtttttctatatgtatctatatgtatttcactgttggggacacctacatattgtttagttatatgattggctgtgttttacttacaagtcaccaagtggtagctacttccattgccttcatccccttgatattccagataggacacagatcacatcctcctacgtcccttcaggaacctgtgtgtttctctgggtactgaggagtgtcattgtgtagtcacagaggcaggatgtgctggtctctagagcaccactgctaggttgcctgtgtctgaggactccttatcctgacgttctggccaacgcttggaattaccctgctgtcctattagcatgatgagtataaagtaatctcttgttcttacttttttttttaacagcccttgtcctaatgcacttacttacatttttcttgagcatctctttatatttttcagctattcagatttctcctgtgaatagccagttcatatatttggttcattttttaaaaattgggtttcatgttatttcactactgtgaatttggaggagttcttatgtaatcatccatttgggcatacgtctcctatctgttgccattctcagaacagaaatctttaacgtaatcaaatccatcattttgttgtgtgtgtgtattttttaaacacatggttcagaaaagccatggcggatggttaaaaagatattttccacagctgcttctattagcttcataagttgtccttttacattcaggacttgaatctttctggagctaacctttccaggtgtccagtatcttttgttcggtcaattgttgctttaaaaatttcaaagctatgttattactaggtatataaacggacatatctctacatctttatctgctgttccttaccagtatataatgttccttttttacccttgcgatgttttttgacttaaattgtcaaaaagcaatattcagtttgctattctagtttttttgttcctctgatatatctatctgtcccattcttatatttttcaaaatttgtctctcttggttggttggtttgattttgtaatagctttattgatacataattcacactcatgtagtttgcccatttaaagtgtacagtttaatgatttttagtatattcagatttatgcagtcatcacaattaattttagaacatttacattactccagaaagaaaccctgtatcctttagctatgatcctccaatccccccattccccacaactcagagcaaccactaaccaccctattctttatggagttgtctgttttgaacatttcatataaatggaattatacaatatggtttcgtgaccacatattgtatgactggcttctttcactgaacatagcatttttaaggttcatgtatgttgtagcatgtatcagtacttcatgtacttttattgctgggtaaattccattgcatggatatgccacattttgtttattcattcattggttgatagacatttgggttgcttccacttttttgctataacaaataatgctgctgtgaacatttatctatgagtttttgtgtggacagttcctttggatattattcaggaatagaatttctgggtcatgtggtaactatgcttaatcttttgaggagctgtcagactgttttccaaaatggctacaccattttacagtctcagcagcattgtatgagggtcccagcttctccatatcctcaccaacacttgttatcttttttattgtaactatcctaggttttgtgataaggatgcaaacagaaagctggaggtcttcagggacctagtgaatgaagttgtgtcctattttggcttgattttggttttccgtgtgcatagtatgacatgttgcccatgtttttatcttttgggatctgtcactatcacattactttgccaaatgttaggaacctgatggcccggcacagtggctcacacctgtaatcctagcactttgggaggccgaggtgggcagatcacgagatcaggagatcgagaccatcctggctaacacggtgaaaccctgtgtctactaaaagatacaaaaaattagctgggcgtggtggcgggcgcctgtagtcccagctacttgggaggctgaggcaggagaatggcgtgaacccgggaggcggagcttgcagtgagccgagatcacgccactgcactccagcctgggcaacagagcaagactccatctcaaaaaaaaaccaaaaaaacaaatgttaggaacctgaatatctaaatcaagctttaaagaagcatttgctagctatgctcaatgtttcatcttcactgtaataataaaatagattgagaaaaatgctttcttttaaataaacgtaagtaaaacaatttgaaaacgtttgttcttatcaaacagccttttgttcccttgatattttatacaaaatagtagatagcagaggataagttcctgataaggaatcagtattttctagcaggaaaagctagagaacaacaacctcaaaaaaaaaaaaaaaaaagaagaagaaagaaaaaaagcaattagcatttcacaaccagcagcagcagcatcacctgggagcttattagaaatggaaattgtcagtcccctccctggatctactgcatcaaaaaatgtgggaagggaggccagcagtctgtgctgtgtaaccttctgtcaggtgatttccatgcatgctaaactttggggaccatgctagatagatgataccattttcagaattattttcctacctgtctaatactctgactttagtcttttaagaacagatgctcaacagatatttattgagcattttttaatgtatcagggcagtatcatataccaaaaatacaataatgatccacaatataaaccttccctgagctcactggacatcatactttcagtaatagtttgttaaatgactgttgacatgatgaatgcccagtgctcatgaaaggttttatgagaaccagaggcaaagtgcctggttatctgttgggtacttaataaaccatcacttttgtttgaaactggccagattttctgtacattttgtgttactgctctgaaaccctctaagtcagaattcttttgattggcttcattcttcagctgaaaggccagtccagagctgtggatatatagtccattgctttcataaagtgttttttttctcctcctctatttgtgttgacttttagctacttgtgctattcattttccagaatgattcactcattccatcctgtctctcccagtttaactttctttggtgggttttctttggcattattggcctgggcacagtggctcatgcctatcattccagcacttggaaggccaaggtgggaggatcccttgagcccagcagttttacaccagcatggtcaacacagggagatctcgtctctcaaaaaaaaagaaagaaaattagccaggtatggtggcgtacgcctgaaatcctaggtacttgtgaggctgaggcaggaggattgccggaacctaggagtttgaggctgcagtaagctatgatcacacccctgccttccagcctgggtgacagactgagaccctgtctcaaaagaaaaataaaaagaataattgatttatttaagaaatatttgtagtatacctataatatgatagggattggagataacttaatagatttgatcattgctgtcatggggctttccagtctagtagagggaaaacagaaaataacattaaatatatatatataaattgcaaaacatatgcaatgaaggagagaaggagtgtgatagtgcataatggaagtgggaggccacatcaacttagcatcctcagggatatctcagaaaacctttgagacaaaacttaatccataagaaaagccagctaattgccccaaaagagtggaaacaccagcattccaggtagaaggaatagtatctgttaatattgaaggaactgaatggaggttgtcatagccaaagcagtgggctgtgggagagttgtgtgcgatgaagtcagggccagatagggaaggccgtggagttcttttaagccttcatacaaagtttgcaatttattctaagtaatagcacataggatattcttttatatatgactgtgagatgcagaagtggagaccatgcattctaactggggcttgggaggccagggactcatgcagcctagcctggcacatagccaggcactcccatttaaatgctgattgctggtgagatgcaggctcttgtcctagctctgtaggtcactttttgcttttgcaaggtaagatgctcacttgtatgagaaacagcgtattatgcacctgtagaactggtggacctgtgactcattctttttgttatgactggtgtttgcttccaggtaatagcagtgagtgcccgcctccaggaaatgctgaagatgacactgtttgcttggatcttggcaagtgtaaggatgggaaatgcatccctttctgcgagagggaacagcagctggagtcctgtgcatgtaatggtgagcagttttattcccagtccagcagcaggagaaaacatggcctttgtctgccaggctcccttcctccatttggaggttgtgcgaatgacagcagtggtgagatccaagccgaggatgaggggatggggaagggcagggtggtgtctggagacaggcatctctgcatgcagatccaccatacctgggagacctatcctgttggtgtttcttcttgctgcagtttcaggccatatggcaggctttgaggtgggagaggagggaattttgttgggggtgagtgggtgggtaggtagaggtgtgtcctagccttcctctgctccatatcatacaaaccacaaaagcagcagtagctatctacattacattggcatggaactaggatactcctgcaacaactccaccagagagagctgattccaggacctaaccccactagatgaggatttttgcagttatcaagaaggctgggtctgctcccctctgatctcttagagcagcctggggcaggagcctctctcctgctggcctgtcagttttccttaggtttctgtgctattttggaacccctgggtttgagggcatcctcatggactggtcagggactggctggactctgcttcccaccccacttaaaccatgggagtcgatgagggagttctcttgctttcaaaatagacagagagccaggtgtggtgactcacacctgtaatcccatcactttgggaggccgaggtgggcagatcacttgaggtcaggagtttgagagcagcttggtcaacatggcaaaacgctgtctctactaaaaataaaaaaaattagccgggtgtggtagcgtacacctgtaatcccagctgctagggaggctgaggcaggagaattgcttgaacccagggggcggaggttgctgtgagctgagattgcgccgctacactctagcctgggcaacagagcgagactccatttcaaataaataaataaataagtaaaaaataaaataaataaaagacaaagaacccggtagttaaataaaatcactgggttggaagctcaccatccatacagtggagtgaggaactcttccaagttcaataatgtgtaggtaaagaagataggttgagggcagtgtctcacatctataatcccagcactttgggaggccaaggtgggtggatcacttgagctcaggagttgtttgagaccagcctgggcaacattgtgaaacctcacctcttaaaaaaaaaaaaaaaaaaggtaacacgtagcagatgccaaataaatctgttgtgttgaatgccaagaggcttggggtgctctggaaggacagagcccgacacagtaaaagtccaagaaatattttataaattagtgaatgatgaaaaggttttctttttttttttttgagatggagtctcactctcgcccaggctggagtgcagtggcgcgatctcaggtcaccgcagcctccgcctcccgggttcaagtgattctcgtgcctcagcctcctgagtagctgggactacaggcaagcaccaccacatctggctaattttttttatttttagtagagatggggtcttgccatgttggccaggctgttctcgaactcctggcctcaagtgatctgtccgccttggcctcccaaagtgctgggattacaagcgagagccactgctcccggccttttctgaaaaggttttctttttgcttgtttttgtgttctagttgatttctttttctcctaagtatggtttaattttctggcatttctgccattcttatgtatgcccacatggctcacagatgcccggtgttttatcctgtgacctgtcagagctgttcttgggaggagttgtggagctttggctgcagggctcatgctcctggggtcactgagctccccacccaagggtggacagttgtgtcccagctgctctcgctttcagggagccagtgtgggccctgaggggcacactttagactgaaaaaccaaggattgaagtcagcagggtgacaagaaagttgggacaaagggaagcatttagaagagcattgtgaggggcttgaaggggagagaatagttagactttgaagagaggtcttgaatctagaatggatttttctctgcatttttttttaaaccttgtggcctctgtcactgaaggctgaggagtgtgacctcagaaactactccttggtgggggctatggatagtattagctatttaaataaaaaataaatgtgatttcttacctctttgggagcatggtcagggaggaaagaggaggcaggaggagaggcaggtctcagaacaatccagctgtcaatgcgtgttctctgttccagaaactgacaactcctgcaaggtgtgctgcagggacctttctggccgctgtgtgccctatgtcgatgctgaacaaaagaacttatttttgaggaaaggaaagccctgtacagtaggattttgtgacatgaatgtgagtatttatgtacagctttttctgtaacagccagataggaagtttttattttgtaagtacttgattttgcagatgaaaacaaatcaaaacacaagtggggctacatccttctggcccattgttatctacgggtattacttaggaggagaagacggagtgctttcaggtccctgcctgtagtttccttctgtggtgggaggctttgagcccagagactgagaaggactggggtggggactttatggtaaagttggttggtttcaggcagtgggtcctaattatgttttcctagattacttacagaactgactaagattgcaaaattattcagggtgtgattttgaaacaggtgctgaatgagtaggaaagacctagaaggctgcttgacttacttaagccagacccttttgttctctagagaagcataatttttctcatgcagaatgatgggagagggttttaagatttacgaggcttcacagggagtctggctgtgttgttcactgtccactgtgtatgtgtagagtccttactggaatgcctcatctttagcaaactggtttccttgatttttgtctcctggtaattctaaatcacttgtaaaaatggagtaattatgaaagtgttaatgacagatgttctactttcttgggtactcattacgcggaagttattgccttgtgtcaaagatgggaaaacgtttgattttaatgaagccctttacatgtcagttatttttataaagctacattgcttctgaatacattgtgtttgggaatgatgctgtatgtatgttttttcttcatagggcaaatgtgagaaacgagtacaggatgtaattgaacgattttgggatttcattgaccagctgagcatcaatacttttggtaggtgatttccccagattacttactgagagctgagtcaatttctgtgatgacattagaaaagtgtgctttcagagtgatgtgctttaattctgcagtagaaggtggaactattcacagctttagttatgaaacaactttgttggctagaataaaatgaactcatagatagtctgtccccgtggagcttggatgcacagattttctgacaagggaaataaagtcaaaatactggcttccttctttacccaaaaatatccatgtgattagcataagcatagtttaatgctatagactgaatcctgattgatgtaagagtgtttatttgactgaatgctatatactgaatcctgcttgatgtaaaagtgagcctcatattttgcagaagcagggtatatcatgttgtcacgagtccataatttaatcacaaaaataatatccaggtaacaaaaactttgtcttcttaagcatttactagtagtagcattccatattaatctgttgacacagctactccaggtaacatgttgaatattctgcaatctcttcctgtcagccagtatatgagggctatttctttaaaagcacttggtatggagagatggtgtggtgtaatacaggcagcacagacattctgctctcggtagtatgtctagccagcagctctggcatttgacacaatggtaatatcctaagagcatttcactttagatttgtgaagtacttggtcaagacattaactgtttggaattgttcacaggaaagtttttagcagacaacatcgttgggtctgtcctggttttctccttgatattttggattcctttcagcattcttgtccattgtgtggtaagtcatcaacttttaagtaattaaatgttttatttaaattttgatcaactccaaccatgtaatctctggaaaaggtaaaacttgttcttagcaaagtttggcctgatatttccaatagctttttttgttgttattcctaggggaacatgtcttgtagaaagcttaactaatggtcttttaaaaaaaatactatttttgtgtgttggtgttttaatatataaatttcttaggaattttatacttttaagcataggagactgtttaactggatttgtccaggtcctttgatgagtaaagcccttattgaagagcattttcaggctgacttcgttgcaatagagcaaatatcaaacatcggcatttcagatgttccccatatatcatgtagattattggcagcagatggctatgtcttcagccttctgcacaaataggatgtagggactggggcccagctgtcatatagagtatttacatcttccccaaaaaataagagtaagcagtcttttctgttctcattcagaatcagtaacagctacaagttgaattgggctttgactaaggaactcctggtcctttataaatttgaggccctttttcataaatgttcttacgaatccattcacttgcatctgtggggaatggggatttgtctgctgtagagatgagaaagtcacacccaggcttccagacttgttttcccaaactctttcatagtggccttcctatgagcatttaaaaattccagcacaactctgatgacaaaggagtttttcctactgcctccttcctttcctttcctgctggcttctcctgcctaggggccatctcacagagcagctcttcctcagggtggtgagcatgatgggtataggaagatctctagggagcacttgtgctgaagaaagctgaaggtgacgtgcttgaagctttgacagatgtctctggatgacagtgccatccatcacgattgcttctattggaggatggaacctattttgtttacagggaagttgcacatgtggacaaggcacgacccttgatttcagagcaaagcctccgataggagggagggccatggcttgtttttggtcatagaatgcattgatggcacccagacaggaagcctagtcctggattcttggtccttgccctctgtcacctattatgcttcagccacaggcagggatggggcagcagatggccatgtggttagccttctgcagaagtaggatgtagggattgaggcccagttcctccagcagagcatggtccacagaaactgtggagacagctaagagagtgaggccatgggccggggcagtgcgaagaatgctgcaggcccagccacctgggtcttcctaccagttgcccttccagtcagtgcggtcctggtgtacccagcatctgggacatttgtcatttcatgcacaggaagatgcctttattattcccctgcccacagagggataaatttctcagaaaacatagcacttaaaccttgcctctttctgtacttaacgccaaaatgtatttcctttgagtgcaaaggaaacacttctagactggtggcataactaaagcttgggtgagaaatggattgtcatctgttgagcctgctatcactttctacaactcaggttctaagttcttcagttagtgttaggaatagcctgtgatgaaatagtactcactaactgaattgtatttgtagggaatgaccttcttgctgtttctttctaggataagaaattggataaacagtatgaatctctgtctctgtttcaccccagtgtaagtataccatatgaaagaaacataatcttcgcctggtctgaggccctgttaggcaaagaccttcacctgacccagcaagagctttcactggctgatggaaggtcatgttgcagcaggaagggtctaggttggaatgtttacccttctgacaacagtgatggtgaacttcgattagttgcatggatggacatttaaagagctgtgctgtccccttcccaagccataaggagtgatttagccattcaacacttagttaatattttgagttcaatttctctcttgggatcttaccttgagaggtttgaatcctcttttgggtcttcaaatggtaagtaagttttcaggatgcttgaaagctagtaattactgtttttgccattaaaagtaatggcattaattacttttgcaccaacctagtattttttagtcacttaggttgagtgagcctcacctagcacttttttcttagcatcacagtgccaacagaataagaggctgtttgatgggtaagggtggagctgtgaggacctccgattcatcttttattcctatcaatcaattgaacccatgtctttgcagaacgtcgaaatgctgagcagcatggattctgcatcggttcgcattatcaaaccctttcctgcgccccagactccaggccgcctgcagcctgcccctgtgatcccttcggcgccagcagctccaaaactggaccaccagagaatggacaccatccaggaagaccccagcacagactcacatatggacgaggatgggtttgagaaggaccccttcccaaatagcagcacagctgccaagtcatttgaggatctcacggaccatccggtcaccagaagtgaaaaggctgcctcctttaaactgcagcgtcagaatcgtgttgacagcaaagaaacagagtgctaatttagttctcagctcttctgacttaagtgtgcaaaatatttttatagatttgacctacaaatcaatcacagcttgtattttgtgaagactgggaagtgacttagcagatgctggtcatgtgtttgaacttcctgcaggtaaacagttcttgtgtggtttggcccttctccttttgaaaaggtaaggtgaaggtgaatctagcttattttgaggctttcaggttttagtttttaaaatatcttttgacctgtggtgcaaaagcagaaaatacagctggattgggttatgaatatttacgtttttgtaaattaatcttttatattgataacagcactgactagggaaatgatcagtttttttttatacactgtaatgaaccgctgaatatgaggcatttggcatttatttgtgatgacaactggaatagttttttttttttttttttttttttgccttcaactaaaaacaaaggagataaatctagtatacattgtctctaaattgtgggtctatttctagttattacccagagtttttatgtagcagggaaaatatatatctaaatttagaaatcatttgggttaatatggctcttcataattctaagactaatgctctctagaaacctaaccacctaccttacagtgagggctatacatggtagccagttgaatttatggaatctaccaactgtttagggccctgatttgctgggcagtttttctgtattttataagtatcttcatgtatccctgttactgatagggatacatgctcttaga

SEQ ID NO: 15379 - DNA, 66501 bp, Homo sapiens
acctgcacttctgggggcgtcgagcctggcggtagaatcttcccagtaggcggcgcgggagggaaaagaggattgaggggctaggccgggcggatcccgtcctcccccgatgtgagcagttttccgaaaccccgtcaggcgaaggctgcccagagaggtggagtcggtagcggggccgggaacatgaggcagtctctcctattcctgaccagcgtggttcctttcgtgctggcgccgcgacctccggatgacccgggcttcggcccccaccagagactcggtaaagacccaggggagttggcttaggccggcgcctggagcgctcgtttgagggaagagcaggggagctgggtctatcaggtgtttgggggcggggtattggcgatggtggcgcgtccctaagttttcagtgtagaagggggtgtggctctcggagtttggggaaagaataaaggagatgggcctgtctctgagtgggaaagggctactggacgggctccatgtagtgactgagcgcctgagaggggtttgctccctagctttgtgttcggggagggtgttgggaaagcggtaaggagtagggtggctggatcttgtttggagagggagatgtggtcagggttcttgccttagtagggaacaaatctagtgttgtgtgttcctaccagagccagaaaggaagggcccaaagctccagaattcttcctggtcctcgaaggagggaactagaatttctgctgtaggaggtacttatgcagtaatctcgttgggaggcggagactggagttggagtcttaagagttgtgtttttgcgaacatcctaagcacgttcttggttatttcaattgtagcttattggaggtgcttgggagatggggggaggcggaaacctggtaagccaactcgtgatgctgccactatgaatgctttccttgcacttttaaacaaagaaattatcaagagtgacgagtttgatgaatttagaggctagaaagtagagggttcctatttcattagattttccagagagattggattttaaggatggagatgcattaagggatctgaactttggtggaagtaagtttgcgtgaacttttagtgtattttaaaatccttttatctttcaaaaattgacgtgtaagatactttaattagtaataaagtgtgaaataatgttttcccagtgtgtgaaattgtaggcttgcatggttgtactggttcccaaatttcaccatgataccatgtgtagtattttttttctttatatttagtggacagaaattgtaatggattggtatggatactaaaggtgttgagagtgttatcacttgaacagctgtcttatgattctttccgattgaaatggattacaagtgactaatgaaaggcaagggatcttgttaggaagtgctgagaagtggtaagtcagtacaaattgaaggacattttgaggtaggattgtggttaggatggagggatagggtaagggtcttcattttaaggataaatgttagtaaaaagaataaatatgtattttgagatattaaaattatatttgcaccaccctgacacaactgtttcacttatgttattaatctgttgttcgtaggtaaaaataagcatgagtcccaaggaagcatacagtttaaagagaaacattactttctagatcaattcataacatttgcagatcgtaaggttttttagaccattttttttttccaagacagagtcttgctctgttgcccaggctggagtgcagtggcgcgatctcagctcactgcaacctccgcctcccggggttcaagcagttcacctgccttagcctcctgagtagctgggattacaggcatgtgccaccacgcccagctaatttttgtattcctagtagagacggggtttcaccatgttggccaggctggtctagaactcttgacctcgtgatccgcccacctgggcctccctaagtgctgggattacaggcatgaaccaccgctcctggcccatgtgtttgttttttatttgcaaaatgcagaccacctgtgccagaagaatgcatagacttttcttttttcttttcttttctttttctttctttttttttttttttgaggcagtgttttgctcttgttgcccaggctggagtgcaatggcgtcatctcagctcaccacaacctccgcctcccgggttcaagcaattctcctgcctcagcctcccaagtagctgggattacaggcatgtgccaccacgtccggctaattttttgtatttttagtagagatggggtttctccatgttattcaggctggtctcgaactcctgacctcaggtgatcagcacacctcggcctcccaaagtgctgggattaaaggcttgagccaccaggcccggcctctttttttttttttaaacgaaatatttgaaggacacacaagtattatacgtggcattggaaatacaaagatcagacgatatccatcttcaaatggttatagcatagggaaatagacattcatttaggacacttctaaaacagcatagaggagagtgctagagtacgttatagcaagtgttatcaccaaatgaatcttagagatcaagtctagttttcaaataaaggaggaggaaaatgagtctcaggaagatgctgtcagttgtcaatgatgaacataggccttgtgggtatttttcttttgaagaatgactttttttttcagtttgtttgacagcttacaatataatttgttacttaaccttaccattagattgagttggtcaagactagcaaatagtttcatagttgaaaaacatgctttattatttattttttatgtttattgtcctacaaatactactatattgcagtactcaatatcgattaggcatatgacaacatttttctgaaaggcaaaaaatacctaataaaatgaagcctggtttttagagtcctctatgggtcaccaaaaatgatttcaattgaactgttatgaattgcataatttaggaaagttatgagtcatatgagcttagtcatgatgatatcttgttgaagttgcagctggggtgtataagtctcactttgatttcaaaatcgttttccctttgtgttacttttaataaaagaggatgtagtgggtgggaggaaaaaatataggtcacagatgagggatgagaaagtttgtatctgaaacatgtattttcaaatttaccttgaggttattggcatggggattctccatattgcagtgctgatttcattattgacagcaccattttactcagtattttgacatctggctttctcttttgatgttaattttgcttactggctgcattcctttgaaacctaaatgcttaactgccctaactgctccaagggagatttaatgtaactctgctttatattagtctaagagataaaccatatttcaagagtagaatggagaggaattaagcagataattgtgatggggaaactggagagatccttttgactttcacaggatttcctagaacattaaatataggtttcctccaaggccaattgtggttgatttttggatccttcaccattttctatttgtgagataataagtgtatacagctggaagtgtaatgtgaagaaagtctgaaaaagattgataggaaaggaggacaggaatgggcttcattgaggtaacggaagtgaaatgaaaggcttttcatatatgggttgagcatccctaatctgaaatgctccaaaatttgaaactttttgaatgctggcatgacagcacacattacccctaacacacgattttttcactgttagtggtatattttttactgtgtagtacttatgtgtgaataggtataacaaaacgattacttattgtagcatgtaaaatcagtcaggaatgatggtgatgccagacaaccacagattatttatgtgggtggccgagacagtgacacctttgctttcgaatgcttcgttgtacacaaactttttttcatgcaaaaaaagttacttaaaaatattgtttaggccaggcgcggtggctcatgcctgtaatcccagcactttgggaggccgagctgggtggatcacgaggtcaggagatcgagaccatcctggctaacatggtgaaaccctgtctgtactaaaaatacaaaaaattagccaggtgtggtagcaggcgcctgtagtcccagctactcgggaggctgaggcaggagaatggtgtgaacctgggaggtggagcttgcagtgagccgagatcgcgccactgcactccagcctgggcgacagagcaagactccatctcaaagtaagtgaataaatgaaacataaatgaattttatatttagacttgggtcccatccccaagatacctcattatgtatatgcaaatatttcaaaatttaaaaaattctgatgaatgaaacacttctggtctcaagcattttggataagggatgctcaatctgtatctctttatttactcctaaaatcagccaaggaaatgggcatctctccgttcccccccttccttttttttttttctttgttgttacatgagttgtactggtttcacttcatttgacagtgttctgctaatgactagacgtgtatctctgacctggacttgttctctggagttcatattcagctgcccatttggcacttcaaatataacatgtccaaaattagttaccttttttttttttttgagacagagtctcactgtcacccaggctggagcgcagtggcgcaatcttggcttactgcaacctccacttcccaggttcaagtgattctcgtgcctcagcctcacgaatagctgggattacaggtgtcccccaccacgcctggctaattttttttttttttttttttttgtatttttagtagagatggggtttcatcatattggacaggcctgtgttgaactcctgacctctggtgatccacctgcctcagcctcccaaagtgctgggattacagacgtgaaccactgccccagccagttacctattcttttgattacaagaatgagtagctggacacagtggcttacacctatagtcccagcactttgggaggctgaggccggcggatgacttgaggccaggagttcaagaccagcttgaccaacatggtgaaacctgtctctactaaaaatacaaaaattagccaggcgtggtggtgcgtgcctgtaatcccagctactggggagactgaggcaggagaattgcttgaacccgggaggcagaggttgcagtgtgccaaggttgagccactgcagtgcagcctgggcagcagagtgagactccatctcaaaaaaaaaaaaaaaaaaaaaaaagaatgagtatcggatacaggtttagcctaggactaggcagggctgctggtaattgtggaagtagtctcattgcctaacctgaaacttgcatcctggttactggtcttgctggagagtcttggctcaggttacgtcccaggtctgttgaggagctcttgatagggaattagttgaagcagctcatactctatcctcctttactggtataaatccataaaattgtttagttcccaggctctggggtccctggcctagcagagagcactgctccctttttctcattccttagtcccaacaacccgcacctgacacttactacacgtggcctgcttccctgtcctgtgtgttttggggggtgctgaagaggaaggctcctgtgtcttcagcacaaacacaataaacacttcacagcagtactggctttatgttttccatttctgatatcagaagtaggagcatgacattgatagtgtcattttgggggaacttttcgtacttcatgcagcagagcagtgaagagtgagctgagtgccttggggttctgcagtacactctcaagtagtattttaggaaaatgcaatttgctgaaaaaataaaagaaattaatgtaaaaaatccacaagctgggcgcggtggctcacgactgtcatctcagcattttggaaagctaagggggaaggatcacttgagcccaggagtttgagaccaggctgggcaacatggcaagaccttgtctctacaaaaaaatagaaacaaaaattagccaggtgcggtggcatgtgcctgtggtcccagccacccggaggattgctcatgcccaggaggttgaggctgcagtgagtggtgattgtgccctgcactctagcctgagcaacagagcgagaccctgtctcaaaaacaaaacaaaacaaaaacccacacgtttccagaaccttctcatataacactttatttacattgttcttaaatacgtgtgggacggttatatacataccactatacttatgtgtatatatgttgatatacacacaaaattatatacataatttttgtttgtttgtttttgagatggagtctcactctatcacctaggctggagtgcagtggcgtgatctcagctcactcactgcaacctctgccacccgggttcaagcgattctcctgcctcaggcttctgagtagctgggattacaggtgcctgccaccgcgcctggctaatttttgtatttttagtagagactgggttttaccatgttggccaggctggtcttgaactcccacccttgtgatccacccacctcggcctcccaaagtgctgggattacaggtgtgagccactgtgacctgccatatacataattttttaaagtttcacgattagttttagcttaaaaatgtcagctctgggcttaatgaagaaaatatggatatactttatgtcaatgcattaaagtgaatggccataaaagcttatcccagagacaaaacaattcagatataagagaagtgggagagtggaaggtttatctaatcttctgtaggcaactccacagctacaaccagaaggccattttgttacaggcctgaaagccccgttttctttttattcttctttgaaacctttagaaggaacaaagtattggctactttttaccgctgatgtcagtgttaagaatcttgtgataacatagatttactctccctgctgaaaatcactatgtggctcatcagtaacacaactagacatgatgacttaatgcaaaggaagtcctatgtaaatgagcaatgaaattgcaactgtgtataaggaacaaaatagaatatgaaactccagaatcttttgttttcatttctgtttctcccaaggctctatcattcaaaactccagaatctttcagcatgcaattgtctcctgatatcagcccctctcttgttttgttttcttttttttttttttaatcacagtgagccacaacctaggagtcttttagtggtttctacttggtttgctctgcagcctaccagcagatttcctacattccggtcttgttcccctctagcccattctccacactgcagtcataatgaaatttctttcttttttgggggggatggagtctcactctgtcacccaggttggagtgcagtggcatgatctcggctcactgccacctttgcctcctgggttcaagcgattctcatgcctcagcctcccaagtagctgagattatacgcacctgctaccacgcccagctaatcttgtatttttagcagagacagggttttgccacgttggccaggctggtctctaactcctgacctcaagtgatcgcccaccttggctttctctctctttttttttttttggattttgagacaggatctggcctcgttgcctaggctggagtgcagtggcacgatatcagctcactgcaacctctgcctcctgagctcaagccatcctcccacctcagcctcctgagcagctgggactgcaggtgtacaccaccacgcctggctaatttttgtattttattttatttatttttttggtagagacggggttttgctgtgttgcccaagcttgtcttgaactcctggggctcaagcgatctacccatcttggcctcccaaggtgctgggatgacaggcatgagccaccacagctggcctataatgaaatttccaacttacagctattgccattatccaaagcccagaatccctgatttccttccatagcccttcatggcctgaccagtgcctgactctccagcctcacacttcatattctctctgtactgctctgcactgtagcctcattgagttgctttcacgtctttaagtgttgtgttctattttttgtggaattcagcatatgttatgcccttgacctaaggcctctcctttcttttccttctctggggtgctgcctcatccttctggtcttcaaaaccgtttccctgggaaaacatctttgactcagcaggcagggatcatgcccctgctgtgtctgtgcataactttctgtggctacttctgtcttggtctgtgatgtactttataataattttggtctttcctccagtgtcacaatactggaagtctgtttctttttctctgtgttgtatccttagtgcctgaaaggtaggaggttctcaataaatatttgttaaataatcaagtaaatggagtctggtggaaaagagaaaaaataagtgtagaatgtgtgtgcaagaaaggaggggtagggggatgaaaaagataacaaaagcacataacaaaacaacaaaaagcaaaaacaacaaaaaatgcagatgacaaaaaagataacaaaatgatgactgctgtggcaacttgtagaaagtaaggaaggtgctctcattctagagagaagtaggcagccattgtagttttttaaagagagaatatgggctgggctctgtggcccacgcctgtaatcccagcactttgggaggccgaagtgggtggatcacgaggtcaagagatcaagaccatcctggccaacacagtgaaaccccttctctactaaaaatacaaaaattagctggataggtggtgtgcacctgtagtcccagctacttgggaggctgagacaggagaatcgcttgaacccaggaggcggaggttgcagtgagctgagatcacgccactgcattccagcctggcgacagagtgagactccatttcaaaaaaaaaaaaagaatatggccagacactgagctgagatagacagtgcggcagtgtctggtattaactgtaataaactctactgtcagaagcaggtggtttatacttaagtttattgagagaattggatatggataagagataaactcttgggaaatggggagaaatataaattctgttgtaaagcctgtaaaaaattgagattactagtggttagaattttggaagtgaagtgcagtgaaatattgagtacctgagaggttacttgttagtgaaaacacaatagcagtagtacgtagctacagtttggctccaaaggaagaactgtttttactatagtttgtaatggcttcagaatcttcaatttgagatatccagttattaaaagagaatcaattgcagttgaaatgcattagttaagtattttaaagtgctttagcaagctacatttaaaaagtgcttattatagaaaatatacccaaaataaccaatgatgttactgtcttgtgcttattttttctagacctatttttatacatagttaagattatacaatatgaatatttctgaaatctatatttaacattataacatatgtatttttccatgttctttctttttttttttttttgagactgggtctcatcctgtcacccaggctggagtgcagtggtgctatcttggcttactgcagccttgacctcctgggctcaagtgatcctcccgcctgaaccttctgagtagctgagactacaagcacatgccaccatgcctggctaattttatttttactttttggagagatgagggtctcactattttgcccaggctggtctcgaactccttgggtcaagcaattctctcaccttgacctcccaaagtgctgggattacaggagcgagccaccgccctcagccccatgttcttaaaaaccttttgtgaacgacatttaaaatagttgcagattttttcccctgtctttggaagtgttacaacatccaaccatttcacagttactaatttaccatcattctggtttttgtccttgaaaataaggcaaggctgaataatgaacatctttgtggctaaagtttttttctttactttgagttgttaccttcctttagcttagttcagtggttttttctttttcttttttgagatggagtcttgccttgttgcccaggctggagagtagtggtgtgatctcggctcactgcaacctccgcctcccaggttcaagcagttctcttgcctcagcctaccgagtagctgggattataggcgtctgctgccatgcccagctaattttttgtatttttagtagagacagggttttgccatgttggccaggctggtcttgaactcctgacctcaggtgatccacccgcctctgcctctccaagtgctgggattacaagtgtgagccaccatgcccagccagttcagtgattttcatatttgagtgtgtcagccttgcctggaagccttgttaaacacagactattggatcccactgggcggatttctgtttgagcaggtctgaggggagacctgagcatttgcatttttaacaaattcccagttgatgatgatgctgctggtttgggaactacactttgagaactactgggctatattattgacaatgaaactataatgttgaggttaagttcctaagtcagtaggagtgattatgatcttgaatgaaactgagttcatgtaccaacctgtatcagggaaattgaagaactaaaggaccatattgcatttcagcactgagaattcgtgcagtttgtgaacatgtgagtgctgatatgtgcaaggtttttgctgagtattgtgaggcaaggatgttgtaatgaataaaaaatagccctttttggctttttttttcttcttttgagatggagtcttgctctgtcgccaggctggagtgcagtgatgtgatctcagctcactgcaacttccgcctcccaggttcaagcgattcttctgcctcagcctcatgagtagctgggactacaggtgcccgccaccacgcctggctaattttttgtattttggtagagactgggtttcaccatgtttgccaggatggtctccatctcctgaccttgtgatccccctgccttggcctcccaaagtgctgggattacaggcgtgagccaccgtgcccagcccggccttttttcccccgcctagagatggagtcttgctctgtcgcccaggctagagtgtagtggtgcaatctcagctccctgcaacatctgcctcctgggttcaagcgattctcctgcctcaaactagctgggattacaggcatgcaccaccatgcccggctaattttgtatttttagtagagacagggtttcaccatgttaatcaggctggtctggaactcctggcttcaggtgatccttggcctcccaaagtgctgggattacaggtgtgagccaccatgcatggcctcatttgggaaacttttgatatcagaatcttaggtttttcattagagattgtcagatttccatattcctctggaaggtaaaggcctaattgctagcattctggaagccagttagggtaggagggtaggagggtagggtattgggtagaggataaagaaggggtttgggaaaggtggggggtgtctcttggcagttgtatggttaaattgagtttttgttttatttagtgatatgtgttttttgggtacatgtgatattttgatacctgtgtataatatgtagtgatcaaatcagggtgattgggatacccatcatttgaaacatcttttctgtgttaggaatattacaagtcttctagctgttttgaagtatacaataaattgttaactataatttctgtactgtactatcaaatattagaacttactaatcaaactgtatttttgtaacactaaccactttctgttcatctccaccactcccacttcccttctcagcctctggtaaccaccattctgctgtctacctccacgagatccacttttttagcttccacacatgagtaagagtctttcttttaaaactggttttgtgagcatatttaacatcagtagcaataaacttgtattttaagctcctgttgctgtattttgaggaccttctaagtccattggaaggattttgaataccatagtgtctgcagtgatagttgttgaaagaaagggaaggcatcagtgcaaatatttttagacagtttttaaagagactcaagtcacccaatttgtcttctaaaaatcctgattttggaagaggcagtggagtttctgttgataaaaaatgatttatagtttgtgcttggcacttcctaatggattacatcaggaaagatttattgtctggcactctcattttaacgatactacaattgattattaggtttagatgctaataccttttttacctttatttcagagaagcttgattctttgctctcagactacgatattctctctttatctaatatccagcagcattcggtaagaaaaagagatctacagacttcaacacatgtagaaacactactaactttttcagctttgaaaaggtaatttgaattattcatggaataatgttggggcactgggggcttggtttggcaaaaacaaaaaagtaagggtatctactgaaatcttgggaaattacattttaaagatttgtaattaatttccagtataatgcttattctaaaattcatactggggctgggtgcagtggctcacgcctataatccgagcactttggggggccaagacatgtggattgcttgagctcaggagtttgcccaagctcagcctgggcaacatggcaaaaccccgtctctactaaaagtacaaaaattaggcatggtgacacgtgcctgtaatcccagctacttgggaggctgaggcaggagaatcacttgaaccagggaggtggaggctgcactagccgagatggtgccactgcactccagactgggcaacagagtgagactctgtctcaaaaaataaataaataaaataaataaagttcatactgatgagtatttttaaaaaagtaaatagatattgcagaggtgttaatgatggtaacgatgtttagaaaattctaacataatttaaattaattgaatgcttataaaaccttttgtttttggtgctactttataaccatcaatcatgtgctaaatattatctttatatatgaagagataaagattttgttcaggaccccacagcctggtggtgagctgggtctagattttactgttctatttatttatttagctaactagttacttagtttccaggattctttaacctgcttcatatttatttatttttaaaaacagggtcttgccatgttgccaaggctgatcttgaacttctgggctcaggtggtctttccatcttggcctcccaaagtgctgggattacaggtgtgagccaccatgcctggcccaaatttaatattctttctacattgagttcctcttacttcttagcataaattgatggatatgttctatttcagtagtaattttaataccacgtattgttttgcacattgaaatgttaaataattgcaggcctctttttaaagtctttaggaagctttattcagtatcaaaaaacagacacatggagaattgactgaattattctttatttatttatttttttgagagtcttgctctgtcgtccaggctggagtgcagttgtgtgatcttggctcactgcaacctctgcctcctgggttcaagcgattcttgtgcctcagcctctcaagtagctgggactacaggtgcacagcaccacgcctgggtgatttttgttatttttagtagagacagagtttcaccatgttggccaggctggtcttgaactcctcacctcaagtgatccacgatctcggcctcccaaagtgctgggattacagacaggggccactgcatctggccatctttattctttatataggacaagccttctcaactatgttaaaaaataaaaggaatatgtgcgtctggtttaaaaaacaagccatggaggatatgcaaagtttttacttctaactcagttagacttctcagacccagagaggtttcctttgtaaacttccaattttttgttttgttttgttttttgttttttgagacagagtttttgctcttgtcgcccagactggagtgcaatggcacgatcttagctcactgaagcctccacctctcgggttcaagcagttctcctgcctcagcttcccgagtagctgggattacaggagcccactgccatgctcagctaatttttgtatttttagtagagatgaggtttcaccatgttggccaggatggtcttgaactcctgacctcaggtgatccacctgcctcaggctcccaatgtgatgggattacaggtgtgagccaccgtgcccgacccaaaatattttaatgcatgttttttgcctataggtctctgtgtgtgtataggtgatatagatagcatatttacctcattttaaacagctgcataaatattcctattgcatagaattgtaacaacatactgactaatacactacagatggatattgtttaaccaaagtgatttttttaatacaacaaacagtgctctagtgagtatctttgtaaatgtgtaccttgatgaggtgtttttataggatatattcctggaaggagaattactgggtcaaggatatgtatactatgtttattgatattgctctttcctcccaaagagatttgacaaatttattcttccagcagcaatatatgagtttacctgtttcctgttatctttgccaatagtaggtttatcagcctttaactgtcacccctctaaagggcatggcattttatagttgttttgattttcattttgtgtgacattgagcatctttttatatatttgtaagtaatttgttttatatttctgtaaactgcctttttatctcttttgactatttttctattgaatttgtctttctaactactgaattgtagcagtgcttagtatattaaggagattggttcattgtcatgtggttattttaggcaaatttttaatgcaaattaatttttcctagctattgcaattatccttaggttattttttaatgacttctttttattcgattttatgtcagaatattatagtattggttattagctttcaacttacaccaaatttgagcagattggtaatattaatagctacagttaatcaggtacttattttctgtaatttactggcattttacataagttatctctaaaagtgattccttttttgaaggaacaaaaaaaaaaaaattaaggcttagacagcttagtaacttgcccaagattactcagctagtaaatgacagatacaagatttgaacaaaggttggactccaaaacttgtgttatttctgctatactggtggagagtttggtgaagaagtggatatagtagcaagaaataagtaggagcgaaggaagagtgaggaaactataaaatgaaaagaactcaaagtttagctttttgggtttctttggatttgaagtggcctgtagaatccgtattctagaggcaaaaacttccatagccttacatatttctctttcaagtttcgtagatgacattgattccctaagaaaatattaaatcgtagccacttgttatcttttctctgtgtaagaaagcagggaagtatgtaatttattttacaaagtttccatactaaatatttaatgggaaatttatctaacagtctatggaattttataccaggtgttttaaaataggttatttcctttaatccccaaaaccgttcagttattaggtgatattatttccatttgtagataaatacttaggattcaaagattgaggccaaggtcggacagtgagtaaatgaaagtaggacttaagccaagtttgtcagactccaaagcccataccctttcttttctatcatattgcgtcattaaagtttaaaacaagaacaaaaacaaagatagctgaagtaatcagtttgtatcagggctgaattaactctatgaaacccctcattacttgatggtaaatgagaagattccgtttttcgatagcagtggaaggcaaagtaatttaaaccaagatcattgcattaaatttggatgtaactattagaggttgaaaaagcatagaaacactgagaggttgtatgaagagttgaagtaacttaagaaaaaaagaaacttgtttaaaatttgccttacaagtttcatttcctttttgttataaatcaagaaattatcagctaggcgtggtgactcacacatgtaatcccagcactttgggaggccgagctggatggatcatgaggtcatgaggtcaggagatcgagaccatcctggctaacacggtgaaaccccgtctctactaaaaatacaaaaaattagccaggcgtggtagcaggcgcctgtagtcccagctatttgggaggctgaggcaggggaatggcgtgaacccaggaggtggagcttgcagttagccgagattgcgccactgcactccagcctgggcgacagagtgagactccgtctcaaaaaaaaaaaaaaatcaagaaattatcttatttttaaataacgaaaaagctgcggagtatatactgttttgatacttttttgatgttgcctgaatttttttggaaaaagttaaatgtttctcctaaaagtgaaatatatcagattacttgagaaggtctagaactgataaagaaatgaaagtgatatacctgactaaatggaccattaaaaatggttagggtaataatgttaattcaaactggttagctggtctttagttactgtaaattcttaagtcaaaagtcagaaagataaaacgttaaagaaatctgtaagaaaatgacttcacataattttgggaggataaagtaaaagaaattttgacattctgttggacgttttataactcaaaagctaatattggaaaatcaaaaaacatgaattttataatcgcttggtctttatctttagaaaagattcttaatgtagcaaatgaaaaatgcaattccactgatttctttctgaaaagaacattaagtaatgttgcaactcttagctttaaaacaaaataataagacatttataataagtatgcttttgaaagttctcagcataactggagggaaaaatcataactgagaatgtgtgggaagatatgttttaggatagcagaagaaaatgttccaaggatttacgaaataatgttctattgtcttttccctttgaccattaaaaaaccacaagcaaactaaaattaccttgttatgctcaaaaagttaaaaatatttgttgccatggagatagtcccagtctagatttctttccggtagtttaaagacttttgcaatcccatggggaagtaatatattttcagtacaacagctgacaaaatttgtttctgtgggtgagatgaataatatacctttctttgtctttggtgttcatggacacattgaaagactataaataatacttgagaaagtcttgctcaccactcctagttttcatgtaaggatggaaagtcatagaaaacaaaaagaatagtaagccaattaaagaactggactgaaactcaacaaaaagaatagtaagcccactaaagaactgaagtgtataccccctcccctctcctcccctcccttcccctcccctcccttcccctcccttccccttcccttcccctctcttccccctccccttcccctctcctccccctctcctcccctctcctccccctctcctcccctcccctcccctcccctcccctcttttcctgtcttctggtgccaatggagtctatattctaatgtctgtcttagataccttgtatttattttcctaactgtaattgtgggttacttttttgcaagatatgttgttttgaggaggaaaaaaagcacgagtactttttttttttcttattttgagcgggagtctcgcgctgtcaaccaggctggcgatctcggctcacagcaggctccgcctcccgggttcactccattctcctgcctcagcctcccaagtagctgggactataggcacccgccaccatgcctggctaatttttgtatttttagtagagatggggtttcgctgtgttagccaggatggtctcgatctcctgacctcgtgatccgcccagctcaacctcccaaagtgctgggattacaggcgtgagccactacgcacggccgcatgagtacttttaaatatagaaagcagcatttattaattttgcacagcaataagaattttctcatagtccacccagcttgatagagacagcatagtacagggttttgaaataaaccaggtttatttcccagtttcaccatttactagctgtgtaactttgagtaggttgattagcttccaagcctcaatttgtacttgtgtgaagtggggataatagatgcatagtacctaacaccaagtaggtgttcaataaatggtatataataggattagtttttgataataatttttttagataatcaggattccaacttaactacgcagtcatgtgtgtttccttattcttcagtgttttccaggagagatgaatgtataagttctttgaatatctttaccctagtgtgagtttattgtgatctgctgtttttatagctaaataaattagttcatttgtcgttacaggagatatattgctctaagtacctaataagactttagttgtaacttgcatagtgttttattaatgtcaatgcttctggctttttaagaaagtttaattatgtgaaaatgagacttaaaatttgtgtgcttagagtaaaatatgaatgcatttttcttcaggcattttaaattatacctgacatcaagtactgaacgtttttcacaaaatttcaaggtcgtggtggtggatggtaaaaacgaaagcgagtacactgtaaaatggcaggacttcttcactggacacgtggttggttagtatggagcttgttggtttgcccctgtgtctggtgtattaggtctccaaatctaacttgattgcatattcttttctggtgcaggatagtggggacggggtgtcatagaagtgctattctttgacttttctttgaggtatataagtttagaggcaggaacattctaatagaaggaaatgagtattatctaaatgtcatactagctggctggtttaatgattaaaattaaattcttcttaagtgataggaatttaacctttcttttcctcagtgactgtaagctttctttatgatattttaaacagggaagcttggagataaaatacttggtgatcctattacgtatgtatttgagaaaatttatcaaacaagcaattgcagtttactttttgacctttttctgcaatgagaaaaaaaaatgtcattgaaatccacaaatagtatagttcctaggcctgtacattctaaatcatgctttctgtctctcttagttcttcctttacctagaagtagataaaattattccagaagaaaatcttagcagttttgtttgttttgggaaagggataggtttcaagtgactaaacttgaggctaccccttaggagttgagattatctagcttctttctggagcctttgtttcttgttttgcagagctctcacagtactaggcaaattccaccctgaaggatttaatttttattgagagtaatgcatagtttcttatttgatgtaagtatttttaaataataattttttttttctcttaaggtgagcctgactctagggttctagcccacataagagatgatgatgttataatcagaatcaacacagatggggccgaatataacatagaggtaaatttatatgtgaattttttttcagtagcttatatctctgattttcaaaaagctgctcagttctgcaaaggtgaaaagtaattatacttatttctttcctcttcgtatttgaagttttttactaggaaagtagactttttaaaaaaggataatctctaagaagctgtgttatgatacaccctgtatttctaagtaccataattgagagagttacatgtgggatggataataggaagagaaaactttctttccctcctgactcattttttaattctttctcaaataataaatgtaaacatcctcagaaatgaaaagtgaagtattatttttcaatttctctgtttttctgctagacacactggaaatgctagatcaatgaaaggtggtagttcatagtctgagaagttaaagaggaagctaggaaagtcaggctgtggtcactcttccattgaaagagtagcaatagaaatcaagaccacagtggctgcattggttaagacacatatctatctgtcagatattagtctacaaaacaaaacgtttcctcataattgtgaattgaagttgattctgtgtttcctgaaaaatgagaagactctgggtggtggtggtgatatcactaaaatagatcacctgtgggaaaactgagtaagattggtcaaaatgaaatgttcaggtgtatttgagtgcttaataggggtaaaacagtctgctggagctatatatactatatgttttaattatatccaatctacatgactgttagtcctttgactgtccattattgtgaaaaagaaacctatggccttgcagtatgttatagtttgttaatgtttaagctatttaatgtcaatgttttgaggagtctggcctaccagaaagagtcagaaatttagtagaaagtaaaggaactaatattataaatgcattcattctagaataggcaaagcatcactggaatgtcttaaatttgcctgttctttcaaatcaatttattttttaagaatacctttattttaaaatatatgctcattgcaaaattcggaaaatagattatctgtacttggacagataactactattgacattttgacagacatccttccaaatttttttttctatgtgtaaatacacaaataaatatagttatacccactattttttcctgcaaaactaggaccatacaatatgtacagtttgtcttcacacatttttcgtttaacaatatgattatgaaccttttcgtgttaatatagatctaaattagggttttgtttgtttgtttgtttgttttttgagacggagtcttgctctgtcacccaggctagagtgcaatggcgtgatcttggctcactataacctctgcctccccggttcaggcgattctcctgccttagcctcccaagtagctgggactgcaggtgtgcgccatgatgtccggctaattttttttcttttttttgagatggagtatcactctgtcactcaggctagagtgcactggcgtggtctcggctcactgcaacctctggctcctgggttcaggcggttctcccgccttagacccttgagtagctcagactacaggcacatgctacctcacctggctaatttttgtatttttagtagagacggggtttcaccatgttggccaggatggtctcgatctcctgacctcatgatctgccagcctcggcctctgaaaagtgctgggattataggcgtgagccactgtgcctggcctcaactgttttgtttctaacttttgaaataaaaggtattgtagtgaacagccttgggcacaccttttggtgcatgtgtttagttggaatagtctggatgataggtaatagtctgggaagttaaatgaagaaactgtaggaagctctgtctaggctgtgcgagggcttcagataaactcccatagctgagtagcttaacacaagcaaagttttttcttactctcctgtggcttgatgtgggttaggtggttctcctctactttgtggctttgacttttggacacatgtcctctgtagttctcacagaaagaaaacagagctagagaattatacaggatattaagggccaggcttggaaatggccttccgttcaatacattctagaacactttatctctgacctgctacaaaggagaatggaaaagatagtcgtaatttgagctcagaaagagaaaatagtgtggtaaatgcacagcattgtttttgctgcagtgcatatgtctgcttatttccttagaataatttattcttttttgtttttttgagactgagtctcactctgttaccaggctggagtgcagtggcgtgatctcagctcactgcagactctgcctcctgggttcaagccattctcctgcctcagcctcccgagtagctgggattacaggtgcgcaccaccacacccagctaatttttgtatttttggtagagacagggtttcacaatgttggccaggatggtctcgatctcctgacctcatgatctgccagcctcggcctctgaaagtgctgagattaaaggcgtgagccactgtgcctggccagcttattaattcttaagccaaaatatgtgtctttaggatccaagttaaatttgctcagattacatttttttttttttaagatggcatctcgccctgtcacccagactggagtgcaatggcgcgatctcggctcaccacatcctctgcctcccaggttaaagcgattctcctgcctcagtcccttgagtagctggaattacaggcgtgtgccaccatgccccgttaatttttgtagttttagtagagatggggtttcactgtgttggccaggctggtcttgaactcctgacctcgtgatctgcccatcttggcctcccaaagtgctgagattataggcatgagccaccacgcccagctagattactcatttttttcaaatacttccttttggaaaaataggaattctgtttccatccatacctttgtttcactaagtacaaaaatgagtataactaatatttcattgtaagatatttacttagccaggcacagtggctcacacttgtaatcagcactttgggaggctgaggcgggtggactgcttgagcccaggaatttgagaccagcccaggcaatatagggagaccttgtctctactcctccacaaaaaaaaaaaaaaaaaaaaaattagctgggcatggtggcacatgcctgtggtctcagctacttagaatgctgaagcagtaggatcagttgaattcggaaggcggagactgcagtgagctgagattgtactgctgcactccagcctgggtgacagagcgagaccctatctcacacatacacacacacaaagatgtttacttacaagtatactcatcagataccttgagggacttttgcatgaaattaataatgtttattgaaaaaatgatttactacttacaggggtgattttcatactctttataattcttttgatacttttatagttcataagtgtggtgattggctgttcacacacacatatgagatgtaccaccctagaaccttgttacaatgttagcacattaccagtctgacatgaaaaaaaataattctttacacttaccttgatgcaaaaacattgtctatctgcactaatatcttaggaatataagtgagcaggaaaaaatatatatcttatttttaacacatcatcattaaatattttgtttatgacagtcttacttggtcactcaggctgaagtgcagtggtgccatcatagctcactgcagccttgacctcctgggctcaaacaatccctcttttctgcctcctgagtagctgggactacaggtgcatgccaccatgcccaactaatttgttaaatttttgtagagtgtatcagatttttgatgaggtctcactgtgttgcccaggctgatctcaaatgtctgactgtaagcaatcctcttgcttggcctcccaaagtgctgggattacaggtgtgagccactgtgcgcagccgttaaatattttaaaccgtcactgactttaccatagcttactatttatataaataatcctgggttaaacttgcatagtgagataatatttcccccaacttttatttatttatttgagatggagtcttgctctgtcgcccaggctggagtgcagtggcgcaatctcggctcactgcagtctccgcctcccaggttcaagcatttctcctgcctcagcctcccaagtagctgggattacaggcacacgccactgtgcccggctagtttttatatttttggtagagacagggttttgccacgttggccaggctggtcttgaactcctggtctcaggtgatccacccgcgtcggcctcccaaggtgctgggattacaggcatgagccactgcatccggcctaatttttgtatttttagtagagacggggtttcaccatgttagtgaggctggtcttgaacttctgaccttgtgatctgcccacctcggcctcccaaagtgctgggatgacagacgtgagccaccatgcttggcctcccccagcttctagttttaaaaatgttcagctggtgcagtggctcatgcctgtcatcccagcactttgggaagctgaggtgggtggatcacttcaggccaggagttcgaggccagcctggccaacatggtgaaacctcgtctctactaaaaatacaaaaattagccaggcttggtggcttgcgcccgtaatcccaactgctcgggaggcctaggtgggagaatcgcttgaacctgggagacagaggttgcagtgagctgagatcgctccactgtactccaatgtgggtgacagggtgaaactctgtctcagaaaaaaataaaaaagaaaatgtgcaaatctacagaaagattaaaaagtaccctgtagttacagaaagatttttttaaaaaataccctgtagcccttaaacaatttctaacataatgtcctgttagctttctctctttttttcgtgaatcatatgaaaatcatttgcaaacatcatgacccttcacccctaaatacttctgtatgcatccttaggaataaaggcactcttttctatagctgtaataaaagtaacatacctgagaaaatgacaagaattctacaatattatctaataatcatgccatagtcaaaatctctagtcatcctcaaaatctcctttgtagattttttttggttttccagtccaggatccaatccagttttctgccttttagtcaattactcatcaaattattttttccagcaacttactagtaataatggtaatagccttagcttttattaataacaaccacttttcttttgaaatgttaatataaaactagatttattacctacataatcttcataatcttcaagttaggtattatcactactttacctaatgagggaggttatgctcagggtacttgtccaaggcacatagtgaggtatggttgaggtttgaactcagatatatctgatcccaaagccagctgtctttttctgtgctggactgactatactaggaaacaatcaatgtgaacttagaaatgtttgacccaaaagaaaaaaaatttcactcctattcataggctaaatgaactttactaaatatggaagattcctgtagcccggaagttgggttagttaacttttgagatctctgccaaccctgaaattctgtaacccttgtttcttacatctgcctcatacatggattaccaaagatgtatatgcatataatatttaacagttttattgagataaaattcacatactatattattcacccacttaatgtatacaattttgtagttttgtgtgtgtgtgtgtgtgtgtgtatttttgagatggagtctcactctgtcacccaggctggagtgcagtggcacgatcactgcaacctctgcctcctgggttcaagtgattctgtggcctcagcctgttgagtagctgggattacaggcgcccaccaccatgcccggctgatttttgtgtttcagtagagatggggtttcaccgtgttggtcaggctgttctcgaactcctggactcaagttatctgcccaccatggcctccccaaagtgctgagattacaggcgtgagccatcgcgcccggcagttttcgtatattgatggagttgtgcaaacaccacctcattcaattttagaacatttttatcacctgaaaaagaaacgctgtatcctttagccatacttcccccttcctccctaactcccccagctctaggcaaccagggatctactgtctatttagatttgtctgtttgggtcatctcatataaatggaattacataacatgtcttttgtgtgtggcttcaatttttttatttttttgagatggagtcttgctctgtcacccaggctggagtgcagtggcatgatctcagctcactgcaacttttgcctcctgggttcaactgattctcttgcctcagcctcccaggtagctgggattacaggctcctgccaccatgcctgactaatttttgtattttttactagagtcggggtttcactatgttggccaggctgttctcaaactcctgacctcaagtgatccacctgcctcggcctcccgaagtgctgggattaaagacatgagccaccacgcccagcctgtgtgtggcttctttcacttagaataatgtttccaaggttcatctgtgttgtagcatgtatctgtatcttatttatttttattgctgaatagtattccattgtatggataaactgcattttgtttattcattgattagttgttgatggacatttgggttgtttccactttttagctatatttacattactgcttgtgttttcatttctcttggttatatactaggagcagaattgctgggtcatatggtacttctacttttaacctttgaggacctgccagactgttttctaaagtggttttaccattttacattctcatcagcatatgtgagggttctggatttctctacatcctcaccagtatttgtctttgatcatagtcatcctagtgggtatacaggggtgtctcattgtgggggtttttttccccattggggttttgatttgcatttccctgatggagataaatatattttttgtgtgtccccccacaaactgcctggttctgatgagaccagtgttcttacagagaataactttgctttgaaacaaaacaaacaaacagccttttgacttgggtaacctttggagtatgttaattgtgatttactctggccttgtaacattgtaagtggagattttgtttaaaaactgcgttcgctgaaacaagtaataaggttcagacctattgttacaagttctgagttttctttcatataaatatgtttgttcttttgtgtggataaaacctaacgtggcaaaaaggtgtcaaacacctaagtattaaggaaactaaaatgaaaatgctgcatgaacagaaaccttgtccaattttcattactatagcaccatcacctataacagtgccagtgtacagtagatattacataatatttttgaatgaatgagtggaaaatgatatgcatttttctcttctgcatcctctgaaagatttcacaacgtgcaaagtatgtaaggctttatttatatacagataaaataatcagagtttataatctatgtatttactttcctgcatagaaactccatatgattaaaaattgagattatttattttaataacatgactaatcagtttacttaacctagaaatgaatgttatctaagaacaagcaaagaatgttagaagaatttagtgtttaggaattattattgttttccatctcagtcgtatatattttctgttttagccactttggagatttgttaatgataccaaagacaaaagaatgttagtttataaatctgaagatatcaagaatgtttcacgtttgcagtctccaaaagtgtgtggttatttaaaagtggataatgaagagttgctcccaaaagggttagtagacagagaaccacctgaaggtaagacttaaagagtgtatttcaaataagaaacaaacatactacaattgacttcagtaggggtggttgttatttgttaaaaaataacatgattgtcaagtaactatagtatttggcatgaaaataagaggtttgttccagaaattttcatcttcttttgtttataatgtaagagttgaaaactctggaaaataatgggaacaacagagattagactttaaaaaagattagggaaaagggaaatggagtgatctgagggaaaatattcctgcagatatttagaaatgataaaataatatggtggaaagacaatctttagagtttataagaaattaattggtagtaggagggacctatatatatactgcttagaatacaagaaggttatatccatcttgggacaatccatttagggtcatttaaaaaacgtaaccatcttggaattttactgcccaaaacacctctggttaggttttttgttttgttttgttttgttttgtttgcagcgcgatctcggctcactgcaacctttgacttccaggttcaggtgattctcctgcctcagactcctgagtagctggattataggcatgtgccaccaggcctggctaatttttgtatttttagtggagatggggtttcaccatgttggtcaggctgttctcaaactcctggcctcaagtgatctgcccacctcagcctcccaaagtgttgggattacaggcgtgcaccaacatgcccggccaaagacggttatgttattaaaattatatattagcattttaatatataaataaagaaattcttaatttatttcacaagaaagttgtcctattaaactaattttcaatgtgaatatcttgacatttttactgttacattggttaattcataaacttcttgttgtagaatatgactgacagcttcatagcccagcattaggtgactgttttactctgttgagcactatttatttatttatttatttagagatgaagtctcacttttgtcgccctggcttgagtgcaatggcacaatcttggctcactgcaacctccgcaccctgggttgaagtgattctcctgcctcagccttacaagtagctgggattacaggcgggtgccaccatatctggctaatttttgtatttttaatagagatggggtttcatcatgttggccaggctggtctcgaactcccgtcctcaggtgattcacccaccttggcctcgcaaagtgctgggattacaggcctgagccaacatgcccggccttactctgttgagcactttttaaagtttctgtattggaaaaattaaagaggcacttgtccttggttttgaattctacagtgttttaactttatgttacttttcacttttctgtcttcctccaaattattttttgttgttgttcagaatcctttagtgatattaagctcacataatgtttgtttcaaaaatatgttagatttaaagtgttaccataaaactccttgttttggtgaattttgatttaatagtgcatacaaattcatattagagcttgttcatcgagtgaaaagaagagctgacccagatcccatgaagaacacgtgtaaattattggtggtagcagatcatcgcttctacagatacatgggcagaggggaagagagtacaactacaaattacttagtaagtatttgatattgcatcgagtaattgaaaaaaaaatttgggtgggtacattccatgaaacttaatgcaaccagatctgttccagatactctgttatttccctaaaatatttgagggatattctctgaggtttttatgttactgtatggaaattatagtttcaaatttgtgacaacccattttacccttgaactaatattttctgcatgttagaatttatgcatatagggtttgggagaggttataatgtagtccttcctccttgatataagtgagttctttaaaaacatcactgctatcatggtagtgaacctgtggtgtcacatgtgaatgtaaaaatatgtatttgcatgaacccatgtttttcttttgcttatatgtatatttcagagaggaaggcgagttttgtttgtcatgttaaagacctaatcattggacttcacttgaaataggtgggactttcatggtcataactagttctagggcacagaagtgaaggaaagatgtaagaagtgatgatactggatttttaagtatgaactattatgatttttgaagtctggggaatcatttttcattgacattttttgctagtgtgacttcattcgtcatgattacttggcactgaccaaaatgttgttactgagggaataatggagaatgcagctattcatgaagcaagaagaagctggtgcagtaaagatgtctttctcattgccttgcttttcccatgctgtccattttattcataccctcccaacttctttcccttccctttcatgtcaagtggatttttttttttttttttcaacacagagtctcactgtgtcgcccaggctggagtgcagtggcacaatctcagctcactgcaacccccacctcctgggttcaagcaattctcctgcctcagcatcacaagtagctggaattacaggcgtgaaccacagcactcggccccatatcaagtgaatttattatgaggctagtaagagtcactgtgattcttgttcctaaataagagagatttttactttaaaaagcttctctcttaatctgggttttatattaaggggctcctcttattttacttctttgttcattgcactataaatatgaatataatgagagatctagtcttaaaaattgtatttttttacaacttcttaggcataacttgtttcacagttgctagaacaaacctcatcaacccagtttttgaacagtagaatattctctttgagaaaaagataggtaattagcattttgttctttctcatgtcattttccttggaaactatactgccttccttctccagttttcccaaatcagagaacaaaagaaggagggttgctgaaatgaaccttgttctttctggctgtcttcttacccattcctcagtgctgaactttttggggtgagagtgggggaatagggttggcagttgtctgccacggccccttacttgtttctggggaagacattcgaggtactcaccaagagatagagtgaagatggaattctttttagaagggaatacagttgacccaggaacagtgcgggggtgtggttagaagcactgaccttcttccctctgcagtcgaaaatcctcacgtgactttttttttttaaggctctgtcgcccaggccggagtgcagtggtgaaatcatagcttgctgcagcctctattgcccgggccaaagcaatcttcccacctcagcctcctctagctgggacaacaggtgttcacccttcctggctaagttttttgatttttagtagagatggagaatttcccaggatggtctcaaacttctaagcttaagcaatcctcctgcctcagcctcccaaggtgctgggattacaggcatgagccactatgcccggccactgtataactttgattctccaaaaatttaactactaatagtctactgttgaccagaagccttaccaataaaataagttgattaacacatttttaaaatatgtattattactgtgttcttacaatcaagtaagctagagaaaggaaaatgttatgatgaaaatcataaaaaaaaaaaaaagcccggcatggtggtgtgtgcctgtagtcttctgttactcaggaggctgaggtgagaggattgcttgagtccagaaattcaggctgtagtgagctatgatcgtgccgctgtactgcacccctggtgacagagcaagaccttgtctcttgaaaaaaaaaaaagaaaatcataaggaagagaaaaatacatttactattcactaagtggaagtggatcatcataatggtcttcatgttgagtaggctgaggaggaagaggaagagttgatcatattgtctctggtgacagaggctcaaggaaatccatatgtaagtggacacttgaagttcaaatctgttgttcaagggtcaactgtatttcaggtatactgattgacttttaaatttaatttttattattggctgaaacggtagttttaaaaaagcctgttacttgtcattttggttccatgtgcaattgagtacctgaaatttaggttaaactataccattgttttattctggtaacagcactttaagtttggggccaaaggttgggaatactctgatacagtaacatctcaatgctagtttttgcgaaagtagaaacttttgcaatggcctctaaactgagattttttctttccccatagattttatattgcattgccaggagaggtaaagagttacataatgtcttttttcttttttaaatacacacagatagagctaattgacagagttgatgacatctatcggaacacttcatgggataatgcaggttttaaaggctatggaatacagatagagcaggtatttatcaatagatatggcttatattacttaagttttgtaatgtaaatatttgtcacttgtattcaaaacctaaaaacttgtccttaacaataattgtaaataagttttctcagatgccaatgattttttatgatgaattgtgcagtatttttgatgttaattagttctagattgtgaagttttctgtccttagtctcgctttaggtagaaagccttttatgctgctgtgctttgttccttctttgaattcatggcctttatattctctgtagttttcttcccccctccgattatgcttaagtctttagttaaaactctggcatgcaccattgaatccttagtcagaaaatttactaaaaaatactgtgtacctttgcaaggctgtatttatatatacagaacctttaggttctttcctctcagatatctccttctgatttcttgtaatctgttaacagagtgtgtctagtaatgttatattaatgtcatcttaataatagctcatattaaaagttatttcaaattgctaggactaattaaaaaggcttctgacaaagggtattgctttgggcagagagacattttgatatgtaaattatataaattgttatctctatttttttccaagctttttgtagtaaaccatatttttataagttatatagtatagaatttagaggttgaaaaaatttttaaaaatcattcaccatgtttataaatgttaaactttgatattacttgtataaaactaagagaattatttttcccttttcattctctttcactgttacgcattttctttttaagttattatttgaataggtaacatgtacacagtacaaaagccagtgaaaagtaagtctctgcagcctgtttattgtcaaaccagttcctttccccaaagacattcatgtcactagtttcatatgtatctttctagagatgtcgtatgcaggtatagtgtatgtatatgtctgtatttgacacaacggtgctatgcagtacacttttacaccttgctttttcatttcacagtatgttggagagtacttcatgttcatgcatgtaaagctgcttcacttgttttattataaatagctgcatcatgtttgagtttcagggaacctgtaaattttctttttgctttaggcatttggaaccagtcgaagaaacaggaataatataggagattaaaacattaacttctttacatctgatgaaggatggattggagggtgtggtttagatgtgtatcatggtgggcttctaagtagttctatcccagatttgaccttgaccagccaccatcaaaactgcagagtccaccccagtaaacttaccacacagtggcagaggagaccagaatgggccttctctgcaggcaggcaggcaggcaggcaggcagagagactcacagaaactctgagctgagcatggtttccttctttatctcacacttactaatgggagcctttgttacttttttttttcttctttgcaggtttaatatgaatttgtctgaaatgcctgtataaggagaagactctattcttagccttttattcctttgatgcacaaagagatgtatattttattattctttcctgagttgtcgactgtagtcgtaataaatattttaggctcctgtaacccaagttcttattttttcaaaataaacatggaggatatgaaaatttaagagtacatttataatattataaataattcattgacatatgttttccataccatatgcttctctgtttgtttcaaacattgaatattggtactgaagaatttatgaattttggttttaaaatgttttttttctagaacgattctttttttgaacagataaaataatgcagtattcagagccttctgacttattttggaagtgttctaagtatatgatctctttaagtatagattcgcattctcaagtctccacaagaggtaaaacctggtgaaaagcactacaacatggcaaaaagttacccaaatgaagaaaaggatgcttgggatgtgaagatgttgctagaggtaggtcttagaatcctggatatggtgctaacaccactttgtcatttctgatatgtggattgtatgtgttttaatgaaggagcatgttagaaaagatggacacccagaagcagtctcctccagctgatccagcagtaaccccatcccatgtagcagcatagacaacaaataacaaaaactctatgaaaaagaaaaacgctataaagcaatgcttccttttttttttttttttttttttgagacagagtttcactcttgttgccctggctggagggcaatggcgtgatcttggctcaccgcaacctccatctcccaggttcaagagattctcctgcctcagcctcccaagtagctaggattataggcatgcaccaccacggccggctaatttttgtatttttagtagagacagggtttctccatgttggtcaggctggtcttgaactcccgacctcagatgatccgtctgcctcggcctcccaaagtgctgggattacaagtgtgagccaccatgcccggccaaagcagtgcgtcttaaccttaatatctttgaggatctaatgagacaatcagtggatcttctctagaaaataacatggatacccaatatatagagtttttgcacactgtttcattagttctgcacacttagttcagctctctctgaagcttatcaatttatcttttagggcagtaattatcaaacaggttatgaacatgtattggagagtagaaatatagcttggagatctgaaagttctctacaggaatttaaaatttttgtgtttttattctggcgattaatctaaagatggctaacttaatcattttatgtcatttggagtcttgccgtataacagggtgctgccatgtgattccagtgtcttgagtttgtgtgtgctattactttggtgtagaatgactttatatgaagcgatagtttttatcttttaatgtgttggcaagtttattagtttcttgttgttgctttaattatcacaagtggagcagcttagaacaacacttatttatcccatagtttgcatgggctagtccaggtatggtgtggctcatctggattcttgtttagggtctcatgaggctgaaatcaagttttcaaagcttcaatagaattaaaggatattataactattcatccagatggagaagcataatgtgcagcacctgtgtggtactcattcataccttgtctaatttgatctgctgagcaccctgagaggttggttgagacagcatccttgtgaggaggctcagcaagtgttactgtttattccagctgacatgacaaagcagcataggctgggggacttaaacaacagaagtttgggttttcacagttctggaagctggaagtccaaaatcaaggggtcagcagggttgatttcttctgaggccaaggtacttgtggtgtagatgctgtcttctccctgtgttctcacatggtccttccctcagtgtgtgtgtatattctgatctccttatcaggacaccagccatattggattaaggcccacccatatgacctcagtgtaccttaattacctccttaagggccctgtttccagatagagtcacattctggggtactgttgagggttaggacttcaacatttgaattgtggggtggcacaattcagccagtagcaggaagattaaatgacttgtctgattagtcatacaactggtgatggcagaggttgaattgagcacagatctcctgactcctagaacagctgaaccactgcgcctgtctgcttttctgtgagcctccagacagcccatggcaggggaggaaccaaagagaaaaatgacttatgttgacagatggtcctctccagttttcttccctaagcctcctagaatattcttagaagcctcatccttttaccacggaactatcagaatccccatgtaaccacacttcattcctcatatagggctctctggcctctcatttaaagcattttaaacattgagggttttggctaggcatggtggttcatgcctgtaatcccagcactttgggaggctgaggatgaggcagtggattgtttgagcccaggagttcaaggctagcttgggcaacatgttgtacaaaaaatacaaaaattagccgggcatggtgaggcacgcctttggtaccagcttcttgggaggctgaggtgggaggttcacttgagcctgggaggtcgaggctgcagtgagctgtgattgcgtcactgcattccagcctaggtgacacagcgagaccctgtctcaagcaaaataaatcaaaccccccccccaaattaaggtttttttaaacttggagacgctggacggttatggtagaggtttttaaagtaatgtatgaagcccttttaaattaagaaaaaaaaaatcctctcaaacctgcagtgttgatttaaatggatgtaaaatctttattttagtaacataaaactgggtatgtatgcttttctataagtgtatatttatataaatgacaatatattatgaagctcaaaaaagtttaagattaaaatttctataaaaccaattgaatccttgaaatacttgagagggatctgttttggcctggagtgctgcaatccccttatcgaattggagcatctctagtcctgggctgtatgtcttcagaacagccctcggaggagcagtgagttagttctgaagagctggagcaagctcccgaactattcccttttgtgtcccttgtcagatgacagtgtgtgcctctcacctgtgcaggtggagaagcactttagggaaagagcaaagcactgcacgaggttgtgattgctggtgctgagctgcatgccatcatagttctgttctggaatgtttagttgatttagattacatcttttagtctgatgtaattgttaatctaagaatgcttttttttttttttttttttttggtctttcaaagcaatttagctttgatatagctgaggaagcatctaaagtttgcttggcacaccttttcacataccaagattttgatatgggaactcttggattagcttatgttggctctcccagagcaaacagccatggaggtgtttgtccaaagggtaagtttttccatttcttgtgtgaatatgctgctgggattattaagatgattggattatattataattctgtatttaataagcaatttatctctgtttccttttgactttagcttattatagcccagttgggaagaaaaatatctatttgaatagtggtttgacgagcacaaagaattatggtaaaaccatccttacaaaggtatgttcttttatttctaaaagaatagtgttagagtttattgtagtagaacctcagttatatatttatgtaggtatttttttaaaaaatgtaatatatactgttttttaaatttctgcctaaataaaatttatgtatttttgtgggatatatgaaaattaaagcataaagaagaaaataaaaatggcctgtcagccttcttttgaaacatgtgaggaccactgcttttctcgaaccctctgtcctggacccctctgacctgcagcaactcttagagctccctgtctcctagtcctgcagtgcagctgtcattcaaggcatcccacaccctcttattttcagaaccccatggtctccctctttctcagtgccatcattttggtgtagtgtatcttgcaggagcttcctaagaaaacgtagatgacctgcatattgttgggatttcatatatctgaaaatgtctttattccactcttaagcctgattgataattttggctgagtatattcttagttctcatgttctctatggtcttctgtgcatgttgcttctaaagaatctgaagtcattttgagttcttatctttgtttgtcacctgtttttttctctggaatatcttaagatcttgtttttctccagctatgtctgttaaaatgtgtttgactacaaataacagaaaattaaataagcagtggtttaaataaggggtttatttgtctcagtcaacaagaagttcagggatagcattttctgggtggtacagcaactcagaggtaccctcagtggctcaagaacaagcaggaagtctttgtcctcatggatgtcacctcatggttttaagatggttctcttctgtgttggagaaaggaggagaaagagaacatggctagcctagtctggcccttctaaaaagcttctctggaggccccatcctggcttttgtttatatgttactggacagcactgggtcccgtggctgcccttagcctcaacggaatgtggaaagctggctattttagctgagtatattgctgtcctgggcaaaattagggctcattaagtaaggaagaaggggagagagatgttggtaggacatattagtatctgatatactgatttttaatttttatttaatttttattttttttgagacagagtcttgctctgtggcccagtctggagggcagtggcaccatcttggctcactgtaacctctgccttctgggttcaagcagttctcctgcttcaacctcctgagtagttgggattacaagcacctgtcaccacgcctggctaatttttgtatttttgttttagagacagggtttcaccatgttggccaggctggtctcatgaacccctgacctcaagtgatccactcaccttggcttcctaaagggctggttggtatactgattttttgactatgatgttatacttggtgtagggtatgggaaaacatttgcaaaagacacatctgagaaaagactgctatctgaaatatacaaagaggccgggcatggtggctcattcctataatcttcggcactttgggaggccgaggcaggagaatcacttgagcccaggagtttgaaactaacctgggcaagatggtcagaccctgtctctacaaaattaaaaataaataaataaataaaaatttccatatgtataaagaactgttaaaattcaacaataagaaaatgaacaacctaatttaaaaacagacaaaagagcagaacagatacctccaaagatatacagatagcagagaagcatatgaaaagatgctcagcgtcatatgtcattaggaaattgcaaattaacaatgaagctggttgtaggggtacatgcctgtagtcccagttgcttgggaggctgaggtgggaggattgctcgagcccaggagtttgagacccatcctgggcaacattagtgagatcctatttctataaaaaactttaagaaacccaacaacaatgtgctattactagtagcttattagaatggctaaaatcccaaacactggcaacacaattccaacaaggctatggagcaacaggaactctcattaattgctagtgggaatgcaaaaatggaacagccactttggaaggcagttggcagtttcttttctttttcttttttcttttttttttttttttggagacggagtttcactcttgtcacccaggctggagtgcaatggcgccatctcggctcactgcaacctctgcctcccaggtttaagcaattctgcctcagtctcctgagtagctgggattacaggtgcccgctgccactcccagctaatttttgtatttttagtagagatggggtttcaccatgttgtccaggctggtctcgaactcctgacctcaggtgatccgcctgcttcagcctcccaaagtgctgggattacgggtgtgagccactacgcccagccataagaatgtttatggcagcttaattcataattgataaaacttggaagcaaccaagatatcctttagttggtaaatggataaactggcacatccataaaatgagaaaaaaataaaaagctattaagccatgaaaagacatagaggaaccttaaaagcatactactaagtaaaataagccagtctgaaaggctacatactatatgattccaaatatatgacattctagaaaagacaaaaccatgcagactataaaatgatcagtgattgctagatgctgggggagggagggatgaataggtggagagcagggtaattactctgtatgatacttcaacagtcagtataagacattatgcatttgttgaaacacatagaatatacagcacaaagagtggaccctaacataaactgtggactttgggtgatttaaaaacaggtggtggcaggagcctatagtcccagctacgcgggaggatcacttgaggccaagagttagaggctgtagtgtgataaatgcaactgtgaatacccgctacattccagcctgagcaacttagcgagatcctccttttcttttttgagatggagtctcgctgtgtctcccatgctggagtgcaatggcatgatcttggctcactgcaagctctgtctcctgggttcatgccattctcttgcctcagcctcccaagtagctgggactacaggcacccccaccaccacgcccggctaattttttgtatttttagtagagacggggtttcactgtgttagccaggatggtctcaatctcctgaccttgtgatctgcccgccttggcctcccaaagtgttggaattacaggcgtgagccaccgtgcctggcctgagaccctgtctctttttatttatatatatatatatatatatatatatatatatatatatatatatatatatttatattttaaatttaagttctaggatacatgtgcacaacgtgcaggtttgttacatatgtatacatgtgccatgttggtgtgctgcacccattaactcgtcatttacattaggtatatctcctaatgctatcccttcccccttccccctccccccaccccacgacaggcaccggtgtgtgatgttccccttcctgtgtccaagtgttctcattgttcaattcccacctttgagtgagaacatgcggtgtttggcttttgtccttgcgatagtttgctgagaatgatggtttccagcttcatccatgtccctacgaaggacatgaactcatccttttttatggctgcatagtattccatggtgtatatgtgccacattttcttaatccagtctatcattgttggacaatgttgaacaataatgtagagtggtatgagaaaagaaaaagacactaattagcttttgggaatcttttaatttctttttttcttttcttttttttttttttgagatggagttttctcttgttgcccaggctggagtgcaatggtgtgatcttggctcactgcaacctccgcctcccggattcaagcaattctcctgcctctttctcctgagcagctgggattacaggcatgcgccatcacgaccagctaattttgtatttttagtagagatggggtttcttcatgttggtcaggctggctctcaggtgatccgtctgcctcggcctcccaaactgctggattacaggcgtgagccaccgtgcttggccttaatttctaaatttatttttttcttatggtactttgttttaggggaaaaaatctctcaaactgtgttttccctctattctcacatcacaaccatcatcatcaacacagaagacttgtgtgaccagaccaaacgtgtggggatttccccctacatatcaagcagtagacatcagctaggtgtcctccaattcaattcaaacactctccacccggaaatagtatcagatctcacagtttgagggcccagtcccacaagactgactgttccctcctccccaccagttacaagtctgagcctccagaacttctgaccaactggcttcaagttggggtttccacattctcctctttgggtctgattaatttgcttaagtggctcacagaactcagggaaaagcttaacttagtttatgggtttattacataggatattttaaaggatacaaagaagctgggtgcggtggctcacgcctgtaatcccagcactttgggaggccgaggtgggtagatacctgaggtcaggagtttgagaccagcctgaccaacatggtgaaacctcgtctctactaaaaatacaaaaattagccaggtgtggtggtgcatgcctataatctcagccactcgggaggctgaggcaggagaagtgcttgaacctgggaggcagagattgcagtgagctgagattgcgccactgtactggtcaacagagggagtctttgtctcaaaaaataaaaaaaaaagaaaggatacaaagaaatagccaaatgaagggatacatagggcgaggtctggaagggtcccgagtacaggagcttctgtccccatggagttgggatgtacctccctcctggcacacgaatgagttttgcaccttcctgtcaacctccatgtattcaaaatgctctctggaagctctctgaatcctgttttttgagattttatggaggcttcattacataagcacgaatgacaactgtgtagaaatgtgattggacaaaatgggtatgttctcatactaaccgactgagtggggaagcccaccaaggcctgtccagattctccttgacctctctgtgcagcattcctccctccacagtaaagggcaggaccctctctagaatgagaatgagaatgaggatctctggacccacaatcagattagagtcttgccttggatcaggtaaaaggaggacaggagaaggtcagagagagagattctgtttcctgaggattgctcctgagccctaaagcaccccaacattataacagaagaccgtaaccagggctacggagggttgtaagccaggagccatggacagaaacatacatgtgtgtacagtagctcacgcttttacttttttggagtcacaacttcttaatggcttgatttcatgacatattttctttggtcttccagaactttcctcttaaaaaaacacagcaaaaaaacaaaatttgatttgaaatttttgagatttttttttaagagtcattagcaaatccactaatgaattttccccaagcagttaggagatatttctcttcattacacctttgggatttgagtgcttttgctaaaaatttaagttttttttcccactacggttttaatatgaacatgtggaaagacttcttgtatagaaaaatgacttgcaaaatattattttttcaggttctatggagtgatttcccccccttaggaaaaaagaactcaggaattttaagtttatatgtatatatatttattttattttattttatttatttattttaagacagactctcactcttttgcccaggctgggggttcagtggcctatctcggctcacagcaacctccgcctcctgggttcaagcaattcttctggctcagcctcccaaatagctgcgattacaggcgcccaccacaatgcctggctaggttttatatttttagtagagacagggtttcaccatgttggccagtctggtctggaactcctgacctcaagtgatccagctgccttggcctcccaaagtgctggaattccaggcgtgagccactgtgcctggcctttaagtttgatattttattcagataaatatggaaaaaaaattttagctttattggcaaaatttattattcatatagaaatcatctgataatctgatagattaagtacagccctgcaactggattctaataaaccaagtcctctaggtcattaagattgttattggacatgaattcagtcattgagaaaataaaacattgttttgttgttcctcagttgtggtttttgttttttttttaagatagagtttcactcttgttgcctaggctggagtgcaatggcatgatctcagctcactgcaacctccgcctcctgggttcaagtgattttcctgtctcagcctcccgagtagccgggattacaggcgtgcgccaccacacccagctaattttttgtatttttagtagagatggggttttactatgttggccaggctggtctcgaactcctgacctcaggcgatcaacccaccttggcctcccaaagtgctgggattacaggtgtgagccactgcgcctatccgtactgttttttttaccccttgctttttttttcctttctgctgagatgctttaggttttaacagacatgtgattgggccgaggggcatgtgaggaggctggacaattaactacagttagcttattgcatttatcagcaccagattgtgtgtggttgaaatggccaaggtttgatgttttgttatgaatgttccagtatatcttataaattacattttcttaaattgatttgttactacttacaataatgtttgatagtattaaataaaatcctacttattctgttaaattcatataattggtagaagaatcatagtccggttattactcttttttgagacaaagtcttactctgtcacccaggctggagtgcagtggtgtgatcatagatcactgtagcctcagcctcctgggttcaggtgatactctcacctcagcctcccaagtagctgggaccacaggtgtgcaccaccatgcctggctaatttttttttttttttttttgagacgaagtctcgccctgtctcccaggctggagtgcaatggcgtgatctcagctcactgcaacctccgccccctgggttcaagcagttctcctgcctcagcctcccgagtagttgagattacaggcgcgtgcctccatgcccagctaatttttgtatttttagtagagacagggtttcaccatgttggccaggctggtctcgaactcctgacctcgtgatccacctgcctcagcctcccaaagtgctgggattacaggcgtgagccaccatgcctagcccacctggttaatattttttattatttttgtagagatagggtctccctgtgttacccaggctggcctcaaactcctagagtaaagtaatcctcccatctcagcctcctaaagtgctggtattataagcatgcagttcttattctcttgttgatctgattataaggctctatttaagacagcataggcccaactggcagaagtaggtgatggctggatattgagaaataatgttttctttgcatgatccttaaggaagctgacctggttacaactcatgaattgggacataattttggagcagaacatgatccggatggtctagcagaatgtgccccgaatgaggaccagggagggaaatatgtcatgtatcccatagctgtgagtggcgatcacgagaacaataaggtatgtgtgtgtcgagaattttttatgtggtttggaaagaggctgtgtataatgatcataatgagagctcagaaacgtattccattcctaggcgtttccctagggatggatgtgcaaattacaaagtaccttgaaacgtggttgtgtgttttggggtgaagcacggttcatctaaatctggttaaaactatcatttggactttgttgtcaagcttaatggtgtagatttgagctctaggaaaaattactaataataatggctttttttggagttctggatttcagggtctggtgggctcaggctttatgttaaaaatttgtcatttcatttacaagttgtcattcattttaactctacaatttacatgtacagtttacacgtttttattaacttttgcagttaaacacatagtttgcctgactacaagcctcatgggagaaaggcccttccttgtctgtcttattcatagctctatcttattcatagctctatctccagtgcctagtaggagtatctggcatgtaacaaatatttgttgaataattaatggaatcatttactattgggggtttctgatagagaatactagttgatttgtgatactgtaaaacactttcagagactttaagagtgccgtgactaactcttagagtctgaactaaaagttgtgttaataaatatctggttctttcattttatttgaagttaaacagcataaagcagtgtgaggaaaacaatagttgcactgctgagttaaagagggtcggtggggagagcttaaaggagtctgattctaatcacaaaagattgtgaagtatttgtcctgactcctattttgagcttggctgtgggctaatgtgcaagccttccctggacacagagggcaagattacttctgcttttccctggctctgacaccctgctttctgaaatttctgcctcctgttctttttgtgatctttgattgttgcatctcatttttttttggctttttatgtatattttctgcatctcattttctttggctgttatgtgtaaacagttcctctgttactttgcatgttatgttttatttttcctctgcttgacaacttgtgccagagaaacatttttctacccctttttgtctactcttccaacctgtcaaactgttgaattttccttctcttttcatagtctctgcatttctaatcatgttcactatagttcagtgctgcccaatagaactttctgctgcggggcgggggatgttttgtgtctgctctgcccagtatagtagccactagcccagtggagcaattgaaatgtggctagaaactgaggaactgaattgtaaattctattttatttaaatttttaataatgtttgcctgtgatgggagacgggaatgggcattaactgtaaaaggacatgagtgagattactggaaggatggaaatgtcctaaaattgacttatagcaatggtttcaacacttggtaaagttattagaaatcactgagttatatacttgaaatggatcaattttgtgatatgtgaaatatgtcttaataaagttgttaataagccaacaaacaaaaacagcagtgtgggagcagaggaaaagtagcgcggatgtagaggagctgtgaagtcataagttgattattgttgaagctggtgaggggcacgggggcattcatgataccatcctgtctacttcatagatgcttgaatatttctgtaatagaaactgtaaaatatgtgactaggaacaaaatttaagtagccacatatggttggtggctaccatattgcatactgtttctctaagtaataggtcatatgcttcttggttatgaggatagtgtcagaacttgggagcaaaatgttttactttgcagactgcctgggtggacatgcatgctgctgactcttcctgctgccagttctggggctcttcaaaacagccctgtaagaacttgccagtgaggcatggtggctcacacctgtaatcccagcactttgagaggccgaggtgggcagatcacttgagcctaggagttcaggatcagcctggacaacatgtgaaactccatctctacagaaaatacaaaaattagctgggcatagaagcacatgcttgtagtcccagctactcaggaggctaaggtaggaggaacccggggagttcaaggcggcagtgagccaaggttgtgctactacactccagcctggatgacagagtgagactttatctcaaaaaaaggaaaaagaaaaaaaagaacttgctaatgagaatggggcctgggaagaactttttttttctggagctgccagtctgtatcaatgaagaacaatttatttattttgtcctgagcacatcatatttagtctgtgtttttctagtttggttgcccaagtaggagtccccttgtaagaagataatgtgcatcttctatgttttatttatttattattatttattatgattttttgagtggagtctcactctgtcgcccaggctggagtgcagtggtgtgatctctgctcactgcaacctccacctcccaggttcaagcgattctcctgccttagcctcctgagtagctggggttacaggtgcatgccaccacacctggccaatttttgtagttttagtaggatggggtttcaccatgttggccaggttggtcaactgactggtcaacaaactcctgacctcaggtgatccacctgcctcgacctctcaaagtgctgggattacaggcatgagctgctgtgcccagcctatgttttaaatgaattccttaataaaaatatttttaactgatgaaaagggcttacaggacaaaaataaagtagttccttgacctagaaagacagaacccatcaccctctactaggcaagcctatgaagagcagtttgccacaggtggacttctctgtggacagatgacattagtgaaaaggaatgtaggacctttgagattgtaacttcttaggaaggtttgctgaacggaagaggaagtcttatgacaaggatgcaaacagaagctgccagatcttcagggatgtgtaggcagaaagccagagttgcgggttggtccttttatcgttagtgctctccagctgcttgggagttgtaactctgacaaatcagtgaagaggtcttcttatctgttcactgtgaattttaactccattttaacctgataaaatggaacccagagatacatgatgttgatgaataaacccaccaaaatgacaactgcctgaggccccgattagaataaccagaccccttagacatctgtactgtaacgacagatttgggccgggcgcggtggctcacgcctgtaatcccagcactttggagaccgaggtgggcagatcatgaggtcaagagatcgagaccatcctggtcaacatggtgaaaccctgtttctacaaaaaatacaaaaattagctgggcgtggtggcatgcacctgtagtcctagctactcaggaggctgaggcagaagaatcacttgaacccgggaggcggaggttacaataagccaagattgtgcctctgtagtccagcctggtgacagagcaagactccatctaaaaaaaaaaaaaaaaaaaaaaaaaaacagatttgaagatgttttttaaaaagccagttagtatttctgtgtaagatgaggtctttgctatctttctgaaagtagctcctttggtgtctgatttggtggttacaggcacctttggagggtctcatacacttggctctcaggggcttcatgattgttgtctggggtgaaagtgaagccattttggcatctgcagagcactttggagaccccgacctaagaagtaactatgctcagttttccctaagcctcttctttttttgataacttcaggaggtctggaaaatgaccgcagttttagagctcctgataaaaccctcagccttaaaagggagttatcctagtggttctgtactccagggtgggaaggtagtgtagagactttttgagacactggtcttgctggttgatgaaaatgtttaggtaacaattggggatttaatttatataaaatgtactattatgcctattactaagctcaaatatttaaacaactttaaacttggatcatccatataagtagccaaagaaggagaagaaaccccttctcctgcatttctgaattgttttgtctgggacaacattaacctacagaggttcttaattcttgtcactgcatgagtggcatgcctgaggtgaggagatttcaagtctgatggagctacgagctctctgttgtgctattctgcttgtccttaagtgggctttgactgggatgtttggtctcagtatttgtatagcttgcttaccttcgtaagaagaattatagatccttaaccaagttcacatcagccatttagcattctatggagggaggttcccagttccatatcagtggcctttggaggagactgtggtggccttgccataactccagggtggctctgatggtggttttacattaagagtttgtctctagagaagacacaaacattgcatgggaatacatttttatgatattattttgggtccttattgccttttttctctcaagatgttttcaaactgcagtaaacaatcaatctataagaccattgaaagtaaggcccaggagtgttttcaagaacgcagcaataaagtttgtgggaactcgagggtggatgaaggagaagagtgtgatcctggcatcatgtatctgaacaacgacacctgctgcaacagcgactgcacgttgaaggaaggtgtccagtgcaggtgaggagtctctccacagggattttgggaagttggtataacaagatgtccaaaataagagaagactgaacttgcaggggctttagaatcaactgaaaggggtgtgagtgtgtttgtttacatctacctcttttgcccttcacagcaagaaattgctttctgggcctggcacggtggctcactcctgtcatcccagcactctgggaggctgaggtgggagaaatgcttgagaacagcctgggcaacatagtgagacactatctcttaaaaaacaaaaaacaaataagaaaagaagaagctttctggaaagcagtgtgacattatgtaacaaaatccttgaccttgcatgctccttggtttagcagtcctatagttaaaagaatcttttttttttttttttttcctgagacagagtcttgctctgtcgccaggctggagtgcagtggcgcgatcttggcttactgcaatctttgtctcccgggttcaagtgattcccctgccttagcctcctgagtagtgggactacaggcacgcaccaccatgcccggctaattttttgtattagtagagacgaggtttcactacggtggccaggatggtctccaactcctgaccttgtgatccatccaccttggcctcccaaagtgctgggattacaggtgtgaggcaccgtgcctggcaaaataatcttttttatttaatttaatttatttatttattttgagacggcgtctcgctctgttgccaggctggagtgcagtggcgcgatctcagcgcactgcaatctccgcctcccaggttcaagcgattcccctgcctcagcctccccaataactgggactacaggtacgcaccatcacgcctggctgattttttgtattttagtagagacggagttttagcatgttggccaggatggtctcgatctcctgacttcatgatctgcccaccttggcctcccaaagtgctgggattacagaggggagccaccgtgcctggcctttattttctttttgagacagggtctcagtctgttgcccaagatggagtgcagtggcatgatcatggctcactgcagcctcaacctcccaggctcaatcagtccttccacctcagcctcccggatagacaggactacaggtgtgtgccacctggctaattttttttgtattttttatagagatggggttttgccatgttgcccaagcttgttgtaaagtcctgggctcaagtgatccacccttctaagcctcctaaagtgtggagattctaggtatgaggcaccatgcctggcccaaataatcttttatttctttttttttttttttgagacggagtcttgctctgtcgcccaggctggagtgcagtggcgtgatcttggctcactgcaacctccgcctcctgggttcaagccattcccctgcctcagcctccccagtagctgggattacagtgtgcaccaccacgcccagctaatttttgtgtttttagtagagatggggtttcaccatgttggccaggctggtctcgaactcctgacttcgtgatctgcctgcctcagcctcccaaagtgttgggattacaggcgtgagccactgctcctggctgcccaaagaatcttttgggcaacagagataagatttaacaagggtataagatttaacaaggtttttttatggctacatcctaatagcaaaattttggaaacaatcaaaatgacagtcttgggatatgaatgttatcatgattctatatactggaatagtgtggaggaagtaggttacaagttagaaagttacccaggttttcattttttatatacactgatagaccagtgcctggcttagaagtaaaagggttaaacttcagttttctggtgaataattgagatttaactggatacagtgcatattaacgctgtaaatactgatggggagtagagttctggctgccgagtgtcttagctatggattgccttgtggccccaccttgtcttttttttttttccttgtctttttttttttttttgagagagtctcgccctgttgaccaggctggagtgcagtggcgcgatcttggctcaccgcaacctctgccttccaggttcaagctattctcctgccttagcctcccgagtagctgggattacaggcatgtagcaccatgcccggctaattttttgtatctttagtagagacggagtttcaccatgttggccaggctggtctcaaacccctaacctcgtggtccacctgcctcatcttttttttttttttttttttttttgagacagaatttctctcttgttgcctaggctggagtgcagtggtgcgatctcggctcactgcaacctctgtctccggggtccaggcgattctcctgcctcagccttctaagtagctgggattacaggagcgcaccaccacgcccagctaatttttgtatttttagtagagatggggtttcaccatgttggccaggctcatctcgaactctcctgacctcaggtgatccacccacctcggcctcccaaagtgttgggttgggattataggtgtgagccacctcgcccagcccatcttgtcttttttaaattaatgcgttaaatgaatgaaaaccaagggcaccaagatgtttcacaggtgattgctgtgttcccattcttttctcctatagtgtggcatttatgtgacctcacgcacattaggaagggacaaagtgtgtgcaggtagctctagcagcggagatgtctgatgatgtaggagtgggtgacggagccaggaggtcttccccggtgatcttcaggtcactgtaacgtaactgtagcgtttgatttgatatggggccataatttgaattgctctgttcctgtctgctgttcttctccagtgacaggaacagtccttgctgtaaaaactgtcagtttgagactgcccagaagaagtgccaggaggcgattaatgctacttgcaaaggcgtgtcctactgcacaggttcgtgttcttgttgcttccttggaatgctgtgggtcaagtgtgtgtgtgtctttgaaaaacaagattatgttttgttcagatgagagacaccttatttttaatctcatatgccgggttgagtttctggcactccttagtttgtgacacttggctttggtgggtttaagacctgtttctatttctctttcatttccatcactctcctctttctcctcacagacatccactctactgtggttaatatttgcctggatatgtgtatatccttgaaagatcatatagtgttattttgtgcatgtatgtgtttttaatgtgccaaaatgatattctaccttaaatttacttttaaaaaattcagtatcatgttttaaagaattacccatattgtgctacagataatataacaaggtttttaatggctacatcctaatagcaaaattttggaaacaatcaaaatgacaatcttgggataatgaatgttatcatgaatctatgcactggaatagtgtggaggaagcaggatacaagttagaagggtaaccagtttttctatatgtatctatatgtatttcactgttggggacacctacatattgtttagttatatgattggctgtgttttacttacaagtcaccaagtggtagctacttccattgccttcatccccttgatattccagataggacacagatcacatcctcctacgtcccttcaggaacctgtgtgtttctctgggtactgaggagtgtcattgtgtagtcacagaggcaggatgtgctggtctctagagcaccactgctaggttgcctgtgtctgaggactccttatcctgacgttctggccaacgcttggaattaccctgctgtcctattagcatgatgagtataaagtaatctcttgttcttacttttttttttaacagcccttgtcctaatgcacttacttacatttttcttgagcatctctttatatttttcagctattcagatttctcctgtgaatagccagttcatatatttggttcattttttaaaaattgggtttcatgttatttcactactgtgaatttggaggagttcttatgtaatcatccatttgggcatacgtctcctatctgttgccattctcagaacagaaatctttaacgtaatcaaatccatcattttgttgtgtgtgtgtattttttaaacacatggttcagaaaagccatggcggatggttaaaaagatattttccacagctgcttctattagcttcataagttgtccttttacattcaggacttgaatctttctggagctaacctttccaggtgtccagtatcttttgttcggtcaattgttgctttaaaaatttcaaagctatgttattactaggtatataaacggacatatctctacatctttatctgctgttccttaccagtatataatgttccttttttacccttgcgatgttttttgacttaaattgtcaaaaagcaatattcagtttgctattctagtttttttgttcctctgatatatctatctgtcccattcttatatttttcaaaatttgtctctcttggttggttggtttgattttgtaatagctttattgatacataattcacactcatgtagtttgcccatttaaagtgtacagtttaatgatttttagtatattcagatttatgcagtcatcacaattaattttagaacatttacattactccagaaagaaaccctgtatcctttagctatgatcctccaatccccccattccccacaactcagagcaaccactaaccaccctattctttatggagttgtctgttttgaacatttcatataaatggaattatacaatatggtttcgtgaccacatattgtatgactggcttctttcactgaacatagcatttttaaggttcatgtatgttgtagcatgtatcagtacttcatgtacttttattgctgggtaaattccattgcatggatatgccacattttgtttattcattcattggttgatagacatttgggttgcttccacttttttgctataacaaataatgctgctgtgaacatttatctatgagtttttgtgtggacagttcctttggatattattcaggaatagaatttctgggtcatgtggtaactatgcttaatcttttgaggagctgtcagactgttttccaaaatggctacaccattttacagtctcagcagcattgtatgagggtcccagcttctccatatcctcaccaacacttgttatcttttttattgtaactatcctaggttttgtgataaggatgcaaacagaaagctggaggtcttcagggacctagtgaatgaagttgtgtcctattttggcttgattttggttttccgtgtgcatagtatgacatgttgcccatgtttttatcttttgggatctgtcactatcacattactttgccaaatgttaggaacctgatggcccggcacagtggctcacacctgtaatcctagcactttgggaggccgaggtgggcagatcacgagatcaggagatcgagaccatcctggctaacacggtgaaaccctgtgtctactaaaagatacaaaaaattagctgggcgtggtggcgggcgcctgtagtcccagctacttgggaggctgaggcaggagaatggcgtgaacccgggaggcggagcttgcagtgagccgagatcacgccactgcactccagcctgggcaacagagcaagactccatctcaaaaaaaaaccaaaaaaacaaatgttaggaacctgaatatctaaatcaagctttaaagaagcatttgctagctatgctcaatgtttcatcttcactgtaataataaaatagattgagaaaaatgctttcttttaaataaacgtaagtaaaacaatttgaaaacgtttgttcttatcaaacagccttttgttcccttgatattttatacaaaatagtagatagcagaggataagttcctgataaggaatcagtattttctagcaggaaaagctagagaacaacaacctcaaaaaaaaaaaaaaaaaagaagaagaaagaaaaaaagcaattagcatttcacaaccagcagcagcagcatcacctgggagcttattagaaatggaaattgtcagtcccctccctggatctactgcatcaaaaaatgtgggaagggaggccagcagtctgtgctgtgtaaccttctgtcaggtgatttccatgcatgctaaactttggggaccatgctagatagatgataccattttcagaattattttcctacctgtctaatactctgactttagtcttttaagaacagatgctcaacagatatttattgagcattttttaatgtatcagggcagtatcatataccaaaaatacaataatgatccacaatataaaccttccctgagctcactggacatcatactttcagtaatagtttgttaaatgactgttgacatgatgaatgcccagtgctcatgaaaggttttatgagaaccagaggcaaagtgcctggttatctgttgggtacttaataaaccatcacttttgtttgaaactggccagattttctgtacattttgtgttactgctctgaaaccctctaagtcagaattcttttgattggcttcattcttcagctgaaaggccagtccagagctgtggatatatagtccattgctttcataaagtgttttttttctcctcctctatttgtgttgacttttagctacttgtgctattcattttccagaatgattcactcattccatcctgtctctcccagtttaactttctttggtgggttttctttggcattattggcctgggcacagtggctcatgcctatcattccagcacttggaaggccaaggtgggaggatcccttgagcccagcagttttacaccagcatggtcaacacagggagatctcgtctctcaaaaaaaaagaaagaaaattagccaggtatggtggcgtacgcctgaaatcctaggtacttgtgaggctgaggcaggaggattgccggaacctaggagtttgaggctgcagtaagctatgatcacacccctgccttccagcctgggtgacagactgagaccctgtctcaaaagaaaaataaaaagaataattgatttatttaagaaatatttgtagtatacctataatatgatagggattggagataacttaatagatttgatcattgctgtcatggggctttccagtctagtagagggaaaacagaaaataacattaaatatatatatataaattgcaaaacatatgcaatgaaggagagaaggagtgtgatagtgcataatggaagtgggaggccacatcaacttagcatcctcagggatatctcagaaaacctttgagacaaaacttaatccataagaaaagccagctaattgccccaaaagagtggaaacaccagcattccaggtagaaggaatagtatctgttaatattgaaggaactgaatggaggttgtcatagccaaagcagtgggctgtgggagagttgtgtgcgatgaagtcagggccagatagggaaggccgtggagttcttttaagccttcatacaaagtttgcaatttattctaagtaatagcacataggatattcttttatatatgactgtgagatgcagaagtggagaccatgcattctaactggggcttgggaggccagggactcatgcagcctagcctggcacatagccaggcactcccatttaaatgctgattgctggtgagatgcaggctcttgtcctagctctgtaggtcactttttgcttttgcaaggtaagatgctcacttgtatgagaaacagcgtattatgcacctgtagaactggtggacctgtgactcattctttttgttatgactggtgtttgcttccaggtaatagcagtgagtgcccgcctccaggaaatgctgaagatgacactgtttgcttggatcttggcaagtgtaaggatgggaaatgcatccctttctgcgagagggaacagcagctggagtcctgtgcatgtaatggtgagcagttttattcccagtccagcagcaggagaaaacatggcctttgtctgccaggctcccttcctccatttggaggttgtgcgaatgacagcagtggtgagatccaagccgaggatgaggggatggggaagggcagggtggtgtctggagacaggcatctctgcatgcagatccaccatacctgggagacctatcctgttggtgtttcttcttgctgcagtttcaggccatatggcaggctttgaggtgggagaggagggaattttgttgggggtgagtgggtgggtaggtagaggtgtgtcctagccttcctctgctccatatcatacaaaccacaaaagcagcagtagctatctacattacattggcatggaactaggatactcctgcaacaactccaccagagagagctgattccaggacctaaccccactagatgaggatttttgcagttatcaagaaggctgggtctgctcccctctgatctcttagagcagcctggggcaggagcctctctcctgctggcctgtcagttttccttaggtttctgtgctattttggaacccctgggtttgagggcatcctcatggactggtcagggactggctggactctgcttcccaccccacttaaaccatgggagtcgatgagggagttctcttgctttcaaaatagacagagagccaggtgtggtgactcacacctgtaatcccatcactttgggaggccgaggtgggcagatcacttgaggtcaggagtttgagagcagcttggtcaacatggcaaaacgctgtctctactaaaaataaaaaaaattagccgggtgtggtagcgtacacctgtaatcccagctgctagggaggctgaggcaggagaattgcttgaacccagggggcggaggttgctgtgagctgagattgcgccgctacactctagcctgggcaacagagcgagactccatttcaaataaataaataaataagtaaaaaataaaataaataaaagacaaagaacccggtagttaaataaaatcactgggttggaagctcaccatccatacagtggagtgaggaactcttccaagttcaataatgtgtaggtaaagaagataggttgagggcagtgtctcacatctataatcccagcactttgggaggccaaggtgggtggatcacttgagctcaggagttgtttgagaccagcctgggcaacattgtgaaacctcacctcttaaaaaaaaaaaaaaaaaaggtaacacgtagcagatgccaaataaatctgttgtgttgaatgccaagaggcttggggtgctctggaaggacagagcccgacacagtaaaagtccaagaaatattttataaattagtgaatgatgaaaaggttttctttttttttttttgagatggagtctcactctcgcccaggctggagtgcagtggcgcgatctcaggtcaccgcagcctccgcctcccgggttcaagtgattctcgtgcctcagcctcctgagtagctgggactacaggcaagcaccaccacatctggctaattttttttatttttagtagagatggggtcttgccatgttggccaggctgttctcgaactcctggcctcaagtgatctgtccgccttggcctcccaaagtgctgggattacaagcgagagccactgctcccggccttttctgaaaaggttttctttttgcttgtttttgtgttctagttgatttctttttctcctaagtatggtttaattttctggcatttctgccattcttatgtatgcccacatggctcacagatgcccggtgttttatcctgtgacctgtcagagctgttcttgggaggagttgtggagctttggctgcagggctcatgctcctggggtcactgagctccccacccaagggtggacagttgtgtcccagctgctctcgctttcagggagccagtgtgggccctgaggggcacactttagactgaaaaaccaaggattgaagtcagcagggtgacaagaaagttgggacaaagggaagcatttagaagagcattgtgaggggcttgaaggggagagaatagttagactttgaagagaggtcttgaatctagaatggatttttctctgcatttttttttaaaccttgtggcctctgtcactgaaggctgaggagtgtgacctcagaaactactccttggtgggggctatggatagtattagctatttaaataaaaaataaatgtgatttcttacctctttgggagcatggtcagggaggaaagaggaggcaggaggagaggcaggtctcagaacaatccagctgtcaatgcgtgttctctgttccagaaactgacaactcctgcaaggtgtgctgcagggacctttctggccgctgtgtgccctatgtcgatgctgaacaaaagaacttatttttgaggaaaggaaagccctgtacagtaggattttgtgacatgaatgtgagtatttatgtacagctttttctgtaacagccagataggaagtttttattttgtaagtacttgattttgcagatgaaaacaaatcaaaacacaagtggggctacatccttctggcccattgttatctacgggtattacttaggaggagaagacggagtgctttcaggtccctgcctgtagtttccttctgtggtgggaggctttgagcccagagactgagaaggactggggtggggactttatggtaaagttggttggtttcaggcagtgggtcctaattatgttttcctagattacttacagaactgactaagattgcaaaattattcagggtgtgattttgaaacaggtgctgaatgagtaggaaagacctagaaggctgcttgacttacttaagccagacccttttgttctctagagaagcataatttttctcatgcagaatgatgggagagggttttaagatttacgaggcttcacagggagtctggctgtgttgttcactgtccactgtgtatgtgtagagtccttactggaatgcctcatctttagcaaactggtttccttgatttttgtctcctggtaattctaaatcacttgtaaaaatggagtaattatgaaagtgttaatgacagatgttctactttcttgggtactcattacgcggaagttattgccttgtgtcaaagatgggaaaacgtttgattttaatgaagccctttacatgtcagttatttttataaagctacattgcttctgaatacattgtgtttgggaatgatgctgtatgtatgttttttcttcatagggcaaatgtgagaaacgagtacaggatgtaattgaacgattttgggatttcattgaccagctgagcatcaatacttttggtaggtgatttccccagattacttactgagagctgagtcaatttctgtgatgacattagaaaagtgtgctttcagagtgatgtgctttaattctgcagtagaaggtggaactattcacagctttagttatgaaacaactttgttggctagaataaaatgaactcatagatagtctgtccccgtggagcttggatgcacagattttctgacaagggaaataaagtcaaaatactggcttccttctttacccaaaaatatccatgtgattagcataagcatagtttaatgctatagactgaatcctgattgatgtaagagtgtttatttgactgaatgctatatactgaatcctgcttgatgtaaaagtgagcctcatattttgcagaagcagggtatatcatgttgtcacgagtccataatttaatcacaaaaataatatccaggtaacaaaaactttgtcttcttaagcatttactagtagtagcattccatattaatctgttgacacagctactccaggtaacatgttgaatattctgcaatctcttcctgtcagccagtatatgagggctatttctttaaaagcacttggtatggagagatggtgtggtgtaatacaggcagcacagacattctgctctcggtagtatgtctagccagcagctctggcatttgacacaatggtaatatcctaagagcatttcactttagatttgtgaagtacttggtcaagacattaactgtttggaattgttcacaggaaagtttttagcagacaacatcgttgggtctgtcctggttttctccttgatattttggattcctttcagcattcttgtccattgtgtggtaagtcatcaacttttaagtaattaaatgttttatttaaattttgatcaactccaaccatgtaatctctggaaaaggtaaaacttgttcttagcaaagtttggcctgatatttccaatagctttttttgttgttattcctaggggaacatgtcttgtagaaagcttaactaatggtcttttaaaaaaaatactatttttgtgtgttggtgttttaatatataaatttcttaggaattttatacttttaagcataggagactgtttaactggatttgtccaggtcctttgatgagtaaagcccttattgaagagcattttcaggctgacttcgttgcaatagagcaaatatcaaacatcggcatttcagatgttccccatatatcatgtagattattggcagcagatggctatgtcttcagccttctgcacaaataggatgtagggactggggcccagctgtcatatagagtatttacatcttccccaaaaaataagagtaagcagtcttttctgttctcattcagaatcagtaacagctacaagttgaattgggctttgactaaggaactcctggtcctttataaatttgaggccctttttcataaatgttcttacgaatccattcacttgcatctgtggggaatggggatttgtctgctgtagagatgagaaagtcacacccaggcttccagacttgttttcccaaactctttcatagtggccttcctatgagcatttaaaaattccagcacaactctgatgacaaaggagtttttcctactgcctccttcctttcctttcctgctggcttctcctgcctaggggccatctcacagagcagctcttcctcagggtggtgagcatgatgggtataggaagatctctagggagcacttgtgctgaagaaagctgaaggtgacgtgcttgaagctttgacagatgtctctggatgacagtgccatccatcacgattgcttctattggaggatggaacctattttgtttacagggaagttgcacatgtggacaaggcacgacccttgatttcagagcaaagcctccgataggagggagggccatggcttgtttttggtcatagaatgcattgatggcacccagacaggaagcctagtcctggattcttggtccttgccctctgtcacctattatgcttcagccacaggcagggatggggcagcagatggccatgtggttagccttctgcagaagtaggatgtagggattgaggcccagttcctccagcagagcatggtccacagaaactgtggagacagctaagagagtgaggccatgggccggggcagtgcgaagaatgctgcaggcccagccacctgggtcttcctaccagttgcccttccagtcagtgcggtcctggtgtacccagcatctgggacatttgtcatttcatgcacaggaagatgcctttattattcccctgcccacagagggataaatttctcagaaaacatagcacttaaaccttgcctctttctgtacttaacgccaaaatgtatttcctttgagtgcaaaggaaacacttctagactggtggcataactaaagcttgggtgagaaatggattgtcatctgttgagcctgctatcactttctacaactcaggttctaagttcttcagttagtgttaggaatagcctgtgatgaaatagtactcactaactgaattgtatttgtagggaatgaccttcttgctgtttctttctaggataagaaattggataaacagtatgaatctctgtctctgtttcaccccagtgtaagtataccatatgaaagaaacataatcttcgcctggtctgaggccctgttaggcaaagaccttcacctgacccagcaagagctttcactggctgatggaaggtcatgttgcagcaggaagggtctaggttggaatgtttacccttctgacaacagtgatggtgaacttcgattagttgcatggatggacatttaaagagctgtgctgtccccttcccaagccataaggagtgatttagccattcaacacttagttaatattttgagttcaatttctctcttgggatcttaccttgagaggtttgaatcctcttttgggtcttcaaatggtaagtaagttttcaggatgcttgaaagctagtaattactgtttttgccattaaaagtaatggcattaattacttttgcaccaacctagtattttttagtcacttaggttgagtgagcctcacctagcacttttttcttagcatcacagtgccaacagaataagaggctgtttgatgggtaagggtggagctgtgaggacctccgattcatcttttattcctatcaatcaattgaacccatgtctttgcagaacgtcgaaatgctgagcagcatggattctgcatcggttcgcattatcaaaccctttcctgcgccccagactccaggccgcctgcagcctgcccctgtgatcccttcggcgccagcagctccaaaactggaccaccagagaatggacaccatccaggaagaccccagcacagactcacatatggacgaggatgggtttgagaaggaccccttcccaaatagcagcacagctgccaagtcatttgaggatctcacggaccatccggtcaccagaagtgaaaaggctgcctcctttaaactgcagcgtcagaatcgtgttgacagcaaagaaacagagtgctaatttagttctcagctcttctgacttaagtgtgcaaaatatttttatagatttgacctacaaatcaatcacagcttgtattttgtgaagactgggaagtgacttagcagatgctggtcatgtgtttgaacttcctgcaggtaaacagttcttgtgtggtttggcccttctccttttgaaaaggtaaggtgaaggtgaatctagcttattttgaggctttcaggttttagtttttaaaatatcttttgacctgtggtgcaaaagcagaaaatacagctggattgggttatgaatatttacgtttttgtaaattaatcttttatattgataacagcactgactagggaaatgatcagtttttttttatacactgtaatgaaccgctgaatatgaggcatttggcatttatttgtgatgacaactggaatagttttttttttttttttttttttttgccttcaactaaaaacaaaggagataaatctagtatacattgtctctaaattgtgggtctatttctagttattacccagagtttttatgtagcagggaaaatatatatctaaatttagaaatcatttgggttaatatggctcttcataattctaagactaatgctctctagaaacctaaccacctaccttacagtgagggctatacatggtagccagttgaatttatggaatctaccaactgtttagggccctgatttgctgggcagtttttctgtattttataagtatcttcatgtatccctgttactgatagggatacatgctcttagaaaattcactattggctgggagtggtggctcatgcctgtaatcccagcacttggagaggctgaggttgcgccactacactccagcctgggtgacagagtgagactctg

SEQ ID NO: 15380 - DNA, 44289 bp, Homo sapiens
gaaactcaacaaaaagaatagtaagcccactaaagaactgaagtgtataccccctcccctctcctcccctcccttcccctcccctcccttcccctcccttccccttcccttcccctctcttccccctccccttcccctctcctccccctctcctcccctctcctccccctctcctcccctcccctcccctcccctcccctcttttcctgtcttctggtgccaatggagtctatattctaatgtctgtcttagataccttgtatttattttcctaactgtaattgtgggttacttttttgcaagatatgttgttttgaggaggaaaaaaagcacgagtactttttttttttcttattttgagcgggagtctcgcgctgtcaaccaggctggcgatctcggctcacagcaggctccgcctcccgggttcactccattctcctgcctcagcctcccaagtagctgggactataggcacccgccaccatgcctggctaatttttgtatttttagtagagatggggtttcgctgtgttagccaggatggtctcgatctcctgacctcgtgatccgcccagctcaacctcccaaagtgctgggattacaggcgtgagccactacgcacggccgcatgagtacttttaaatatagaaagcagcatttattaattttgcacagcaataagaattttctcatagtccacccagcttgatagagacagcatagtacagggttttgaaataaaccaggtttatttcccagtttcaccatttactagctgtgtaactttgagtaggttgattagcttccaagcctcaatttgtacttgtgtgaagtggggataatagatgcatagtacctaacaccaagtaggtgttcaataaatggtatataataggattagtttttgataataatttttttagataatcaggattccaacttaactacgcagtcatgtgtgtttccttattcttcagtgttttccaggagagatgaatgtataagttctttgaatatctttaccctagtgtgagtttattgtgatctgctgtttttatagctaaataaattagttcatttgtcgttacaggagatatattgctctaagtacctaataagactttagttgtaacttgcatagtgttttattaatgtcaatgcttctggctttttaagaaagtttaattatgtgaaaatgagacttaaaatttgtgtgcttagagtaaaatatgaatgcatttttcttcaggcattttaaattatacctgacatcaagtactgaacgtttttcacaaaatttcaaggtcgtggtggtggatggtaaaaacgaaagcgagtacactgtaaaatggcaggacttcttcactggacacgtggttggttagtatggagcttgttggtttgcccctgtgtctggtgtattaggtctccaaatctaacttgattgcatattcttttctggtgcaggatagtggggacggggtgtcatagaagtgctattctttgacttttctttgaggtatataagtttagaggcaggaacattctaatagaaggaaatgagtattatctaaatgtcatactagctggctggtttaatgattaaaattaaattcttcttaagtgataggaatttaacctttcttttcctcagtgactgtaagctttctttatgatattttaaacagggaagcttggagataaaatacttggtgatcctattacgtatgtatttgagaaaatttatcaaacaagcaattgcagtttactttttgacctttttctgcaatgagaaaaaaaaatgtcattgaaatccacaaatagtatagttcctaggcctgtacattctaaatcatgctttctgtctctcttagttcttcctttacctagaagtagataaaattattccagaagaaaatcttagcagttttgtttgttttgggaaagggataggtttcaagtgactaaacttgaggctaccccttaggagttgagattatctagcttctttctggagcctttgtttcttgttttgcagagctctcacagtactaggcaaattccaccctgaaggatttaatttttattgagagtaatgcatagtttcttatttgatgtaagtatttttaaataataattttttttttctcttaaggtgagcctgactctagggttctagcccacataagagatgatgatgttataatcagaatcaacacagatggggccgaatataacatagaggtaaatttatatgtgaattttttttcagtagcttatatctctgattttcaaaaagctgctcagttctgcaaaggtgaaaagtaattatacttatttctttcctcttcgtatttgaagttttttactaggaaagtagactttttaaaaaaggataatctctaagaagctgtgttatgatacaccctgtatttctaagtaccataattgagagagttacatgtgggatggataataggaagagaaaactttctttccctcctgactcattttttaattctttctcaaataataaatgtaaacatcctcagaaatgaaaagtgaagtattatttttcaatttctctgtttttctgctagacacactggaaatgctagatcaatgaaaggtggtagttcatagtctgagaagttaaagaggaagctaggaaagtcaggctgtggtcactcttccattgaaagagtagcaatagaaatcaagaccacagtggctgcattggttaagacacatatctatctgtcagatattagtctacaaaacaaaacgtttcctcataattgtgaattgaagttgattctgtgtttcctgaaaaatgagaagactctgggtggtggtggtgatatcactaaaatagatcacctgtgggaaaactgagtaagattggtcaaaatgaaatgttcaggtgtatttgagtgcttaataggggtaaaacagtctgctggagctatatatactatatgttttaattatatccaatctacatgactgttagtcctttgactgtccattattgtgaaaaagaaacctatggccttgcagtatgttatagtttgttaatgtttaagctatttaatgtcaatgttttgaggagtctggcctaccagaaagagtcagaaatttagtagaaagtaaaggaactaatattataaatgcattcattctagaataggcaaagcatcactggaatgtcttaaatttgcctgttctttcaaatcaatttattttttaagaatacctttattttaaaatatatgctcattgcaaaattcggaaaatagattatctgtacttggacagataactactattgacattttgacagacatccttccaaatttttttttctatgtgtaaatacacaaataaatatagttatacccactattttttcctgcaaaactaggaccatacaatatgtacagtttgtcttcacacatttttcgtttaacaatatgattatgaaccttttcgtgttaatatagatctaaattagggttttgtttgtttgtttgtttgttttttgagacggagtcttgctctgtcacccaggctagagtgcaatggcgtgatcttggctcactataacctctgcctccccggttcaggcgattctcctgccttagcctcccaagtagctgggactgcaggtgtgcgccatgatgtccggctaattttttttcttttttttgagatggagtatcactctgtcactcaggctagagtgcactggcgtggtctcggctcactgcaacctctggctcctgggttcaggcggttctcccgccttagacccttgagtagctcagactacaggcacatgctacctcacctggctaatttttgtatttttagtagagacggggtttcaccatgttggccaggatggtctcgatctcctgacctcatgatctgccagcctcggcctctgaaaagtgctgggattataggcgtgagccactgtgcctggcctcaactgttttgtttctaacttttgaaataaaaggtattgtagtgaacagccttgggcacaccttttggtgcatgtgtttagttggaatagtctggatgataggtaatagtctgggaagttaaatgaagaaactgtaggaagctctgtctaggctgtgcgagggcttcagataaactcccatagctgagtagcttaacacaagcaaagttttttcttactctcctgtggcttgatgtgggttaggtggttctcctctactttgtggctttgacttttggacacatgtcctctgtagttctcacagaaagaaaacagagctagagaattatacaggatattaagggccaggcttggaaatggccttccgttcaatacattctagaacactttatctctgacctgctacaaaggagaatggaaaagatagtcgtaatttgagctcagaaagagaaaatagtgtggtaaatgcacagcattgtttttgctgcagtgcatatgtctgcttatttccttagaataatttattcttttttgtttttttgagactgagtctcactctgttaccaggctggagtgcagtggcgtgatctcagctcactgcagactctgcctcctgggttcaagccattctcctgcctcagcctcccgagtagctgggattacaggtgcgcaccaccacacccagctaatttttgtatttttggtagagacagggtttcacaatgttggccaggatggtctcgatctcctgacctcatgatctgccagcctcggcctctgaaagtgctgagattaaaggcgtgagccactgtgcctggccagcttattaattcttaagccaaaatatgtgtctttaggatccaagttaaatttgctcagattacatttttttttttttaagatggcatctcgccctgtcacccagactggagtgcaatggcgcgatctcggctcaccacatcctctgcctcccaggttaaagcgattctcctgcctcagtcccttgagtagctggaattacaggcgtgtgccaccatgccccgttaatttttgtagttttagtagagatggggtttcactgtgttggccaggctggtcttgaactcctgacctcgtgatctgcccatcttggcctcccaaagtgctgagattataggcatgagccaccacgcccagctagattactcatttttttcaaatacttccttttggaaaaataggaattctgtttccatccatacctttgtttcactaagtacaaaaatgagtataactaatatttcattgtaagatatttacttagccaggcacagtggctcacacttgtaatcagcactttgggaggctgaggcgggtggactgcttgagcccaggaatttgagaccagcccaggcaatatagggagaccttgtctctactcctccacaaaaaaaaaaaaaaaaaaaaaattagctgggcatggtggcacatgcctgtggtctcagctacttagaatgctgaagcagtaggatcagttgaattcggaaggcggagactgcagtgagctgagattgtactgctgcactccagcctgggtgacagagcgagaccctatctcacacatacacacacacaaagatgtttacttacaagtatactcatcagataccttgagggacttttgcatgaaattaataatgtttattgaaaaaatgatttactacttacaggggtgattttcatactctttataattcttttgatacttttatagttcataagtgtggtgattggctgttcacacacacatatgagatgtaccaccctagaaccttgttacaatgttagcacattaccagtctgacatgaaaaaaaataattctttacacttaccttgatgcaaaaacattgtctatctgcactaatatcttaggaatataagtgagcaggaaaaaatatatatcttatttttaacacatcatcattaaatattttgtttatgacagtcttacttggtcactcaggctgaagtgcagtggtgccatcatagctcactgcagccttgacctcctgggctcaaacaatccctcttttctgcctcctgagtagctgggactacaggtgcatgccaccatgcccaactaatttgttaaatttttgtagagtgtatcagatttttgatgaggtctcactgtgttgcccaggctgatctcaaatgtctgactgtaagcaatcctcttgcttggcctcccaaagtgctgggattacaggtgtgagccactgtgcgcagccgttaaatattttaaaccgtcactgactttaccatagcttactatttatataaataatcctgggttaaacttgcatagtgagataatatttcccccaacttttatttatttatttgagatggagtcttgctctgtcgcccaggctggagtgcagtggcgcaatctcggctcactgcagtctccgcctcccaggttcaagcatttctcctgcctcagcctcccaagtagctgggattacaggcacacgccactgtgcccggctagtttttatatttttggtagagacagggttttgccacgttggccaggctggtcttgaactcctggtctcaggtgatccacccgcgtcggcctcccaaggtgctgggattacaggcatgagccactgcatccggcctaatttttgtatttttagtagagacggggtttcaccatgttagtgaggctggtcttgaacttctgaccttgtgatctgcccacctcggcctcccaaagtgctgggatgacagacgtgagccaccatgcttggcctcccccagcttctagttttaaaaatgttcagctggtgcagtggctcatgcctgtcatcccagcactttgggaagctgaggtgggtggatcacttcaggccaggagttcgaggccagcctggccaacatggtgaaacctcgtctctactaaaaatacaaaaattagccaggcttggtggcttgcgcccgtaatcccaactgctcgggaggcctaggtgggagaatcgcttgaacctgggagacagaggttgcagtgagctgagatcgctccactgtactccaatgtgggtgacagggtgaaactctgtctcagaaaaaaataaaaaagaaaatgtgcaaatctacagaaagattaaaaagtaccctgtagttacagaaagatttttttaaaaaataccctgtagcccttaaacaatttctaacataatgtcctgttagctttctctctttttttcgtgaatcatatgaaaatcatttgcaaacatcatgacccttcacccctaaatacttctgtatgcatccttaggaataaaggcactcttttctatagctgtaataaaagtaacatacctgagaaaatgacaagaattctacaatattatctaataatcatgccatagtcaaaatctctagtcatcctcaaaatctcctttgtagattttttttggttttccagtccaggatccaatccagttttctgccttttagtcaattactcatcaaattattttttccagcaacttactagtaataatggtaatagccttagcttttattaataacaaccacttttcttttgaaatgttaatataaaactagatttattacctacataatcttcataatcttcaagttaggtattatcactactttacctaatgagggaggttatgctcagggtacttgtccaaggcacatagtgaggtatggttgaggtttgaactcagatatatctgatcccaaagccagctgtctttttctgtgctggactgactatactaggaaacaatcaatgtgaacttagaaatgtttgacccaaaagaaaaaaaatttcactcctattcataggctaaatgaactttactaaatatggaagattcctgtagcccggaagttgggttagttaacttttgagatctctgccaaccctgaaattctgtaacccttgtttcttacatctgcctcatacatggattaccaaagatgtatatgcatataatatttaacagttttattgagataaaattcacatactatattattcacccacttaatgtatacaattttgtagttttgtgtgtgtgtgtgtgtgtgtgtatttttgagatggagtctcactctgtcacccaggctggagtgcagtggcacgatcactgcaacctctgcctcctgggttcaagtgattctgtggcctcagcctgttgagtagctgggattacaggcgcccaccaccatgcccggctgatttttgtgtttcagtagagatggggtttcaccgtgttggtcaggctgttctcgaactcctggactcaagttatctgcccaccatggcctccccaaagtgctgagattacaggcgtgagccatcgcgcccggcagttttcgtatattgatggagttgtgcaaacaccacctcattcaattttagaacatttttatcacctgaaaaagaaacgctgtatcctttagccatacttcccccttcctccctaactcccccagctctaggcaaccagggatctactgtctatttagatttgtctgtttgggtcatctcatataaatggaattacataacatgtcttttgtgtgtggcttcaatttttttatttttttgagatggagtcttgctctgtcacccaggctggagtgcagtggcatgatctcagctcactgcaacttttgcctcctgggttcaactgattctcttgcctcagcctcccaggtagctgggattacaggctcctgccaccatgcctgactaatttttgtattttttactagagtcggggtttcactatgttggccaggctgttctcaaactcctgacctcaagtgatccacctgcctcggcctcccgaagtgctgggattaaagacatgagccaccacgcccagcctgtgtgtggcttctttcacttagaataatgtttccaaggttcatctgtgttgtagcatgtatctgtatcttatttatttttattgctgaatagtattccattgtatggataaactgcattttgtttattcattgattagttgttgatggacatttgggttgtttccactttttagctatatttacattactgcttgtgttttcatttctcttggttatatactaggagcagaattgctgggtcatatggtacttctacttttaacctttgaggacctgccagactgttttctaaagtggttttaccattttacattctcatcagcatatgtgagggttctggatttctctacatcctcaccagtatttgtctttgatcatagtcatcctagtgggtatacaggggtgtctcattgtgggggtttttttccccattggggttttgatttgcatttccctgatggagataaatatattttttgtgtgtccccccacaaactgcctggttctgatgagaccagtgttcttacagagaataactttgctttgaaacaaaacaaacaaacagccttttgacttgggtaacctttggagtatgttaattgtgatttactctggccttgtaacattgtaagtggagattttgtttaaaaactgcgttcgctgaaacaagtaataaggttcagacctattgttacaagttctgagttttctttcatataaatatgtttgttcttttgtgtggataaaacctaacgtggcaaaaaggtgtcaaacacctaagtattaaggaaactaaaatgaaaatgctgcatgaacagaaaccttgtccaattttcattactatagcaccatcacctataacagtgccagtgtacagtagatattacataatatttttgaatgaatgagtggaaaatgatatgcatttttctcttctgcatcctctgaaagatttcacaacgtgcaaagtatgtaaggctttatttatatacagataaaataatcagagtttataatctatgtatttactttcctgcatagaaactccatatgattaaaaattgagattatttattttaataacatgactaatcagtttacttaacctagaaatgaatgttatctaagaacaagcaaagaatgttagaagaatttagtgtttaggaattattattgttttccatctcagtcgtatatattttctgttttagccactttggagatttgttaatgataccaaagacaaaagaatgttagtttataaatctgaagatatcaagaatgtttcacgtttgcagtctccaaaagtgtgtggttatttaaaagtggataatgaagagttgctcccaaaagggttagtagacagagaaccacctgaaggtaagacttaaagagtgtatttcaaataagaaacaaacatactacaattgacttcagtaggggtggttgttatttgttaaaaaataacatgattgtcaagtaactatagtatttggcatgaaaataagaggtttgttccagaaattttcatcttcttttgtttataatgtaagagttgaaaactctggaaaataatgggaacaacagagattagactttaaaaaagattagggaaaagggaaatggagtgatctgagggaaaatattcctgcagatatttagaaatgataaaataatatggtggaaagacaatctttagagtttataagaaattaattggtagtaggagggacctatatatatactgcttagaatacaagaaggttatatccatcttgggacaatccatttagggtcatttaaaaaacgtaaccatcttggaattttactgcccaaaacacctctggttaggttttttgttttgttttgttttgttttgtttgcagcgcgatctcggctcactgcaacctttgacttccaggttcaggtgattctcctgcctcagactcctgagtagctggattataggcatgtgccaccaggcctggctaatttttgtatttttagtggagatggggtttcaccatgttggtcaggctgttctcaaactcctggcctcaagtgatctgcccacctcagcctcccaaagtgttgggattacaggcgtgcaccaacatgcccggccaaagacggttatgttattaaaattatatattagcattttaatatataaataaagaaattcttaatttatttcacaagaaagttgtcctattaaactaattttcaatgtgaatatcttgacatttttactgttacattggttaattcataaacttcttgttgtagaatatgactgacagcttcatagcccagcattaggtgactgttttactctgttgagcactatttatttatttatttatttagagatgaagtctcacttttgtcgccctggcttgagtgcaatggcacaatcttggctcactgcaacctccgcaccctgggttgaagtgattctcctgcctcagccttacaagtagctgggattacaggcgggtgccaccatatctggctaatttttgtatttttaatagagatggggtttcatcatgttggccaggctggtctcgaactcccgtcctcaggtgattcacccaccttggcctcgcaaagtgctgggattacaggcctgagccaacatgcccggccttactctgttgagcactttttaaagtttctgtattggaaaaattaaagaggcacttgtccttggttttgaattctacagtgttttaactttatgttacttttcacttttctgtcttcctccaaattattttttgttgttgttcagaatcctttagtgatattaagctcacataatgtttgtttcaaaaatatgttagatttaaagtgttaccataaaactccttgttttggtgaattttgatttaatagtgcatacaaattcatattagagcttgttcatcgagtgaaaagaagagctgacccagatcccatgaagaacacgtgtaaattattggtggtagcagatcatcgcttctacagatacatgggcagaggggaagagagtacaactacaaattacttagtaagtatttgatattgcatcgagtaattgaaaaaaaaatttgggtgggtacattccatgaaacttaatgcaaccagatctgttccagatactctgttatttccctaaaatatttgagggatattctctgaggtttttatgttactgtatggaaattatagtttcaaatttgtgacaacccattttacccttgaactaatattttctgcatgttagaatttatgcatatagggtttgggagaggttataatgtagtccttcctccttgatataagtgagttctttaaaaacatcactgctatcatggtagtgaacctgtggtgtcacatgtgaatgtaaaaatatgtatttgcatgaacccatgtttttcttttgcttatatgtatatttcagagaggaaggcgagttttgtttgtcatgttaaagacctaatcattggacttcacttgaaataggtgggactttcatggtcataactagttctagggcacagaagtgaaggaaagatgtaagaagtgatgatactggatttttaagtatgaactattatgatttttgaagtctggggaatcatttttcattgacattttttgctagtgtgacttcattcgtcatgattacttggcactgaccaaaatgttgttactgagggaataatggagaatgcagctattcatgaagcaagaagaagctggtgcagtaaagatgtctttctcattgccttgcttttcccatgctgtccattttattcataccctcccaacttctttcccttccctttcatgtcaagtggatttttttttttttttttcaacacagagtctcactgtgtcgcccaggctggagtgcagtggcacaatctcagctcactgcaacccccacctcctgggttcaagcaattctcctgcctcagcatcacaagtagctggaattacaggcgtgaaccacagcactcggccccatatcaagtgaatttattatgaggctagtaagagtcactgtgattcttgttcctaaataagagagatttttactttaaaaagcttctctcttaatctgggttttatattaaggggctcctcttattttacttctttgttcattgcactataaatatgaatataatgagagatctagtcttaaaaattgtatttttttacaacttcttaggcataacttgtttcacagttgctagaacaaacctcatcaacccagtttttgaacagtagaatattctctttgagaaaaagataggtaattagcattttgttctttctcatgtcattttccttggaaactatactgccttccttctccagttttcccaaatcagagaacaaaagaaggagggttgctgaaatgaaccttgttctttctggctgtcttcttacccattcctcagtgctgaactttttggggtgagagtgggggaatagggttggcagttgtctgccacggccccttacttgtttctggggaagacattcgaggtactcaccaagagatagagtgaagatggaattctttttagaagggaatacagttgacccaggaacagtgcgggggtgtggttagaagcactgaccttcttccctctgcagtcgaaaatcctcacgtgactttttttttttaaggctctgtcgcccaggccggagtgcagtggtgaaatcatagcttgctgcagcctctattgcccgggccaaagcaatcttcccacctcagcctcctctagctgggacaacaggtgttcacccttcctggctaagttttttgatttttagtagagatggagaatttcccaggatggtctcaaacttctaagcttaagcaatcctcctgcctcagcctcccaaggtgctgggattacaggcatgagccactatgcccggccactgtataactttgattctccaaaaatttaactactaatagtctactgttgaccagaagccttaccaataaaataagttgattaacacatttttaaaatatgtattattactgtgttcttacaatcaagtaagctagagaaaggaaaatgttatgatgaaaatcataaaaaaaaaaaaaagcccggcatggtggtgtgtgcctgtagtcttctgttactcaggaggctgaggtgagaggattgcttgagtccagaaattcaggctgtagtgagctatgatcgtgccgctgtactgcacccctggtgacagagcaagaccttgtctcttgaaaaaaaaaaaagaaaatcataaggaagagaaaaatacatttactattcactaagtggaagtggatcatcataatggtcttcatgttgagtaggctgaggaggaagaggaagagttgatcatattgtctctggtgacagaggctcaaggaaatccatatgtaagtggacacttgaagttcaaatctgttgttcaagggtcaactgtatttcaggtatactgattgacttttaaatttaatttttattattggctgaaacggtagttttaaaaaagcctgttacttgtcattttggttccatgtgcaattgagtacctgaaatttaggttaaactataccattgttttattctggtaacagcactttaagtttggggccaaaggttgggaatactctgatacagtaacatctcaatgctagtttttgcgaaagtagaaacttttgcaatggcctctaaactgagattttttctttccccatagattttatattgcattgccaggagaggtaaagagttacataatgtcttttttcttttttaaatacacacagatagagctaattgacagagttgatgacatctatcggaacacttcatgggataatgcaggttttaaaggctatggaatacagatagagcaggtatttatcaatagatatggcttatattacttaagttttgtaatgtaaatatttgtcacttgtattcaaaacctaaaaacttgtccttaacaataattgtaaataagttttctcagatgccaatgattttttatgatgaattgtgcagtatttttgatgttaattagttctagattgtgaagttttctgtccttagtctcgctttaggtagaaagccttttatgctgctgtgctttgttccttctttgaattcatggcctttatattctctgtagttttcttcccccctccgattatgcttaagtctttagttaaaactctggcatgcaccattgaatccttagtcagaaaatttactaaaaaatactgtgtacctttgcaaggctgtatttatatatacagaacctttaggttctttcctctcagatatctccttctgatttcttgtaatctgttaacagagtgtgtctagtaatgttatattaatgtcatcttaataatagctcatattaaaagttatttcaaattgctaggactaattaaaaaggcttctgacaaagggtattgctttgggcagagagacattttgatatgtaaattatataaattgttatctctatttttttccaagctttttgtagtaaaccatatttttataagttatatagtatagaatttagaggttgaaaaaatttttaaaaatcattcaccatgtttataaatgttaaactttgatattacttgtataaaactaagagaattatttttcccttttcattctctttcactgttacgcattttctttttaagttattatttgaataggtaacatgtacacagtacaaaagccagtgaaaagtaagtctctgcagcctgtttattgtcaaaccagttcctttccccaaagacattcatgtcactagtttcatatgtatctttctagagatgtcgtatgcaggtatagtgtatgtatatgtctgtatttgacacaacggtgctatgcagtacacttttacaccttgctttttcatttcacagtatgttggagagtacttcatgttcatgcatgtaaagctgcttcacttgttttattataaatagctgcatcatgtttgagtttcagggaacctgtaaattttctttttgctttaggcatttggaaccagtcgaagaaacaggaataatataggagattaaaacattaacttctttacatctgatgaaggatggattggagggtgtggtttagatgtgtatcatggtgggcttctaagtagttctatcccagatttgaccttgaccagccaccatcaaaactgcagagtccaccccagtaaacttaccacacagtggcagaggagaccagaatgggccttctctgcaggcaggcaggcaggcaggcaggcagagagactcacagaaactctgagctgagcatggtttccttctttatctcacacttactaatgggagcctttgttacttttttttttcttctttgcaggtttaatatgaatttgtctgaaatgcctgtataaggagaagactctattcttagccttttattcctttgatgcacaaagagatgtatattttattattctttcctgagttgtcgactgtagtcgtaataaatattttaggctcctgtaacccaagttcttattttttcaaaataaacatggaggatatgaaaatttaagagtacatttataatattataaataattcattgacatatgttttccataccatatgcttctctgtttgtttcaaacattgaatattggtactgaagaatttatgaattttggttttaaaatgttttttttctagaacgattctttttttgaacagataaaataatgcagtattcagagccttctgacttattttggaagtgttctaagtatatgatctctttaagtatagattcgcattctcaagtctccacaagaggtaaaacctggtgaaaagcactacaacatggcaaaaagttacccaaatgaagaaaaggatgcttgggatgtgaagatgttgctagaggtaggtcttagaatcctggatatggtgctaacaccactttgtcatttctgatatgtggattgtatgtgttttaatgaaggagcatgttagaaaagatggacacccagaagcagtctcctccagctgatccagcagtaaccccatcccatgtagcagcatagacaacaaataacaaaaactctatgaaaaagaaaaacgctataaagcaatgcttccttttttttttttttttttttttgagacagagtttcactcttgttgccctggctggagggcaatggcgtgatcttggctcaccgcaacctccatctcccaggttcaagagattctcctgcctcagcctcccaagtagctaggattataggcatgcaccaccacggccggctaatttttgtatttttagtagagacagggtttctccatgttggtcaggctggtcttgaactcccgacctcagatgatccgtctgcctcggcctcccaaagtgctgggattacaagtgtgagccaccatgcccggccaaagcagtgcgtcttaaccttaatatctttgaggatctaatgagacaatcagtggatcttctctagaaaataacatggatacccaatatatagagtttttgcacactgtttcattagttctgcacacttagttcagctctctctgaagcttatcaatttatcttttagggcagtaattatcaaacaggttatgaacatgtattggagagtagaaatatagcttggagatctgaaagttctctacaggaatttaaaatttttgtgtttttattctggcgattaatctaaagatggctaacttaatcattttatgtcatttggagtcttgccgtataacagggtgctgccatgtgattccagtgtcttgagtttgtgtgtgctattactttggtgtagaatgactttatatgaagcgatagtttttatcttttaatgtgttggcaagtttattagtttcttgttgttgctttaattatcacaagtggagcagcttagaacaacacttatttatcccatagtttgcatgggctagtccaggtatggtgtggctcatctggattcttgtttagggtctcatgaggctgaaatcaagttttcaaagcttcaatagaattaaaggatattataactattcatccagatggagaagcataatgtgcagcacctgtgtggtactcattcataccttgtctaatttgatctgctgagcaccctgagaggttggttgagacagcatccttgtgaggaggctcagcaagtgttactgtttattccagctgacatgacaaagcagcataggctgggggacttaaacaacagaagtttgggttttcacagttctggaagctggaagtccaaaatcaaggggtcagcagggttgatttcttctgaggccaaggtacttgtggtgtagatgctgtcttctccctgtgttctcacatggtccttccctcagtgtgtgtgtatattctgatctccttatcaggacaccagccatattggattaaggcccacccatatgacctcagtgtaccttaattacctccttaagggccctgtttccagatagagtcacattctggggtactgttgagggttaggacttcaacatttgaattgtggggtggcacaattcagccagtagcaggaagattaaatgacttgtctgattagtcatacaactggtgatggcagaggttgaattgagcacagatctcctgactcctagaacagctgaaccactgcgcctgtctgcttttctgtgagcctccagacagcccatggcaggggaggaaccaaagagaaaaatgacttatgttgacagatggtcctctccagttttcttccctaagcctcctagaatattcttagaagcctcatccttttaccacggaactatcagaatccccatgtaaccacacttcattcctcatatagggctctctggcctctcatttaaagcattttaaacattgagggttttggctaggcatggtggttcatgcctgtaatcccagcactttgggaggctgaggatgaggcagtggattgtttgagcccaggagttcaaggctagcttgggcaacatgttgtacaaaaaatacaaaaattagccgggcatggtgaggcacgcctttggtaccagcttcttgggaggctgaggtgggaggttcacttgagcctgggaggtcgaggctgcagtgagctgtgattgcgtcactgcattccagcctaggtgacacagcgagaccctgtctcaagcaaaataaatcaaaccccccccccaaattaaggtttttttaaacttggagacgctggacggttatggtagaggtttttaaagtaatgtatgaagcccttttaaattaagaaaaaaaaaatcctctcaaacctgcagtgttgatttaaatggatgtaaaatctttattttagtaacataaaactgggtatgtatgcttttctataagtgtatatttatataaatgacaatatattatgaagctcaaaaaagtttaagattaaaatttctataaaaccaattgaatccttgaaatacttgagagggatctgttttggcctggagtgctgcaatccccttatcgaattggagcatctctagtcctgggctgtatgtcttcagaacagccctcggaggagcagtgagttagttctgaagagctggagcaagctcccgaactattcccttttgtgtcccttgtcagatgacagtgtgtgcctctcacctgtgcaggtggagaagcactttagggaaagagcaaagcactgcacgaggttgtgattgctggtgctgagctgcatgccatcatagttctgttctggaatgtttagttgatttagattacatcttttagtctgatgtaattgttaatctaagaatgcttttttttttttttttttttttggtctttcaaagcaatttagctttgatatagctgaggaagcatctaaagtttgcttggcacaccttttcacataccaagattttgatatgggaactcttggattagcttatgttggctctcccagagcaaacagccatggaggtgtttgtccaaagggtaagtttttccatttcttgtgtgaatatgctgctgggattattaagatgattggattatattataattctgtatttaataagcaatttatctctgtttccttttgactttagcttattatagcccagttgggaagaaaaatatctatttgaatagtggtttgacgagcacaaagaattatggtaaaaccatccttacaaaggtatgttcttttatttctaaaagaatagtgttagagtttattgtagtagaacctcagttatatatttatgtaggtatttttttaaaaaatgtaatatatactgttttttaaatttctgcctaaataaaatttatgtatttttgtgggatatatgaaaattaaagcataaagaagaaaataaaaatggcctgtcagccttcttttgaaacatgtgaggaccactgcttttctcgaaccctctgtcctggacccctctgacctgcagcaactcttagagctccctgtctcctagtcctgcagtgcagctgtcattcaaggcatcccacaccctcttattttcagaaccccatggtctccctctttctcagtgccatcattttggtgtagtgtatcttgcaggagcttcctaagaaaacgtagatgacctgcatattgttgggatttcatatatctgaaaatgtctttattccactcttaagcctgattgataattttggctgagtatattcttagttctcatgttctctatggtcttctgtgcatgttgcttctaaagaatctgaagtcattttgagttcttatctttgtttgtcacctgtttttttctctggaatatcttaagatcttgtttttctccagctatgtctgttaaaatgtgtttgactacaaataacagaaaattaaataagcagtggtttaaataaggggtttatttgtctcagtcaacaagaagttcagggatagcattttctgggtggtacagcaactcagaggtaccctcagtggctcaagaacaagcaggaagtctttgtcctcatggatgtcacctcatggttttaagatggttctcttctgtgttggagaaaggaggagaaagagaacatggctagcctagtctggcccttctaaaaagcttctctggaggccccatcctggcttttgtttatatgttactggacagcactgggtcccgtggctgcccttagcctcaacggaatgtggaaagctggctattttagctgagtatattgctgtcctgggcaaaattagggctcattaagtaaggaagaaggggagagagatgttggtaggacatattagtatctgatatactgatttttaatttttatttaatttttattttttttgagacagagtcttgctctgtggcccagtctggagggcagtggcaccatcttggctcactgtaacctctgccttctgggttcaagcagttctcctgcttcaacctcctgagtagttgggattacaagcacctgtcaccacgcctggctaatttttgtatttttgttttagagacagggtttcaccatgttggccaggctggtctcatgaacccctgacctcaagtgatccactcaccttggcttcctaaagggctggttggtatactgattttttgactatgatgttatacttggtgtagggtatgggaaaacatttgcaaaagacacatctgagaaaagactgctatctgaaatatacaaagaggccgggcatggtggctcattcctataatcttcggcactttgggaggccgaggcaggagaatcacttgagcccaggagtttgaaactaacctgggcaagatggtcagaccctgtctctacaaaattaaaaataaataaataaataaaaatttccatatgtataaagaactgttaaaattcaacaataagaaaatgaacaacctaatttaaaaacagacaaaagagcagaacagatacctccaaagatatacagatagcagagaagcatatgaaaagatgctcagcgtcatatgtcattaggaaattgcaaattaacaatgaagctggttgtaggggtacatgcctgtagtcccagttgcttgggaggctgaggtgggaggattgctcgagcccaggagtttgagacccatcctgggcaacattagtgagatcctatttctataaaaaactttaagaaacccaacaacaatgtgctattactagtagcttattagaatggctaaaatcccaaacactggcaacacaattccaacaaggctatggagcaacaggaactctcattaattgctagtgggaatgcaaaaatggaacagccactttggaaggcagttggcagtttcttttctttttcttttttcttttttttttttttttggagacggagtttcactcttgtcacccaggctggagtgcaatggcgccatctcggctcactgcaacctctgcctcccaggtttaagcaattctgcctcagtctcctgagtagctgggattacaggtgcccgctgccactcccagctaatttttgtatttttagtagagatggggtttcaccatgttgtccaggctggtctcgaactcctgacctcaggtgatccgcctgcttcagcctcccaaagtgctgggattacgggtgtgagccactacgcccagccataagaatgtttatggcagcttaattcataattgataaaacttggaagcaaccaagatatcctttagttggtaaatggataaactggcacatccataaaatgagaaaaaaataaaaagctattaagccatgaaaagacatagaggaaccttaaaagcatactactaagtaaaataagccagtctgaaaggctacatactatatgattccaaatatatgacattctagaaaagacaaaaccatgcagactataaaatgatcagtgattgctagatgctgggggagggagggatgaataggtggagagcagggtaattactctgtatgatacttcaacagtcagtataagacattatgcatttgttgaaacacatagaatatacagcacaaagagtggaccctaacataaactgtggactttgggtgatttaaaaacaggtggtggcaggagcctatagtcccagctacgcgggaggatcacttgaggccaagagttagaggctgtagtgtgataaatgcaactgtgaatacccgctacattccagcctgagcaacttagcgagatcctccttttcttttttgagatggagtctcgctgtgtctcccatgctggagtgcaatggcatgatcttggctcactgcaagctctgtctcctgggttcatgccattctcttgcctcagcctcccaagtagctgggactacaggcacccccaccaccacgcccggctaattttttgtatttttagtagagacggggtttcactgtgttagccaggatggtctcaatctcctgaccttgtgatctgcccgccttggcctcccaaagtgttggaattacaggcgtgagccaccgtgcctggcctgagaccctgtctctttttatttatatatatatatatatatatatatatatatatatatatatatatatatatttatattttaaatttaagttctaggatacatgtgcacaacgtgcaggtttgttacatatgtatacatgtgccatgttggtgtgctgcacccattaactcgtcatttacattaggtatatctcctaatgctatcccttcccccttccccctccccccaccccacgacaggcaccggtgtgtgatgttccccttcctgtgtccaagtgttctcattgttcaattcccacctttgagtgagaacatgcggtgtttggcttttgtccttgcgatagtttgctgagaatgatggtttccagcttcatccatgtccctacgaaggacatgaactcatccttttttatggctgcatagtattccatggtgtatatgtgccacattttcttaatccagtctatcattgttggacaatgttgaacaataatgtagagtggtatgagaaaagaaaaagacactaattagcttttgggaatcttttaatttctttttttcttttcttttttttttttttgagatggagttttctcttgttgcccaggctggagtgcaatggtgtgatcttggctcactgcaacctccgcctcccggattcaagcaattctcctgcctctttctcctgagcagctgggattacaggcatgcgccatcacgaccagctaattttgtatttttagtagagatggggtttcttcatgttggtcaggctggctctcaggtgatccgtctgcctcggcctcccaaactgctggattacaggcgtgagccaccgtgcttggccttaatttctaaatttatttttttcttatggtactttgttttaggggaaaaaatctctcaaactgtgttttccctctattctcacatcacaaccatcatcatcaacacagaagacttgtgtgaccagaccaaacgtgtggggatttccccctacatatcaagcagtagacatcagctaggtgtcctccaattcaattcaaacactctccacccggaaatagtatcagatctcacagtttgagggcccagtcccacaagactgactgttccctcctccccaccagttacaagtctgagcctccagaacttctgaccaactggcttcaagttggggtttccacattctcctctttgggtctgattaatttgcttaagtggctcacagaactcagggaaaagcttaacttagtttatgggtttattacataggatattttaaaggatacaaagaagctgggtgcggtggctcacgcctgtaatcccagcactttgggaggccgaggtgggtagatacctgaggtcaggagtttgagaccagcctgaccaacatggtgaaacctcgtctctactaaaaatacaaaaattagccaggtgtggtggtgcatgcctataatctcagccactcgggaggctgaggcaggagaagtgcttgaacctgggaggcagagattgcagtgagctgagattgcgccactgtactggtcaacagagggagtctttgtctcaaaaaataaaaaaaaaagaaaggatacaaagaaatagccaaatgaagggatacatagggcgaggtctggaagggtcccgagtacaggagcttctgtccccatggagttgggatgtacctccctcctggcacacgaatgagttttgcaccttcctgtcaacctccatgtattcaaaatgctctctggaagctctctgaatcctgttttttgagattttatggaggcttcattacataagcacgaatgacaactgtgtagaaatgtgattggacaaaatgggtatgttctcatactaaccgactgagtggggaagcccaccaaggcctgtccagattctccttgacctctctgtgcagcattcctccctccacagtaaagggcaggaccctctctagaatgagaatgagaatgaggatctctggacccacaatcagattagagtcttgccttggatcaggtaaaaggaggacaggagaaggtcagagagagagattctgtttcctgaggattgctcctgagccctaaagcaccccaacattataacagaagaccgtaaccagggctacggagggttgtaagccaggagccatggacagaaacatacatgtgtgtacagtagctcacgcttttacttttttggagtcacaacttcttaatggcttgatttcatgacatattttctttggtcttccagaactttcctcttaaaaaaacacagcaaaaaaacaaaatttgatttgaaatttttgagatttttttttaagagtcattagcaaatccactaatgaattttccccaagcagttaggagatatttctcttcattacacctttgggatttgagtgcttttgctaaaaatttaagttttttttcccactacggttttaatatgaacatgtggaaagacttcttgtatagaaaaatgacttgcaaaatattattttttcaggttctatggagtgatttcccccccttaggaaaaaagaactcaggaattttaagtttatatgtatatatatttattttattttattttatttatttattttaagacagactctcactcttttgcccaggctgggggttcagtggcctatctcggctcacagcaacctccgcctcctgggttcaagcaattcttctggctcagcctcccaaatagctgcgattacaggcgcccaccacaatgcctggctaggttttatatttttagtagagacagggtttcaccatgttggccagtctggtctggaactcctgacctcaagtgatccagctgccttggcctcccaaagtgctggaattccaggcgtgagccactgtgcctggcctttaagtttgatattttattcagataaatatggaaaaaaaattttagctttattggcaaaatttattattcatatagaaatcatctgataatctgatagattaagtacagccctgcaactggattctaataaaccaagtcctctaggtcattaagattgttattggacatgaattcagtcattgagaaaataaaacattgttttgttgttcctcagttgtggtttttgttttttttttaagatagagtttcactcttgttgcctaggctggagtgcaatggcatgatctcagctcactgcaacctccgcctcctgggttcaagtgattttcctgtctcagcctcccgagtagccgggattacaggcgtgcgccaccacacccagctaattttttgtatttttagtagagatggggttttactatgttggccaggctggtctcgaactcctgacctcaggcgatcaacccaccttggcctcccaaagtgctgggattacaggtgtgagccactgcgcctatccgtactgttttttttaccccttgctttttttttcctttctgctgagatgctttaggttttaacagacatgtgattgggccgaggggcatgtgaggaggctggacaattaactacagttagcttattgcatttatcagcaccagattgtgtgtggttgaaatggccaaggtttgatgttttgttatgaatgttccagtatatcttataaattacattttcttaaattgatttgttactacttacaataatgtttgatagtattaaataaaatcctacttattctgttaaattcatataattggtagaagaatcatagtccggttattactcttttttgagacaaagtcttactctgtcacccaggctggagtgcagtggtgtgatcatagatcactgtagcctcagcctcctgggttcaggtgatactctcacctcagcctcccaagtagctgggaccacaggtgtgcaccaccatgcctggctaatttttttttttttttttttgagacgaagtctcgccctgtctcccaggctggagtgcaatggcgtgatctcagctcactgcaacctccgccccctgggttcaagcagttctcctgcctcagcctcccgagtagttgagattacaggcgcgtgcctccatgcccagctaatttttgtatttttagtagagacagggtttcaccatgttggccaggctggtctcgaactcctgacctcgtgatccacctgcctcagcctcccaaagtgctgggattacaggcgtgagccaccatgcctagcccacctggttaatattttttattatttttgtagagatagggtctccctgtgttacccaggctggcctcaaactcctagagtaaagtaatcctcccatctcagcctcctaaagtgctggtattataagcatgcagttcttattctcttgttgatctgattataaggctctatttaagacagcataggcccaactggcagaagtaggtgatggctggatattgagaaataatgttttctttgcatgatccttaaggaagctgacctggttacaactcatgaattgggacataattttggagcagaacatgatccggatggtctagcagaatgtgccccgaatgaggaccagggagggaaatatgtcatgtatcccatagctgtgagtggcgatcacgagaacaataaggtatgtgtgtgtcgagaattttttatgtggtttggaaagaggctgtgtataatgatcataatgagagctcagaaacgtattccattcctaggcgtttccctagggatggatgtgcaaattacaaagtaccttgaaacgtggttgtgtgttttggggtgaagcacggttcatctaaatctggttaaaactatcatttggactttgttgtcaagcttaatggtgtagatttgagctctaggaaaaattactaataataatggctttttttggagttctggatttcagggtctggtgggctcaggctttatgttaaaaatttgtcatttcatttacaagttgtcattcattttaactctacaatttacatgtacagtttacacgtttttattaacttttgcagttaaacacatagtttgcctgactacaagcctcatgggagaaaggcccttccttgtctgtcttattcatagctctatcttattcatagctctatctccagtgcctagtaggagtatctggcatgtaacaaatatttgttgaataattaatggaatcatttactattgggggtttctgatagagaatactagttgatttgtgatactgtaaaacactttcagagactttaagagtgccgtgactaactcttagagtctgaactaaaagttgtgttaataaatatctggttctttcattttatttgaagttaaacagcataaagcagtgtgaggaaaacaatagttgcactgctgagttaaagagggtcggtggggagagcttaaaggagtctgattctaatcacaaaagattgtgaagtatttgtcctgactcctattttgagcttggctgtgggctaatgtgcaagccttccctggacacagagggcaagattacttctgcttttccctggctctgacaccctgctttctgaaatttctgcctcctgttctttttgtgatctttgattgttgcatctcatttttttttggctttttatgtatattttctgcatctcattttctttggctgttatgtgtaaacagttcctctgttactttgcatgttatgttttatttttcctctgcttgacaacttgtgccagagaaacatttttctacccctttttgtctactcttccaacctgtcaaactgttgaattttccttctcttttcatagtctctgcatttctaatcatgttcactatagttcagtgctgcccaatagaactttctgctgcggggcgggggatgttttgtgtctgctctgcccagtatagtagccactagcccagtggagcaattgaaatgtggctagaaactgaggaactgaattgtaaattctattttatttaaatttttaataatgtttgcctgtgatgggagacgggaatgggcattaactgtaaaaggacatgagtgagattactggaaggatggaaatgtcctaaaattgacttatagcaatggtttcaacacttggtaaagttattagaaatcactgagttatatacttgaaatggatcaattttgtgatatgtgaaatatgtcttaataaagttgttaataagccaacaaacaaaaacagcagtgtgggagcagaggaaaagtagcgcggatgtagaggagctgtgaagtcataagttgattattgttgaagctggtgaggggcacgggggcattcatgataccatcctgtctacttcatagatgcttgaatatttctgtaatagaaactgtaaaatatgtgactaggaacaaaatttaagtagccacatatggttggtggctaccatattgcatactgtttctctaagtaataggtcatatgcttcttggttatgaggatagtgtcagaacttgggagcaaaatgttttactttgcagactgcctgggtggacatgcatgctgctgactcttcctgctgccagttctggggctcttcaaaacagccctgtaagaacttgccagtgaggcatggtggctcacacctgtaatcccagcactttgagaggccgaggtgggcagatcacttgagcctaggagttcaggatcagcctggacaacatgtgaaactccatctctacagaaaatacaaaaattagctgggcatagaagcacatgcttgtagtcccagctactcaggaggctaaggtaggaggaacccggggagttcaaggcggcagtgagccaaggttgtgctactacactccagcctggatgacagagtgagactttatctcaaaaaaaggaaaaagaaaaaaaagaacttgctaatgagaatggggcctgggaagaactttttttttctggagctgccagtctgtatcaatgaagaacaatttatttattttgtcctgagcacatcatatttagtctgtgtttttctagtttggttgcccaagtaggagtccccttgtaagaagataatgtgcatcttctatgttttatttatttattattatttattatgattttttgagtggagtctcactctgtcgcccaggctggagtgcagtggtgtgatctctgctcactgcaacctccacctcccaggttcaagcgattctcctgccttagcctcctgagtagctggggttacaggtgcatgccaccacacctggccaatttttgtagttttagtaggatggggtttcaccatgttggccaggttggtcaactgactggtcaacaaactcctgacctcaggtgatccacctgcctcgacctctcaaagtgctgggattacaggcatgagctgctgtgcccagcctatgttttaaatgaattccttaataaaaatatttttaactgatgaaaagggcttacaggacaaaaataaagtagttccttgacctagaaagacagaacccatcaccctctactaggcaagcctatgaagagcagtttgccacaggtggacttctctgtggacagatgacattagtgaaaaggaatgtaggacctttgagattgtaacttcttaggaaggtttgctgaacggaagaggaagtcttatgacaaggatgcaaacagaagctgccagatcttcagggatgtgtaggcagaaagccagagttgcgggttggtccttttatcgttagtgctctccagctgcttgggagttgtaactctgacaaatcagtgaagaggtcttcttatctgttcactgtgaattttaactccattttaacctgataaaatggaacccagagatacatgatgttgatgaataaacccaccaaaatgacaactgcctgaggccccgattagaataaccagaccccttagacatctgtactgtaacgacagatttgggccgggcgcggtggctcacgcctgtaatcccagcactttggagaccgaggtgggcagatcatgaggtcaagagatcgagaccatcctggtcaacatggtgaaaccctgtttctacaaaaaatacaaaaattagctgggcgtggtggcatgcacctgtagtcctagctactcaggaggctgaggcagaagaatcacttgaacccgggaggcggaggttacaataagccaagattgtgcctctgtagtccagcctggtgacagagcaagactccatctaaaaaaaaaaaaaaaaaaaaaaaaaaacagatttgaagatgttttttaaaaagccagttagtatttctgtgtaagatgaggtctttgctatctttctgaaagtagctcctttggtgtctgatttggtggttacaggcacctttggagggtctcatacacttggctctcaggggcttcatgattgttgtctggggtgaaagtgaagccattttggcatctgcagagcactttggagaccccgacctaagaagtaactatgctcagttttccctaagcctcttctttttttgataacttcaggaggtctggaaaatgaccgcagttttagagctcctgataaaaccctcagccttaaaagggagttatcctagtggttctgtactccagggtgggaaggtagtgtagagactttttgagacactggtcttgctggttgatgaaaatgtttaggtaacaattggggatttaatttatataaaatgtactattatgcctattactaagctcaaatatttaaacaactttaaacttggatcatccatataagtagccaaagaaggagaagaaaccccttctcctgcatttctgaattgttttgtctgggacaacattaacctacagaggttcttaattcttgtcactgcatgagtggcatgcctgaggtgaggagatttcaagtctgatggagctacgagctctctgttgtgctattctgcttgtccttaagtgggctttgactgggatgtttggtctcagtatttgtatagcttgcttaccttcgtaagaagaattatagatccttaaccaagttcacatcagccatttagcattctatggagggaggttcccagttccatatcagtggcctttggaggagactgtggtggccttgccataactccagggtggctctgatggtggttttacattaagagtttgtctctagagaagacacaaacattgcatgggaatacatttttatgatattattttgggtccttattgccttttttctctcaagatgttttcaaactgcagtaaacaatcaatctataagaccattgaaagtaaggcccaggagtgttttcaagaacgcagcaataaagtttgtgggaactcgagggtggatgaaggagaagagtgtgatcctggcatcatgtatctgaacaacgacacctgctgcaacagcgactgcacgttgaaggaaggtgtccagtgcaggtgaggagtctctccacagggattttgggaagttggtataacaagatgtccaaaataagagaagactgaacttgcaggggctttagaatcaactgaaaggggtgtgagtgtgtttgtttacatctacctcttttgcccttcacagcaagaaattgctttctgggcctggcacggtggctcactcctgtcatcccagcactctgggaggctgaggtgggagaaatgcttgagaacagcctgggcaacatagtgagacactatctcttaaaaaacaaaaaacaaataagaaaagaagaagctttctggaaagcagtgtgacattatgtaacaaaatccttgaccttgcatgctccttggtttagcagtcctatagttaaaagaatcttttttttttttttttttcctgagacagagtcttgctctgtcgccaggctggagtgcagtggcgcgatcttggcttactgcaatctttgtctcccgggttcaagtgattcccctgccttagcctcctgagtagtgggactacaggcacgcaccaccatgcccggctaattttttgtattagtagagacgaggtttcactacggtggccaggatggtctccaactcctgaccttgtgatccatccaccttggcctcccaaagtgctgggattacaggtgtgaggcaccgtgcctggcaaaataatcttttttatttaatttaatttatttatttattttgagacggcgtctcgctctgttgccaggctggagtgcagtggcgcgatctcagcgcactgcaatctccgcctcccaggttcaagcgattcccctgcctcagcctccccaataactgggactacaggtacgcaccatcacgcctggctgattttttgtattttagtagagacggagttttagcatgttggccaggatggtctcgatctcctgacttcatgatctgcccaccttggcctcccaaagtgctgggattacagaggggagccaccgtgcctggcctttattttctttttgagacagggtctcagtctgttgcccaagatggagtgcagtggcatgatcatggctcactgcagcctcaacctcccaggctcaatcagtccttccacctcagcctcccggatagacaggactacaggtgtgtgccacctggctaattttttttgtattttttatagagatggggttttgccatgttgcccaagcttgttgtaaagtcctgggctcaagtgatccacccttctaagcctcctaaagtgtggagattctaggtatgaggcaccatgcctggcccaaataatcttttatttctttttttttttttttgagacggagtcttgctctgtcgcccaggctggagtgcagtggcgtgatcttggctcactgcaacctccgcctcctgggttcaagccattcccctgcctcagcctccccagtagctgggattacagtgtgcaccaccacgcccagctaatttttgtgtttttagtagagatggggtttcaccatgttggccaggctggtctcgaactcctgacttcgtgatctgcctgcctcagcctcccaaagtgttgggattacaggcgtgagccactgctcctggctgcccaaagaatcttttgggcaacagagataagatttaacaagggtataagatttaacaaggtttttttatggctacatcctaatagcaaaattttggaaacaatcaaaatgacagtcttgggatatgaatgttatcatgattctatatactggaatagtgtggaggaagtaggttacaagttagaaagttacccaggttttcattttttatatacactgatagaccagtgcctggcttagaagtaaaagggttaaacttcagttttctggtgaataattgagatttaactggatacagtgcatattaacgctgtaaatactgatggggagtagagttctggctgccgagtgtcttagctatggattgccttgtggccccaccttgtcttttttttttttccttgtctttttttttttttttgagagagtctcgccctgttgaccaggctggagtgcagtggcgcgatcttggctcaccgcaacctctgccttccaggttcaagctattctcctgccttagcctcccgagtagctgggattacaggcatgtagcaccatgcccggctaattttttgtatctttagtagagacggagtttcaccatgttggccaggctggtctcaaacccctaacctcgtggtccacctgcctcatcttttttttttttttttttttttttgagacagaatttctctcttgttgcctaggctggagtgcagtggtgcgatctcggctcactgcaacctctgtctccggggtccaggcgattctcctgcctcagccttctaagtagctgggattacaggagcgcaccaccacgcccagctaatttttgtatttttagtagagatggggtttcaccatgttggccaggctcatctcgaactctcctgacctcaggtgatccacccacctcggcctcccaaagtgttgggttgggattataggtgtgagccacctcgcccagcccatcttgtcttttttaaattaatgcgttaaatgaatgaaaaccaagggcaccaagatgtttcacaggtgattgctgtgttcccattcttttctcctatagtgtggcatttatgtgacctcacgcacattaggaagggacaaagtgtgtgcaggtagctctagcagcggagatgtctgatgatgtaggagtgggtgacggagccaggaggtcttccccggtgatcttcaggtcactgtaacgtaactgtagcgtttgatttgatatggggccataatttgaattgctctgttcctgtctgctgttcttctccagtgacaggaacagtccttgctgtaaaaactgtcagtttgagactgcccagaagaagtgccaggaggcgattaatgctacttgcaaaggcgtgtcctactgcacaggttcgtgttcttgttgcttccttggaatgctgtgggtcaagtgtgtgtgtgtctttgaaaaacaagattatgttttgttcagatgagagacaccttatttttaatctcatatgccgggttgagtttctggcactccttagtttgtgacacttggctttggtgggtttaagacctgtttctatttctctttcatttccatcactctcctctttctcctcacagacatccactctactgtggttaatatttgcctggatatgtgtatatccttgaaagatcatatagtgttattttgtgcatgtatgtgtttttaatgtgccaaaatgatattctaccttaaatttacttttaaaaaattcagtatcatgttttaaagaattacccatattgtgctacagataatataacaaggtttttaatggctacatcctaatagcaaaattttggaaacaatcaaaatgacaatcttgggataatgaatgttatcatgaatctatgcactggaatagtgtggaggaagcaggatacaagttagaagggtaaccagtttttctatatgtatctatatgtatttcactgttggggacacctacatattgtttagttatatgattggctgtgttttacttacaagtcaccaagtggtagctacttccattgccttcatccccttgatattccagataggacacagatcacatcctcctacgtcccttcaggaacctgtgtgtttctctgggtactgaggagtgtcattgtgtagtcacagaggcaggatgtgctggtctctagagcaccactgctaggttgcctgtgtctgaggactccttatcctgacgttctggccaacgcttggaattaccctgctgtcctattagcatgatgagtataaagtaatctcttgttcttacttttttttttaacagcccttgtcctaatgcacttacttacatttttcttgagcatctctttatatttttcagctattcagatttctcctgtgaatagccagttcatatatttggttcattttttaaaaattgggtttcatgttatttcactactgtgaatttggaggagttcttatgtaatcatccatttgggcatacgtctcctatctgttgccattctcagaacagaaatctttaacgtaatcaaatccatcattttgttgtgtgtgtgtattttttaaacacatggttcagaaaagccatggcggatggttaaaaagatattttccacagctgcttctattagcttcataagttgtccttttacattcaggacttgaatctttctggagctaacctttccaggtgtccagtatcttttgttcggtcaattgttgctttaaaaatttcaaagctatgttattactaggtatataaacggacatatctctacatctttatctgctgttccttaccagtatataatgttccttttttacccttgcgatgttttttgacttaaattgtcaaaaagcaatattcagtttgctattctagtttttttgttcctctgatatatctatctgtcccattcttatatttttcaaaatttgtctctcttggttggttggtttgattttgtaatagctttattgatacataattcacactcatgtagtttgcccatttaaagtgtacagtttaatgatttttagtatattcagatttatgcagtcatcacaattaattttagaacatttacattactccagaaagaaaccctgtatcctttagctatgatcctccaatccccccattccccacaactcagagcaaccactaaccaccctattctttatggagttgtctgttttgaacatttcatataaatggaattatacaatatggtttcgtgaccacatattgtatgactggcttctttcactgaacatagcatttttaaggttcatgtatgttgtagcatgtatcagtacttcatgtacttttattgctgggtaaattccattgcatggatatgccacattttgtttattcattcattggttgatagacatttgggttgcttccacttttttgctataacaaataatgctgctgtgaacatttatctatgagtttttgtgtggacagttcctttggatattattcaggaatagaatttctgggtcatgtggtaactatgcttaatcttttgaggagctgtcagactgttttccaaaatggctacaccattttacagtctcagcagcattgtatgagggtcccagcttctccatatcctcaccaacacttgttatcttttttattgtaactatcctaggttttgtgataaggatgcaaacagaaagctggaggtcttcagggacctagtgaatgaagttgtgtcctattttggcttgattttggttttccgtgtgcatagtatgacatgttgcccatgtttttatcttttgggatctgtcactatcacattactttgccaaatgttaggaacctgatggcccggcacagtggctcacacctgtaatcctagcactttgggaggccgaggtgggcagatcacgagatcaggagatcgagaccatcctggctaacacggtgaaaccctgtgtctactaaaagatacaaaaaattagctgggcgtggtggcgggcgcctgtagtcccagctacttgggaggctgaggcaggagaatggcgtgaacccgggaggcggagcttgcagtgagccgagatcacgccactgcactccagcctgggcaacagagcaagactccatctcaaaaaaaaaccaaaaaaacaaatgttaggaacctgaatatctaaatcaagctttaaagaagcatttgctagctatgctcaatgtttcatcttcactgtaataataaaatagattgagaaaaatgctttcttttaaataaacgtaagtaaaacaatttgaaaacgtttgttcttatcaaacagccttttgttcccttgatattttatacaaaatagtagatagcagaggataagttcctgataaggaatcagtattttctagcaggaaaagctagagaacaacaacctcaaaaaaaaaaaaaaaaaagaagaagaaagaaaaaaagcaattagcatttcacaaccagcagcagcagcatcacctgggagcttattagaaatggaaattgtcagtcccctccctggatctactgcatcaaaaaatgtgggaagggaggccagcagtctgtgctgtgtaaccttctgtcaggtgatttccatgcatgctaaactttggggaccatgctagatagatgataccattttcagaattattttcctacctgtctaatactctgactttagtcttttaagaacagatgctcaacagatatttattgagcattttttaatgtatcagggcagtatcatataccaaaaatacaataatgatccacaatataaaccttccctgagctcactggacatcatactttcagtaatagtttgttaaatgactgttgacatgatgaatgcccagtgctcatgaaaggttttatgagaaccagaggcaaagtgcctggttatctgttgggtacttaataaaccatcacttttgtttgaaactggccagattttctgtacattttgtgttactgctctgaaaccctctaagtcagaattcttttgattggcttcattcttcagctgaaaggccagtccagagctgtggatatatagtccattgctttcataaagtgttttttttctcctcctctatttgtgttgacttttagctacttgtgctattcattttccagaatgattcactcattccatcctgtctctcccagtttaactttctttggtgggttttctttggcattattggcctgggcacagtggctcatgcctatcattccagcacttggaaggccaaggtgggaggatcccttgagcccagcagttttacaccagcatggtcaacacagggagatctcgtctctcaaaaaaaaagaaagaaaattagccaggtatggtggcgtacgcctgaaatcctaggtacttgtgaggctgaggcaggaggattgccggaacctaggagtttgaggctgcagtaagctatgatcacacccctgccttccagcctgggtgacagactgagaccctgtctcaaaagaaaaataaaaagaataattgatttatttaagaaatatttgtagtatacctataatatgatagggattggagataacttaatagatttgatcattgctgtcatggggctttccagtctagtagagggaaaacagaaaataacattaaatatatatatataaattgcaaaacatatgcaatgaaggagagaaggagtgtgatagtgcataatggaagtgggaggccacatcaacttagcatcctcagggatatctcagaaaacctttgagacaaaacttaatccataagaaaagccagctaattgccccaaaagagtggaaacaccagcattccaggtagaaggaatagtatctgttaatattgaaggaactgaatggaggttgtcatagccaaagcagtgggctgtgggagagttgtgtgcgatgaagtcagggccagatagggaaggccgtggagttcttttaagccttcatacaaagtttgcaatttattctaagtaatagcacataggatattcttttatatatgactgtgagatgcagaagtggagaccatgcattctaactggggcttgggaggccagggactcatgcagcctagcctggcacatagccaggcactcccatttaaatgctgattgctggtgagatgcaggctcttgtcctagctctgtaggtcactttttgcttttgcaaggtaagatgctcacttgtatgagaaacagcgtattatgcacctgtagaactggtggacctgtgactcattctttttgttatgactggtgtttgcttccaggtaatagcagtgagtgcccgcctccaggaaatgctgaagatgacactgtttgcttggatcttggcaagtgtaaggatgggaaatgcatccctttctgcgagagggaacagcagctggagtcctgtgcatgtaatggtgagcagttttattcccagtccagcagcaggagaaaacatggcctttgtctgccaggctcccttcctccatttggaggttgtgcgaatgacagcagtggtgagatccaagccgaggatgaggggatggggaagggcagggtggtgtctggagacaggcatctctgcatgcagatccaccatacctgggagacctatcctgttggtgtttcttcttgctgcagtttcaggccatatggcaggctttgaggtgggagaggagggaattttgttgggggtgagtgggtgggtaggtagaggtgtgtcctagccttcctctgctccatatcatacaaaccacaaaagcagcagtagctatctacattacattggcatggaactaggatactcctgcaacaactccaccagagagagctgattccaggacctaaccccactagatgaggatttttgcagttatcaagaaggctgggtctgctcccctctgatctcttagagcagcctggggcaggagcctctctcctgctggcctgtcagttttccttaggtttctgtgctattttggaacccctgggtttgagggcatcctcatggactggtcagggactggctggactctgcttcccaccccacttaaaccatgggagtcgatgagggagttctcttgctttcaaaatagacagagagccaggtgtggtgactcacacctgtaatcccatcactttgggaggccgaggtgggcagatcacttgaggtcaggagtttgagagcagcttggtcaacatggcaaaacgctgtctctactaaaaataaaaaaaattagccgggtgtggtagcgtacacctgtaatcccagctgctagggaggctgaggcaggagaattgcttgaacccagggggcggaggttgctgtgagctgagattgcgccgctacactctagcctgggcaacagagcgagactccatttcaaataaataaataaataagtaaaaaataaaataaataaaagacaaagaacccggtagttaaataaaatcactgggttggaagctcaccatccatacagtggagtgaggaactcttccaagttcaataatgtgtaggtaaagaagataggttgagggcagtgtctcacatctataatcccagcactttgggaggccaaggtgggtggatcacttgagctcaggagttgtttgagaccagcctgggcaacattgtgaaacctcacctcttaaaaaaaaaaaaaaaaaaggtaacacgtagcagatgccaaataaatctgttgtgttgaatgccaagaggcttggggtgctctggaaggacagagcccgacacagtaaaagtccaagaaatattttataaattagtgaatgatgaaaaggttttctttttttttttttgagatggagtctcactctcgcccaggctggagtgcagtggcgcgatctcaggtcaccgcagcctccgcctcccgggttcaagtgattctcgtgcctcagcctcctgagtagctgggactacaggcaagcaccaccacatctggctaattttttttatttttagtagagatggggtcttgccatgttggccaggctgttctcgaactcctggcctcaagtgatctgtccgccttggcctcccaaagtgctgggattacaagcgagagccactgctcccggccttttctgaaaaggttttctttttgcttgtttttgtgttctagttgatttctttttctcctaagtatggtttaattttctggcatttctgccattcttatgtatgcccacatggctcacagatgcccggtgttttatcctgtgacctgtcagagctgttcttgggaggagttgtggagctttggctgcagggctcatgctcctggggtcactgagctccccacccaagggtggacagttgtgtcccagctgctctcgctttcagggagccagtgtgggccctgaggggcacactttagactgaaaaaccaaggattgaagtcagcagggtgacaagaaagttgggacaaagggaagcatttagaagagcattgtgaggggcttgaaggggagagaatagttagactttgaagagaggtcttgaatctagaatggatttttctctgcatttttttttaaaccttgtggcctctgtcactgaaggctgaggagtgtgacctcagaaactactccttggtgggggctatggatagtattagctatttaaataaaaaataaatgtgatttcttacctctttgggagcatggtcagggaggaaagaggaggcaggaggagaggcaggtctcagaacaatccagctgtcaatgcgtgttctctgttccagaaactgacaactcctgcaaggtgtgctgcagggacctttctggccgctgtgtgccctatgtcgatgctgaacaaaagaacttatttttgaggaaaggaaagccctgtacagtaggattttgtgacatgaatgtgagtatttatgtacagctttttctgtaacagccagataggaagtttttattttgtaagtacttgattttgcagatgaaaacaaatcaaaacacaagtggggctacatccttctggcccattgttatctacgggtattacttaggaggagaagacggagtgctttcaggtccctgcctgtagtttccttctgtggtgggaggctttgagcccagagactgagaaggactggggtggggactttatggtaaagttggttggtttcaggcagtgggtcctaattatgttttcctagattacttacagaactgactaagattgcaaaattattcagggtgtgattttgaaacaggtgctgaatgagtaggaaagacctagaaggctgcttgacttacttaagccagacccttttgttctctagagaagcataatttttctcatgcagaatgatgggagagggttttaagatttacgaggcttcacagggagtctggctgtgttgttcactgtccactgtgtatgtgtagagtccttactggaatgcctcatctttagcaaactggtttccttgatttttgtctcctggtaattctaaatcacttgtaaaaatggagtaattatgaaagtgttaatgacagatgttctactttcttgggtactcattacgcggaagttattgccttgtgtcaaagatgggaaaacgtttgattttaatgaagccctttacatgtcagttatttttataaagctacattgcttctgaatacattgtgtttgggaatgatgctgtatgtatgttttttcttcatagggcaaatgtgagaaacgagtacaggatgtaattgaac

SEQ ID NO: 15381 - DNA, 56341 bp, Homo sapiens
ctgggggcgtcgagcctggcggtagaatcttcccagtaggcggcgcgggagggaaaagaggattgaggggctaggccgggcggatcccgtcctcccccgatgtgagcagttttccgaaaccccgtcaggcgaaggctgcccagagaggtggagtcggtagcggggccgggaacatgaggcagtctctcctattcctgaccagcgtggttcctttcgtgctggcgccgcgacctccggatgacccgggcttcggcccccaccagagactcggtaaagacccaggggagttggcttaggccggcgcctggagcgctcgtttgagggaagagcaggggagctgggtctatcaggtgtttgggggcggggtattggcgatggtggcgcgtccctaagttttcagtgtagaagggggtgtggctctcggagtttggggaaagaataaaggagatgggcctgtctctgagtgggaaagggctactggacgggctccatgtagtgactgagcgcctgagaggggtttgctccctagctttgtgttcggggagggtgttgggaaagcggtaaggagtagggtggctggatcttgtttggagagggagatgtggtcagggttcttgccttagtagggaacaaatctagtgttgtgtgttcctaccagagccagaaaggaagggcccaaagctccagaattcttcctggtcctcgaaggagggaactagaatttctgctgtaggaggtacttatgcagtaatctcgttgggaggcggagactggagttggagtcttaagagttgtgtttttgcgaacatcctaagcacgttcttggttatttcaattgtagcttattggaggtgcttgggagatggggggaggcggaaacctggtaagccaactcgtgatgctgccactatgaatgctttccttgcacttttaaacaaagaaattatcaagagtgacgagtttgatgaatttagaggctagaaagtagagggttcctatttcattagattttccagagagattggattttaaggatggagatgcattaagggatctgaactttggtggaagtaagtttgcgtgaacttttagtgtattttaaaatccttttatctttcaaaaattgacgtgtaagatactttaattagtaataaagtgtgaaataatgttttcccagtgtgtgaaattgtaggcttgcatggttgtactggttcccaaatttcaccatgataccatgtgtagtattttttttctttatatttagtggacagaaattgtaatggattggtatggatactaaaggtgttgagagtgttatcacttgaacagctgtcttatgattctttccgattgaaatggattacaagtgactaatgaaaggcaagggatcttgttaggaagtgctgagaagtggtaagtcagtacaaattgaaggacattttgaggtaggattgtggttaggatggagggatagggtaagggtcttcattttaaggataaatgttagtaaaaagaataaatatgtattttgagatattaaaattatatttgcaccaccctgacacaactgtttcacttatgttattaatctgttgttcgtaggtaaaaataagcatgagtcccaaggaagcatacagtttaaagagaaacattactttctagatcaattcataacatttgcagatcgtaaggttttttagaccattttttttttccaagacagagtcttgctctgttgcccaggctggagtgcagtggcgcgatctcagctcactgcaacctccgcctcccggggttcaagcagttcacctgccttagcctcctgagtagctgggattacaggcatgtgccaccacgcccagctaatttttgtattcctagtagagacggggtttcaccatgttggccaggctggtctagaactcttgacctcgtgatccgcccacctgggcctccctaagtgctgggattacaggcatgaaccaccgctcctggcccatgtgtttgttttttatttgcaaaatgcagaccacctgtgccagaagaatgcatagacttttcttttttcttttcttttctttttctttctttttttttttttttgaggcagtgttttgctcttgttgcccaggctggagtgcaatggcgtcatctcagctcaccacaacctccgcctcccgggttcaagcaattctcctgcctcagcctcccaagtagctgggattacaggcatgtgccaccacgtccggctaattttttgtatttttagtagagatggggtttctccatgttattcaggctggtctcgaactcctgacctcaggtgatcagcacacctcggcctcccaaagtgctgggattaaaggcttgagccaccaggcccggcctctttttttttttttaaacgaaatatttgaaggacacacaagtattatacgtggcattggaaatacaaagatcagacgatatccatcttcaaatggttatagcatagggaaatagacattcatttaggacacttctaaaacagcatagaggagagtgctagagtacgttatagcaagtgttatcaccaaatgaatcttagagatcaagtctagttttcaaataaaggaggaggaaaatgagtctcaggaagatgctgtcagttgtcaatgatgaacataggccttgtgggtatttttcttttgaagaatgactttttttttcagtttgtttgacagcttacaatataatttgttacttaaccttaccattagattgagttggtcaagactagcaaatagtttcatagttgaaaaacatgctttattatttattttttatgtttattgtcctacaaatactactatattgcagtactcaatatcgattaggcatatgacaacatttttctgaaaggcaaaaaatacctaataaaatgaagcctggtttttagagtcctctatgggtcaccaaaaatgatttcaattgaactgttatgaattgcataatttaggaaagttatgagtcatatgagcttagtcatgatgatatcttgttgaagttgcagctggggtgtataagtctcactttgatttcaaaatcgttttccctttgtgttacttttaataaaagaggatgtagtgggtgggaggaaaaaatataggtcacagatgagggatgagaaagtttgtatctgaaacatgtattttcaaatttaccttgaggttattggcatggggattctccatattgcagtgctgatttcattattgacagcaccattttactcagtattttgacatctggctttctcttttgatgttaattttgcttactggctgcattcctttgaaacctaaatgcttaactgccctaactgctccaagggagatttaatgtaactctgctttatattagtctaagagataaaccatatttcaagagtagaatggagaggaattaagcagataattgtgatggggaaactggagagatccttttgactttcacaggatttcctagaacattaaatataggtttcctccaaggccaattgtggttgatttttggatccttcaccattttctatttgtgagataataagtgtatacagctggaagtgtaatgtgaagaaagtctgaaaaagattgataggaaaggaggacaggaatgggcttcattgaggtaacggaagtgaaatgaaaggcttttcatatatgggttgagcatccctaatctgaaatgctccaaaatttgaaactttttgaatgctggcatgacagcacacattacccctaacacacgattttttcactgttagtggtatattttttactgtgtagtacttatgtgtgaataggtataacaaaacgattacttattgtagcatgtaaaatcagtcaggaatgatggtgatgccagacaaccacagattatttatgtgggtggccgagacagtgacacctttgctttcgaatgcttcgttgtacacaaactttttttcatgcaaaaaaagttacttaaaaatattgtttaggccaggcgcggtggctcatgcctgtaatcccagcactttgggaggccgagctgggtggatcacgaggtcaggagatcgagaccatcctggctaacatggtgaaaccctgtctgtactaaaaatacaaaaaattagccaggtgtggtagcaggcgcctgtagtcccagctactcgggaggctgaggcaggagaatggtgtgaacctgggaggtggagcttgcagtgagccgagatcgcgccactgcactccagcctgggcgacagagcaagactccatctcaaagtaagtgaataaatgaaacataaatgaattttatatttagacttgggtcccatccccaagatacctcattatgtatatgcaaatatttcaaaatttaaaaaattctgatgaatgaaacacttctggtctcaagcattttggataagggatgctcaatctgtatctctttatttactcctaaaatcagccaaggaaatgggcatctctccgttcccccccttccttttttttttttctttgttgttacatgagttgtactggtttcacttcatttgacagtgttctgctaatgactagacgtgtatctctgacctggacttgttctctggagttcatattcagctgcccatttggcacttcaaatataacatgtccaaaattagttaccttttttttttttttgagacagagtctcactgtcacccaggctggagcgcagtggcgcaatcttggcttactgcaacctccacttcccaggttcaagtgattctcgtgcctcagcctcacgaatagctgggattacaggtgtcccccaccacgcctggctaattttttttttttttttttttttgtatttttagtagagatggggtttcatcatattggacaggcctgtgttgaactcctgacctctggtgatccacctgcctcagcctcccaaagtgctgggattacagacgtgaaccactgccccagccagttacctattcttttgattacaagaatgagtagctggacacagtggcttacacctatagtcccagcactttgggaggctgaggccggcggatgacttgaggccaggagttcaagaccagcttgaccaacatggtgaaacctgtctctactaaaaatacaaaaattagccaggcgtggtggtgcgtgcctgtaatcccagctactggggagactgaggcaggagaattgcttgaacccgggaggcagaggttgcagtgtgccaaggttgagccactgcagtgcagcctgggcagcagagtgagactccatctcaaaaaaaaaaaaaaaaaaaaaaaagaatgagtatcggatacaggtttagcctaggactaggcagggctgctggtaattgtggaagtagtctcattgcctaacctgaaacttgcatcctggttactggtcttgctggagagtcttggctcaggttacgtcccaggtctgttgaggagctcttgatagggaattagttgaagcagctcatactctatcctcctttactggtataaatccataaaattgtttagttcccaggctctggggtccctggcctagcagagagcactgctccctttttctcattccttagtcccaacaacccgcacctgacacttactacacgtggcctgcttccctgtcctgtgtgttttggggggtgctgaagaggaaggctcctgtgtcttcagcacaaacacaataaacacttcacagcagtactggctttatgttttccatttctgatatcagaagtaggagcatgacattgatagtgtcattttgggggaacttttcgtacttcatgcagcagagcagtgaagagtgagctgagtgccttggggttctgcagtacactctcaagtagtattttaggaaaatgcaatttgctgaaaaaataaaagaaattaatgtaaaaaatccacaagctgggcgcggtggctcacgactgtcatctcagcattttggaaagctaagggggaaggatcacttgagcccaggagtttgagaccaggctgggcaacatggcaagaccttgtctctacaaaaaaatagaaacaaaaattagccaggtgcggtggcatgtgcctgtggtcccagccacccggaggattgctcatgcccaggaggttgaggctgcagtgagtggtgattgtgccctgcactctagcctgagcaacagagcgagaccctgtctcaaaaacaaaacaaaacaaaaacccacacgtttccagaaccttctcatataacactttatttacattgttcttaaatacgtgtgggacggttatatacataccactatacttatgtgtatatatgttgatatacacacaaaattatatacataatttttgtttgtttgtttttgagatggagtctcactctatcacctaggctggagtgcagtggcgtgatctcagctcactcactgcaacctctgccacccgggttcaagcgattctcctgcctcaggcttctgagtagctgggattacaggtgcctgccaccgcgcctggctaatttttgtatttttagtagagactgggttttaccatgttggccaggctggtcttgaactcccacccttgtgatccacccacctcggcctcccaaagtgctgggattacaggtgtgagccactgtgacctgccatatacataattttttaaagtttcacgattagttttagcttaaaaatgtcagctctgggcttaatgaagaaaatatggatatactttatgtcaatgcattaaagtgaatggccataaaagcttatcccagagacaaaacaattcagatataagagaagtgggagagtggaaggtttatctaatcttctgtaggcaactccacagctacaaccagaaggccattttgttacaggcctgaaagccccgttttctttttattcttctttgaaacctttagaaggaacaaagtattggctactttttaccgctgatgtcagtgttaagaatcttgtgataacatagatttactctccctgctgaaaatcactatgtggctcatcagtaacacaactagacatgatgacttaatgcaaaggaagtcctatgtaaatgagcaatgaaattgcaactgtgtataaggaacaaaatagaatatgaaactccagaatcttttgttttcatttctgtttctcccaaggctctatcattcaaaactccagaatctttcagcatgcaattgtctcctgatatcagcccctctcttgttttgttttcttttttttttttttaatcacagtgagccacaacctaggagtcttttagtggtttctacttggtttgctctgcagcctaccagcagatttcctacattccggtcttgttcccctctagcccattctccacactgcagtcataatgaaatttctttcttttttgggggggatggagtctcactctgtcacccaggttggagtgcagtggcatgatctcggctcactgccacctttgcctcctgggttcaagcgattctcatgcctcagcctcccaagtagctgagattatacgcacctgctaccacgcccagctaatcttgtatttttagcagagacagggttttgccacgttggccaggctggtctctaactcctgacctcaagtgatcgcccaccttggctttctctctctttttttttttttggattttgagacaggatctggcctcgttgcctaggctggagtgcagtggcacgatatcagctcactgcaacctctgcctcctgagctcaagccatcctcccacctcagcctcctgagcagctgggactgcaggtgtacaccaccacgcctggctaatttttgtattttattttatttatttttttggtagagacggggttttgctgtgttgcccaagcttgtcttgaactcctggggctcaagcgatctacccatcttggcctcccaaggtgctgggatgacaggcatgagccaccacagctggcctataatgaaatttccaacttacagctattgccattatccaaagcccagaatccctgatttccttccatagcccttcatggcctgaccagtgcctgactctccagcctcacacttcatattctctctgtactgctctgcactgtagcctcattgagttgctttcacgtctttaagtgttgtgttctattttttgtggaattcagcatatgttatgcccttgacctaaggcctctcctttcttttccttctctggggtgctgcctcatccttctggtcttcaaaaccgtttccctgggaaaacatctttgactcagcaggcagggatcatgcccctgctgtgtctgtgcataactttctgtggctacttctgtcttggtctgtgatgtactttataataattttggtctttcctccagtgtcacaatactggaagtctgtttctttttctctgtgttgtatccttagtgcctgaaaggtaggaggttctcaataaatatttgttaaataatcaagtaaatggagtctggtggaaaagagaaaaaataagtgtagaatgtgtgtgcaagaaaggaggggtagggggatgaaaaagataacaaaagcacataacaaaacaacaaaaagcaaaaacaacaaaaaatgcagatgacaaaaaagataacaaaatgatgactgctgtggcaacttgtagaaagtaaggaaggtgctctcattctagagagaagtaggcagccattgtagttttttaaagagagaatatgggctgggctctgtggcccacgcctgtaatcccagcactttgggaggccgaagtgggtggatcacgaggtcaagagatcaagaccatcctggccaacacagtgaaaccccttctctactaaaaatacaaaaattagctggataggtggtgtgcacctgtagtcccagctacttgggaggctgagacaggagaatcgcttgaacccaggaggcggaggttgcagtgagctgagatcacgccactgcattccagcctggcgacagagtgagactccatttcaaaaaaaaaaaaagaatatggccagacactgagctgagatagacagtgcggcagtgtctggtattaactgtaataaactctactgtcagaagcaggtggtttatacttaagtttattgagagaattggatatggataagagataaactcttgggaaatggggagaaatataaattctgttgtaaagcctgtaaaaaattgagattactagtggttagaattttggaagtgaagtgcagtgaaatattgagtacctgagaggttacttgttagtgaaaacacaatagcagtagtacgtagctacagtttggctccaaaggaagaactgtttttactatagtttgtaatggcttcagaatcttcaatttgagatatccagttattaaaagagaatcaattgcagttgaaatgcattagttaagtattttaaagtgctttagcaagctacatttaaaaagtgcttattatagaaaatatacccaaaataaccaatgatgttactgtcttgtgcttattttttctagacctatttttatacatagttaagattatacaatatgaatatttctgaaatctatatttaacattataacatatgtatttttccatgttctttctttttttttttttttgagactgggtctcatcctgtcacccaggctggagtgcagtggtgctatcttggcttactgcagccttgacctcctgggctcaagtgatcctcccgcctgaaccttctgagtagctgagactacaagcacatgccaccatgcctggctaattttatttttactttttggagagatgagggtctcactattttgcccaggctggtctcgaactccttgggtcaagcaattctctcaccttgacctcccaaagtgctgggattacaggagcgagccaccgccctcagccccatgttcttaaaaaccttttgtgaacgacatttaaaatagttgcagattttttcccctgtctttggaagtgttacaacatccaaccatttcacagttactaatttaccatcattctggtttttgtccttgaaaataaggcaaggctgaataatgaacatctttgtggctaaagtttttttctttactttgagttgttaccttcctttagcttagttcagtggttttttctttttcttttttgagatggagtcttgccttgttgcccaggctggagagtagtggtgtgatctcggctcactgcaacctccgcctcccaggttcaagcagttctcttgcctcagcctaccgagtagctgggattataggcgtctgctgccatgcccagctaattttttgtatttttagtagagacagggttttgccatgttggccaggctggtcttgaactcctgacctcaggtgatccacccgcctctgcctctccaagtgctgggattacaagtgtgagccaccatgcccagccagttcagtgattttcatatttgagtgtgtcagccttgcctggaagccttgttaaacacagactattggatcccactgggcggatttctgtttgagcaggtctgaggggagacctgagcatttgcatttttaacaaattcccagttgatgatgatgctgctggtttgggaactacactttgagaactactgggctatattattgacaatgaaactataatgttgaggttaagttcctaagtcagtaggagtgattatgatcttgaatgaaactgagttcatgtaccaacctgtatcagggaaattgaagaactaaaggaccatattgcatttcagcactgagaattcgtgcagtttgtgaacatgtgagtgctgatatgtgcaaggtttttgctgagtattgtgaggcaaggatgttgtaatgaataaaaaatagccctttttggctttttttttcttcttttgagatggagtcttgctctgtcgccaggctggagtgcagtgatgtgatctcagctcactgcaacttccgcctcccaggttcaagcgattcttctgcctcagcctcatgagtagctgggactacaggtgcccgccaccacgcctggctaattttttgtattttggtagagactgggtttcaccatgtttgccaggatggtctccatctcctgaccttgtgatccccctgccttggcctcccaaagtgctgggattacaggcgtgagccaccgtgcccagcccggccttttttcccccgcctagagatggagtcttgctctgtcgcccaggctagagtgtagtggtgcaatctcagctccctgcaacatctgcctcctgggttcaagcgattctcctgcctcaaactagctgggattacaggcatgcaccaccatgcccggctaattttgtatttttagtagagacagggtttcaccatgttaatcaggctggtctggaactcctggcttcaggtgatccttggcctcccaaagtgctgggattacaggtgtgagccaccatgcatggcctcatttgggaaacttttgatatcagaatcttaggtttttcattagagattgtcagatttccatattcctctggaaggtaaaggcctaattgctagcattctggaagccagttagggtaggagggtaggagggtagggtattgggtagaggataaagaaggggtttgggaaaggtggggggtgtctcttggcagttgtatggttaaattgagtttttgttttatttagtgatatgtgttttttgggtacatgtgatattttgatacctgtgtataatatgtagtgatcaaatcagggtgattgggatacccatcatttgaaacatcttttctgtgttaggaatattacaagtcttctagctgttttgaagtatacaataaattgttaactataatttctgtactgtactatcaaatattagaacttactaatcaaactgtatttttgtaacactaaccactttctgttcatctccaccactcccacttcccttctcagcctctggtaaccaccattctgctgtctacctccacgagatccacttttttagcttccacacatgagtaagagtctttcttttaaaactggttttgtgagcatatttaacatcagtagcaataaacttgtattttaagctcctgttgctgtattttgaggaccttctaagtccattggaaggattttgaataccatagtgtctgcagtgatagttgttgaaagaaagggaaggcatcagtgcaaatatttttagacagtttttaaagagactcaagtcacccaatttgtcttctaaaaatcctgattttggaagaggcagtggagtttctgttgataaaaaatgatttatagtttgtgcttggcacttcctaatggattacatcaggaaagatttattgtctggcactctcattttaacgatactacaattgattattaggtttagatgctaataccttttttacctttatttcagagaagcttgattctttgctctcagactacgatattctctctttatctaatatccagcagcattcggtaagaaaaagagatctacagacttcaacacatgtagaaacactactaactttttcagctttgaaaaggtaatttgaattattcatggaataatgttggggcactgggggcttggtttggcaaaaacaaaaaagtaagggtatctactgaaatcttgggaaattacattttaaagatttgtaattaatttccagtataatgcttattctaaaattcatactggggctgggtgcagtggctcacgcctataatccgagcactttggggggccaagacatgtggattgcttgagctcaggagtttgcccaagctcagcctgggcaacatggcaaaaccccgtctctactaaaagtacaaaaattaggcatggtgacacgtgcctgtaatcccagctacttgggaggctgaggcaggagaatcacttgaaccagggaggtggaggctgcactagccgagatggtgccactgcactccagactgggcaacagagtgagactctgtctcaaaaaataaataaataaaataaataaagttcatactgatgagtatttttaaaaaagtaaatagatattgcagaggtgttaatgatggtaacgatgtttagaaaattctaacataatttaaattaattgaatgcttataaaaccttttgtttttggtgctactttataaccatcaatcatgtgctaaatattatctttatatatgaagagataaagattttgttcaggaccccacagcctggtggtgagctgggtctagattttactgttctatttatttatttagctaactagttacttagtttccaggattctttaacctgcttcatatttatttatttttaaaaacagggtcttgccatgttgccaaggctgatcttgaacttctgggctcaggtggtctttccatcttggcctcccaaagtgctgggattacaggtgtgagccaccatgcctggcccaaatttaatattctttctacattgagttcctcttacttcttagcataaattgatggatatgttctatttcagtagtaattttaataccacgtattgttttgcacattgaaatgttaaataattgcaggcctctttttaaagtctttaggaagctttattcagtatcaaaaaacagacacatggagaattgactgaattattctttatttatttatttttttgagagtcttgctctgtcgtccaggctggagtgcagttgtgtgatcttggctcactgcaacctctgcctcctgggttcaagcgattcttgtgcctcagcctctcaagtagctgggactacaggtgcacagcaccacgcctgggtgatttttgttatttttagtagagacagagtttcaccatgttggccaggctggtcttgaactcctcacctcaagtgatccacgatctcggcctcccaaagtgctgggattacagacaggggccactgcatctggccatctttattctttatataggacaagccttctcaactatgttaaaaaataaaaggaatatgtgcgtctggtttaaaaaacaagccatggaggatatgcaaagtttttacttctaactcagttagacttctcagacccagagaggtttcctttgtaaacttccaattttttgttttgttttgttttttgttttttgagacagagtttttgctcttgtcgcccagactggagtgcaatggcacgatcttagctcactgaagcctccacctctcgggttcaagcagttctcctgcctcagcttcccgagtagctgggattacaggagcccactgccatgctcagctaatttttgtatttttagtagagatgaggtttcaccatgttggccaggatggtcttgaactcctgacctcaggtgatccacctgcctcaggctcccaatgtgatgggattacaggtgtgagccaccgtgcccgacccaaaatattttaatgcatgttttttgcctataggtctctgtgtgtgtataggtgatatagatagcatatttacctcattttaaacagctgcataaatattcctattgcatagaattgtaacaacatactgactaatacactacagatggatattgtttaaccaaagtgatttttttaatacaacaaacagtgctctagtgagtatctttgtaaatgtgtaccttgatgaggtgtttttataggatatattcctggaaggagaattactgggtcaaggatatgtatactatgtttattgatattgctctttcctcccaaagagatttgacaaatttattcttccagcagcaatatatgagtttacctgtttcctgttatctttgccaatagtaggtttatcagcctttaactgtcacccctctaaagggcatggcattttatagttgttttgattttcattttgtgtgacattgagcatctttttatatatttgtaagtaatttgttttatatttctgtaaactgcctttttatctcttttgactatttttctattgaatttgtctttctaactactgaattgtagcagtgcttagtatattaaggagattggttcattgtcatgtggttattttaggcaaatttttaatgcaaattaatttttcctagctattgcaattatccttaggttattttttaatgacttctttttattcgattttatgtcagaatattatagtattggttattagctttcaacttacaccaaatttgagcagattggtaatattaatagctacagttaatcaggtacttattttctgtaatttactggcattttacataagttatctctaaaagtgattccttttttgaaggaacaaaaaaaaaaaaattaaggcttagacagcttagtaacttgcccaagattactcagctagtaaatgacagatacaagatttgaacaaaggttggactccaaaacttgtgttatttctgctatactggtggagagtttggtgaagaagtggatatagtagcaagaaataagtaggagcgaaggaagagtgaggaaactataaaatgaaaagaactcaaagtttagctttttgggtttctttggatttgaagtggcctgtagaatccgtattctagaggcaaaaacttccatagccttacatatttctctttcaagtttcgtagatgacattgattccctaagaaaatattaaatcgtagccacttgttatcttttctctgtgtaagaaagcagggaagtatgtaatttattttacaaagtttccatactaaatatttaatgggaaatttatctaacagtctatggaattttataccaggtgttttaaaataggttatttcctttaatccccaaaaccgttcagttattaggtgatattatttccatttgtagataaatacttaggattcaaagattgaggccaaggtcggacagtgagtaaatgaaagtaggacttaagccaagtttgtcagactccaaagcccataccctttcttttctatcatattgcgtcattaaagtttaaaacaagaacaaaaacaaagatagctgaagtaatcagtttgtatcagggctgaattaactctatgaaacccctcattacttgatggtaaatgagaagattccgtttttcgatagcagtggaaggcaaagtaatttaaaccaagatcattgcattaaatttggatgtaactattagaggttgaaaaagcatagaaacactgagaggttgtatgaagagttgaagtaacttaagaaaaaaagaaacttgtttaaaatttgccttacaagtttcatttcctttttgttataaatcaagaaattatcagctaggcgtggtgactcacacatgtaatcccagcactttgggaggccgagctggatggatcatgaggtcatgaggtcaggagatcgagaccatcctggctaacacggtgaaaccccgtctctactaaaaatacaaaaaattagccaggcgtggtagcaggcgcctgtagtcccagctatttgggaggctgaggcaggggaatggcgtgaacccaggaggtggagcttgcagttagccgagattgcgccactgcactccagcctgggcgacagagtgagactccgtctcaaaaaaaaaaaaaaatcaagaaattatcttatttttaaataacgaaaaagctgcggagtatatactgttttgatacttttttgatgttgcctgaatttttttggaaaaagttaaatgtttctcctaaaagtgaaatatatcagattacttgagaaggtctagaactgataaagaaatgaaagtgatatacctgactaaatggaccattaaaaatggttagggtaataatgttaattcaaactggttagctggtctttagttactgtaaattcttaagtcaaaagtcagaaagataaaacgttaaagaaatctgtaagaaaatgacttcacataattttgggaggataaagtaaaagaaattttgacattctgttggacgttttataactcaaaagctaatattggaaaatcaaaaaacatgaattttataatcgcttggtctttatctttagaaaagattcttaatgtagcaaatgaaaaatgcaattccactgatttctttctgaaaagaacattaagtaatgttgcaactcttagctttaaaacaaaataataagacatttataataagtatgcttttgaaagttctcagcataactggagggaaaaatcataactgagaatgtgtgggaagatatgttttaggatagcagaagaaaatgttccaaggatttacgaaataatgttctattgtcttttccctttgaccattaaaaaaccacaagcaaactaaaattaccttgttatgctcaaaaagttaaaaatatttgttgccatggagatagtcccagtctagatttctttccggtagtttaaagacttttgcaatcccatggggaagtaatatattttcagtacaacagctgacaaaatttgtttctgtgggtgagatgaataatatacctttctttgtctttggtgttcatggacacattgaaagactataaataatacttgagaaagtcttgctcaccactcctagttttcatgtaaggatggaaagtcatagaaaacaaaaagaatagtaagccaattaaagaactggactgaaactcaacaaaaagaatagtaagcccactaaagaactgaagtgtataccccctcccctctcctcccctcccttcccctcccctcccttcccctcccttccccttcccttcccctctcttccccctccccttcccctctcctccccctctcctcccctctcctccccctctcctcccctcccctcccctcccctcccctcttttcctgtcttctggtgccaatggagtctatattctaatgtctgtcttagataccttgtatttattttcctaactgtaattgtgggttacttttttgcaagatatgttgttttgaggaggaaaaaaagcacgagtactttttttttttcttattttgagcgggagtctcgcgctgtcaaccaggctggcgatctcggctcacagcaggctccgcctcccgggttcactccattctcctgcctcagcctcccaagtagctgggactataggcacccgccaccatgcctggctaatttttgtatttttagtagagatggggtttcgctgtgttagccaggatggtctcgatctcctgacctcgtgatccgcccagctcaacctcccaaagtgctgggattacaggcgtgagccactacgcacggccgcatgagtacttttaaatatagaaagcagcatttattaattttgcacagcaataagaattttctcatagtccacccagcttgatagagacagcatagtacagggttttgaaataaaccaggtttatttcccagtttcaccatttactagctgtgtaactttgagtaggttgattagcttccaagcctcaatttgtacttgtgtgaagtggggataatagatgcatagtacctaacaccaagtaggtgttcaataaatggtatataataggattagtttttgataataatttttttagataatcaggattccaacttaactacgcagtcatgtgtgtttccttattcttcagtgttttccaggagagatgaatgtataagttctttgaatatctttaccctagtgtgagtttattgtgatctgctgtttttatagctaaataaattagttcatttgtcgttacaggagatatattgctctaagtacctaataagactttagttgtaacttgcatagtgttttattaatgtcaatgcttctggctttttaagaaagtttaattatgtgaaaatgagacttaaaatttgtgtgcttagagtaaaatatgaatgcatttttcttcaggcattttaaattatacctgacatcaagtactgaacgtttttcacaaaatttcaaggtcgtggtggtggatggtaaaaacgaaagcgagtacactgtaaaatggcaggacttcttcactggacacgtggttggttagtatggagcttgttggtttgcccctgtgtctggtgtattaggtctccaaatctaacttgattgcatattcttttctggtgcaggatagtggggacggggtgtcatagaagtgctattctttgacttttctttgaggtatataagtttagaggcaggaacattctaatagaaggaaatgagtattatctaaatgtcatactagctggctggtttaatgattaaaattaaattcttcttaagtgataggaatttaacctttcttttcctcagtgactgtaagctttctttatgatattttaaacagggaagcttggagataaaatacttggtgatcctattacgtatgtatttgagaaaatttatcaaacaagcaattgcagtttactttttgacctttttctgcaatgagaaaaaaaaatgtcattgaaatccacaaatagtatagttcctaggcctgtacattctaaatcatgctttctgtctctcttagttcttcctttacctagaagtagataaaattattccagaagaaaatcttagcagttttgtttgttttgggaaagggataggtttcaagtgactaaacttgaggctaccccttaggagttgagattatctagcttctttctggagcctttgtttcttgttttgcagagctctcacagtactaggcaaattccaccctgaaggatttaatttttattgagagtaatgcatagtttcttatttgatgtaagtatttttaaataataattttttttttctcttaaggtgagcctgactctagggttctagcccacataagagatgatgatgttataatcagaatcaacacagatggggccgaatataacatagaggtaaatttatatgtgaattttttttcagtagcttatatctctgattttcaaaaagctgctcagttctgcaaaggtgaaaagtaattatacttatttctttcctcttcgtatttgaagttttttactaggaaagtagactttttaaaaaaggataatctctaagaagctgtgttatgatacaccctgtatttctaagtaccataattgagagagttacatgtgggatggataataggaagagaaaactttctttccctcctgactcattttttaattctttctcaaataataaatgtaaacatcctcagaaatgaaaagtgaagtattatttttcaatttctctgtttttctgctagacacactggaaatgctagatcaatgaaaggtggtagttcatagtctgagaagttaaagaggaagctaggaaagtcaggctgtggtcactcttccattgaaagagtagcaatagaaatcaagaccacagtggctgcattggttaagacacatatctatctgtcagatattagtctacaaaacaaaacgtttcctcataattgtgaattgaagttgattctgtgtttcctgaaaaatgagaagactctgggtggtggtggtgatatcactaaaatagatcacctgtgggaaaactgagtaagattggtcaaaatgaaatgttcaggtgtatttgagtgcttaataggggtaaaacagtctgctggagctatatatactatatgttttaattatatccaatctacatgactgttagtcctttgactgtccattattgtgaaaaagaaacctatggccttgcagtatgttatagtttgttaatgtttaagctatttaatgtcaatgttttgaggagtctggcctaccagaaagagtcagaaatttagtagaaagtaaaggaactaatattataaatgcattcattctagaataggcaaagcatcactggaatgtcttaaatttgcctgttctttcaaatcaatttattttttaagaatacctttattttaaaatatatgctcattgcaaaattcggaaaatagattatctgtacttggacagataactactattgacattttgacagacatccttccaaatttttttttctatgtgtaaatacacaaataaatatagttatacccactattttttcctgcaaaactaggaccatacaatatgtacagtttgtcttcacacatttttcgtttaacaatatgattatgaaccttttcgtgttaatatagatctaaattagggttttgtttgtttgtttgtttgttttttgagacggagtcttgctctgtcacccaggctagagtgcaatggcgtgatcttggctcactataacctctgcctccccggttcaggcgattctcctgccttagcctcccaagtagctgggactgcaggtgtgcgccatgatgtccggctaattttttttcttttttttgagatggagtatcactctgtcactcaggctagagtgcactggcgtggtctcggctcactgcaacctctggctcctgggttcaggcggttctcccgccttagacccttgagtagctcagactacaggcacatgctacctcacctggctaatttttgtatttttagtagagacggggtttcaccatgttggccaggatggtctcgatctcctgacctcatgatctgccagcctcggcctctgaaaagtgctgggattataggcgtgagccactgtgcctggcctcaactgttttgtttctaacttttgaaataaaaggtattgtagtgaacagccttgggcacaccttttggtgcatgtgtttagttggaatagtctggatgataggtaatagtctgggaagttaaatgaagaaactgtaggaagctctgtctaggctgtgcgagggcttcagataaactcccatagctgagtagcttaacacaagcaaagttttttcttactctcctgtggcttgatgtgggttaggtggttctcctctactttgtggctttgacttttggacacatgtcctctgtagttctcacagaaagaaaacagagctagagaattatacaggatattaagggccaggcttggaaatggccttccgttcaatacattctagaacactttatctctgacctgctacaaaggagaatggaaaagatagtcgtaatttgagctcagaaagagaaaatagtgtggtaaatgcacagcattgtttttgctgcagtgcatatgtctgcttatttccttagaataatttattcttttttgtttttttgagactgagtctcactctgttaccaggctggagtgcagtggcgtgatctcagctcactgcagactctgcctcctgggttcaagccattctcctgcctcagcctcccgagtagctgggattacaggtgcgcaccaccacacccagctaatttttgtatttttggtagagacagggtttcacaatgttggccaggatggtctcgatctcctgacctcatgatctgccagcctcggcctctgaaagtgctgagattaaaggcgtgagccactgtgcctggccagcttattaattcttaagccaaaatatgtgtctttaggatccaagttaaatttgctcagattacatttttttttttttaagatggcatctcgccctgtcacccagactggagtgcaatggcgcgatctcggctcaccacatcctctgcctcccaggttaaagcgattctcctgcctcagtcccttgagtagctggaattacaggcgtgtgccaccatgccccgttaatttttgtagttttagtagagatggggtttcactgtgttggccaggctggtcttgaactcctgacctcgtgatctgcccatcttggcctcccaaagtgctgagattataggcatgagccaccacgcccagctagattactcatttttttcaaatacttccttttggaaaaataggaattctgtttccatccatacctttgtttcactaagtacaaaaatgagtataactaatatttcattgtaagatatttacttagccaggcacagtggctcacacttgtaatcagcactttgggaggctgaggcgggtggactgcttgagcccaggaatttgagaccagcccaggcaatatagggagaccttgtctctactcctccacaaaaaaaaaaaaaaaaaaaaaattagctgggcatggtggcacatgcctgtggtctcagctacttagaatgctgaagcagtaggatcagttgaattcggaaggcggagactgcagtgagctgagattgtactgctgcactccagcctgggtgacagagcgagaccctatctcacacatacacacacacaaagatgtttacttacaagtatactcatcagataccttgagggacttttgcatgaaattaataatgtttattgaaaaaatgatttactacttacaggggtgattttcatactctttataattcttttgatacttttatagttcataagtgtggtgattggctgttcacacacacatatgagatgtaccaccctagaaccttgttacaatgttagcacattaccagtctgacatgaaaaaaaataattctttacacttaccttgatgcaaaaacattgtctatctgcactaatatcttaggaatataagtgagcaggaaaaaatatatatcttatttttaacacatcatcattaaatattttgtttatgacagtcttacttggtcactcaggctgaagtgcagtggtgccatcatagctcactgcagccttgacctcctgggctcaaacaatccctcttttctgcctcctgagtagctgggactacaggtgcatgccaccatgcccaactaatttgttaaatttttgtagagtgtatcagatttttgatgaggtctcactgtgttgcccaggctgatctcaaatgtctgactgtaagcaatcctcttgcttggcctcccaaagtgctgggattacaggtgtgagccactgtgcgcagccgttaaatattttaaaccgtcactgactttaccatagcttactatttatataaataatcctgggttaaacttgcatagtgagataatatttcccccaacttttatttatttatttgagatggagtcttgctctgtcgcccaggctggagtgcagtggcgcaatctcggctcactgcagtctccgcctcccaggttcaagcatttctcctgcctcagcctcccaagtagctgggattacaggcacacgccactgtgcccggctagtttttatatttttggtagagacagggttttgccacgttggccaggctggtcttgaactcctggtctcaggtgatccacccgcgtcggcctcccaaggtgctgggattacaggcatgagccactgcatccggcctaatttttgtatttttagtagagacggggtttcaccatgttagtgaggctggtcttgaacttctgaccttgtgatctgcccacctcggcctcccaaagtgctgggatgacagacgtgagccaccatgcttggcctcccccagcttctagttttaaaaatgttcagctggtgcagtggctcatgcctgtcatcccagcactttgggaagctgaggtgggtggatcacttcaggccaggagttcgaggccagcctggccaacatggtgaaacctcgtctctactaaaaatacaaaaattagccaggcttggtggcttgcgcccgtaatcccaactgctcgggaggcctaggtgggagaatcgcttgaacctgggagacagaggttgcagtgagctgagatcgctccactgtactccaatgtgggtgacagggtgaaactctgtctcagaaaaaaataaaaaagaaaatgtgcaaatctacagaaagattaaaaagtaccctgtagttacagaaagatttttttaaaaaataccctgtagcccttaaacaatttctaacataatgtcctgttagctttctctctttttttcgtgaatcatatgaaaatcatttgcaaacatcatgacccttcacccctaaatacttctgtatgcatccttaggaataaaggcactcttttctatagctgtaataaaagtaacatacctgagaaaatgacaagaattctacaatattatctaataatcatgccatagtcaaaatctctagtcatcctcaaaatctcctttgtagattttttttggttttccagtccaggatccaatccagttttctgccttttagtcaattactcatcaaattattttttccagcaacttactagtaataatggtaatagccttagcttttattaataacaaccacttttcttttgaaatgttaatataaaactagatttattacctacataatcttcataatcttcaagttaggtattatcactactttacctaatgagggaggttatgctcagggtacttgtccaaggcacatagtgaggtatggttgaggtttgaactcagatatatctgatcccaaagccagctgtctttttctgtgctggactgactatactaggaaacaatcaatgtgaacttagaaatgtttgacccaaaagaaaaaaaatttcactcctattcataggctaaatgaactttactaaatatggaagattcctgtagcccggaagttgggttagttaacttttgagatctctgccaaccctgaaattctgtaacccttgtttcttacatctgcctcatacatggattaccaaagatgtatatgcatataatatttaacagttttattgagataaaattcacatactatattattcacccacttaatgtatacaattttgtagttttgtgtgtgtgtgtgtgtgtgtgtatttttgagatggagtctcactctgtcacccaggctggagtgcagtggcacgatcactgcaacctctgcctcctgggttcaagtgattctgtggcctcagcctgttgagtagctgggattacaggcgcccaccaccatgcccggctgatttttgtgtttcagtagagatggggtttcaccgtgttggtcaggctgttctcgaactcctggactcaagttatctgcccaccatggcctccccaaagtgctgagattacaggcgtgagccatcgcgcccggcagttttcgtatattgatggagttgtgcaaacaccacctcattcaattttagaacatttttatcacctgaaaaagaaacgctgtatcctttagccatacttcccccttcctccctaactcccccagctctaggcaaccagggatctactgtctatttagatttgtctgtttgggtcatctcatataaatggaattacataacatgtcttttgtgtgtggcttcaatttttttatttttttgagatggagtcttgctctgtcacccaggctggagtgcagtggcatgatctcagctcactgcaacttttgcctcctgggttcaactgattctcttgcctcagcctcccaggtagctgggattacaggctcctgccaccatgcctgactaatttttgtattttttactagagtcggggtttcactatgttggccaggctgttctcaaactcctgacctcaagtgatccacctgcctcggcctcccgaagtgctgggattaaagacatgagccaccacgcccagcctgtgtgtggcttctttcacttagaataatgtttccaaggttcatctgtgttgtagcatgtatctgtatcttatttatttttattgctgaatagtattccattgtatggataaactgcattttgtttattcattgattagttgttgatggacatttgggttgtttccactttttagctatatttacattactgcttgtgttttcatttctcttggttatatactaggagcagaattgctgggtcatatggtacttctacttttaacctttgaggacctgccagactgttttctaaagtggttttaccattttacattctcatcagcatatgtgagggttctggatttctctacatcctcaccagtatttgtctttgatcatagtcatcctagtgggtatacaggggtgtctcattgtgggggtttttttccccattggggttttgatttgcatttccctgatggagataaatatattttttgtgtgtccccccacaaactgcctggttctgatgagaccagtgttcttacagagaataactttgctttgaaacaaaacaaacaaacagccttttgacttgggtaacctttggagtatgttaattgtgatttactctggccttgtaacattgtaagtggagattttgtttaaaaactgcgttcgctgaaacaagtaataaggttcagacctattgttacaagttctgagttttctttcatataaatatgtttgttcttttgtgtggataaaacctaacgtggcaaaaaggtgtcaaacacctaagtattaaggaaactaaaatgaaaatgctgcatgaacagaaaccttgtccaattttcattactatagcaccatcacctataacagtgccagtgtacagtagatattacataatatttttgaatgaatgagtggaaaatgatatgcatttttctcttctgcatcctctgaaagatttcacaacgtgcaaagtatgtaaggctttatttatatacagataaaataatcagagtttataatctatgtatttactttcctgcatagaaactccatatgattaaaaattgagattatttattttaataacatgactaatcagtttacttaacctagaaatgaatgttatctaagaacaagcaaagaatgttagaagaatttagtgtttaggaattattattgttttccatctcagtcgtatatattttctgttttagccactttggagatttgttaatgataccaaagacaaaagaatgttagtttataaatctgaagatatcaagaatgtttcacgtttgcagtctccaaaagtgtgtggttatttaaaagtggataatgaagagttgctcccaaaagggttagtagacagagaaccacctgaaggtaagacttaaagagtgtatttcaaataagaaacaaacatactacaattgacttcagtaggggtggttgttatttgttaaaaaataacatgattgtcaagtaactatagtatttggcatgaaaataagaggtttgttccagaaattttcatcttcttttgtttataatgtaagagttgaaaactctggaaaataatgggaacaacagagattagactttaaaaaagattagggaaaagggaaatggagtgatctgagggaaaatattcctgcagatatttagaaatgataaaataatatggtggaaagacaatctttagagtttataagaaattaattggtagtaggagggacctatatatatactgcttagaatacaagaaggttatatccatcttgggacaatccatttagggtcatttaaaaaacgtaaccatcttggaattttactgcccaaaacacctctggttaggttttttgttttgttttgttttgttttgtttgcagcgcgatctcggctcactgcaacctttgacttccaggttcaggtgattctcctgcctcagactcctgagtagctggattataggcatgtgccaccaggcctggctaatttttgtatttttagtggagatggggtttcaccatgttggtcaggctgttctcaaactcctggcctcaagtgatctgcccacctcagcctcccaaagtgttgggattacaggcgtgcaccaacatgcccggccaaagacggttatgttattaaaattatatattagcattttaatatataaataaagaaattcttaatttatttcacaagaaagttgtcctattaaactaattttcaatgtgaatatcttgacatttttactgttacattggttaattcataaacttcttgttgtagaatatgactgacagcttcatagcccagcattaggtgactgttttactctgttgagcactatttatttatttatttatttagagatgaagtctcacttttgtcgccctggcttgagtgcaatggcacaatcttggctcactgcaacctccgcaccctgggttgaagtgattctcctgcctcagccttacaagtagctgggattacaggcgggtgccaccatatctggctaatttttgtatttttaatagagatggggtttcatcatgttggccaggctggtctcgaactcccgtcctcaggtgattcacccaccttggcctcgcaaagtgctgggattacaggcctgagccaacatgcccggccttactctgttgagcactttttaaagtttctgtattggaaaaattaaagaggcacttgtccttggttttgaattctacagtgttttaactttatgttacttttcacttttctgtcttcctccaaattattttttgttgttgttcagaatcctttagtgatattaagctcacataatgtttgtttcaaaaatatgttagatttaaagtgttaccataaaactccttgttttggtgaattttgatttaatagtgcatacaaattcatattagagcttgttcatcgagtgaaaagaagagctgacccagatcccatgaagaacacgtgtaaattattggtggtagcagatcatcgcttctacagatacatgggcagaggggaagagagtacaactacaaattacttagtaagtatttgatattgcatcgagtaattgaaaaaaaaatttgggtgggtacattccatgaaacttaatgcaaccagatctgttccagatactctgttatttccctaaaatatttgagggatattctctgaggtttttatgttactgtatggaaattatagtttcaaatttgtgacaacccattttacccttgaactaatattttctgcatgttagaatttatgcatatagggtttgggagaggttataatgtagtccttcctccttgatataagtgagttctttaaaaacatcactgctatcatggtagtgaacctgtggtgtcacatgtgaatgtaaaaatatgtatttgcatgaacccatgtttttcttttgcttatatgtatatttcagagaggaaggcgagttttgtttgtcatgttaaagacctaatcattggacttcacttgaaataggtgggactttcatggtcataactagttctagggcacagaagtgaaggaaagatgtaagaagtgatgatactggatttttaagtatgaactattatgatttttgaagtctggggaatcatttttcattgacattttttgctagtgtgacttcattcgtcatgattacttggcactgaccaaaatgttgttactgagggaataatggagaatgcagctattcatgaagcaagaagaagctggtgcagtaaagatgtctttctcattgccttgcttttcccatgctgtccattttattcataccctcccaacttctttcccttccctttcatgtcaagtggatttttttttttttttttcaacacagagtctcactgtgtcgcccaggctggagtgcagtggcacaatctcagctcactgcaacccccacctcctgggttcaagcaattctcctgcctcagcatcacaagtagctggaattacaggcgtgaaccacagcactcggccccatatcaagtgaatttattatgaggctagtaagagtcactgtgattcttgttcctaaataagagagatttttactttaaaaagcttctctcttaatctgggttttatattaaggggctcctcttattttacttctttgttcattgcactataaatatgaatataatgagagatctagtcttaaaaattgtatttttttacaacttcttaggcataacttgtttcacagttgctagaacaaacctcatcaacccagtttttgaacagtagaatattctctttgagaaaaagataggtaattagcattttgttctttctcatgtcattttccttggaaactatactgccttccttctccagttttcccaaatcagagaacaaaagaaggagggttgctgaaatgaaccttgttctttctggctgtcttcttacccattcctcagtgctgaactttttggggtgagagtgggggaatagggttggcagttgtctgccacggccccttacttgtttctggggaagacattcgaggtactcaccaagagatagagtgaagatggaattctttttagaagggaatacagttgacccaggaacagtgcgggggtgtggttagaagcactgaccttcttccctctgcagtcgaaaatcctcacgtgactttttttttttaaggctctgtcgcccaggccggagtgcagtggtgaaatcatagcttgctgcagcctctattgcccgggccaaagcaatcttcccacctcagcctcctctagctgggacaacaggtgttcacccttcctggctaagttttttgatttttagtagagatggagaatttcccaggatggtctcaaacttctaagcttaagcaatcctcctgcctcagcctcccaaggtgctgggattacaggcatgagccactatgcccggccactgtataactttgattctccaaaaatttaactactaatagtctactgttgaccagaagccttaccaataaaataagttgattaacacatttttaaaatatgtattattactgtgttcttacaatcaagtaagctagagaaaggaaaatgttatgatgaaaatcataaaaaaaaaaaaaagcccggcatggtggtgtgtgcctgtagtcttctgttactcaggaggctgaggtgagaggattgcttgagtccagaaattcaggctgtagtgagctatgatcgtgccgctgtactgcacccctggtgacagagcaagaccttgtctcttgaaaaaaaaaaaagaaaatcataaggaagagaaaaatacatttactattcactaagtggaagtggatcatcataatggtcttcatgttgagtaggctgaggaggaagaggaagagttgatcatattgtctctggtgacagaggctcaaggaaatccatatgtaagtggacacttgaagttcaaatctgttgttcaagggtcaactgtatttcaggtatactgattgacttttaaatttaatttttattattggctgaaacggtagttttaaaaaagcctgttacttgtcattttggttccatgtgcaattgagtacctgaaatttaggttaaactataccattgttttattctggtaacagcactttaagtttggggccaaaggttgggaatactctgatacagtaacatctcaatgctagtttttgcgaaagtagaaacttttgcaatggcctctaaactgagattttttctttccccatagattttatattgcattgccaggagaggtaaagagttacataatgtcttttttcttttttaaatacacacagatagagctaattgacagagttgatgacatctatcggaacacttcatgggataatgcaggttttaaaggctatggaatacagatagagcaggtatttatcaatagatatggcttatattacttaagttttgtaatgtaaatatttgtcacttgtattcaaaacctaaaaacttgtccttaacaataattgtaaataagttttctcagatgccaatgattttttatgatgaattgtgcagtatttttgatgttaattagttctagattgtgaagttttctgtccttagtctcgctttaggtagaaagccttttatgctgctgtgctttgttccttctttgaattcatggcctttatattctctgtagttttcttcccccctccgattatgcttaagtctttagttaaaactctggcatgcaccattgaatccttagtcagaaaatttactaaaaaatactgtgtacctttgcaaggctgtatttatatatacagaacctttaggttctttcctctcagatatctccttctgatttcttgtaatctgttaacagagtgtgtctagtaatgttatattaatgtcatcttaataatagctcatattaaaagttatttcaaattgctaggactaattaaaaaggcttctgacaaagggtattgctttgggcagagagacattttgatatgtaaattatataaattgttatctctatttttttccaagctttttgtagtaaaccatatttttataagttatatagtatagaatttagaggttgaaaaaatttttaaaaatcattcaccatgtttataaatgttaaactttgatattacttgtataaaactaagagaattatttttcccttttcattctctttcactgttacgcattttctttttaagttattatttgaataggtaacatgtacacagtacaaaagccagtgaaaagtaagtctctgcagcctgtttattgtcaaaccagttcctttccccaaagacattcatgtcactagtttcatatgtatctttctagagatgtcgtatgcaggtatagtgtatgtatatgtctgtatttgacacaacggtgctatgcagtacacttttacaccttgctttttcatttcacagtatgttggagagtacttcatgttcatgcatgtaaagctgcttcacttgttttattataaatagctgcatcatgtttgagtttcagggaacctgtaaattttctttttgctttaggcatttggaaccagtcgaagaaacaggaataatataggagattaaaacattaacttctttacatctgatgaaggatggattggagggtgtggtttagatgtgtatcatggtgggcttctaagtagttctatcccagatttgaccttgaccagccaccatcaaaactgcagagtccaccccagtaaacttaccacacagtggcagaggagaccagaatgggccttctctgcaggcaggcaggcaggcaggcaggcagagagactcacagaaactctgagctgagcatggtttccttctttatctcacacttactaatgggagcctttgttacttttttttttcttctttgcaggtttaatatgaatttgtctgaaatgcctgtataaggagaagactctattcttagccttttattcctttgatgcacaaagagatgtatattttattattctttcctgagttgtcgactgtagtcgtaataaatattttaggctcctgtaacccaagttcttattttttcaaaataaacatggaggatatgaaaatttaagagtacatttataatattataaataattcattgacatatgttttccataccatatgcttctctgtttgtttcaaacattgaatattggtactgaagaatttatgaattttggttttaaaatgttttttttctagaacgattctttttttgaacagataaaataatgcagtattcagagccttctgacttattttggaagtgttctaagtatatgatctctttaagtatagattcgcattctcaagtctccacaagaggtaaaacctggtgaaaagcactacaacatggcaaaaagttacccaaatgaagaaaaggatgcttgggatgtgaagatgttgctagaggtaggtcttagaatcctggatatggtgctaacaccactttgtcatttctgatatgtggattgtatgtgttttaatgaaggagcatgttagaaaagatggacacccagaagcagtctcctccagctgatccagcagtaaccccatcccatgtagcagcatagacaacaaataacaaaaactctatgaaaaagaaaaacgctataaagcaatgcttccttttttttttttttttttttttgagacagagtttcactcttgttgccctggctggagggcaatggcgtgatcttggctcaccgcaacctccatctcccaggttcaagagattctcctgcctcagcctcccaagtagctaggattataggcatgcaccaccacggccggctaatttttgtatttttagtagagacagggtttctccatgttggtcaggctggtcttgaactcccgacctcagatgatccgtctgcctcggcctcccaaagtgctgggattacaagtgtgagccaccatgcccggccaaagcagtgcgtcttaaccttaatatctttgaggatctaatgagacaatcagtggatcttctctagaaaataacatggatacccaatatatagagtttttgcacactgtttcattagttctgcacacttagttcagctctctctgaagcttatcaatttatcttttagggcagtaattatcaaacaggttatgaacatgtattggagagtagaaatatagcttggagatctgaaagttctctacaggaatttaaaatttttgtgtttttattctggcgattaatctaaagatggctaacttaatcattttatgtcatttggagtcttgccgtataacagggtgctgccatgtgattccagtgtcttgagtttgtgtgtgctattactttggtgtagaatgactttatatgaagcgatagtttttatcttttaatgtgttggcaagtttattagtttcttgttgttgctttaattatcacaagtggagcagcttagaacaacacttatttatcccatagtttgcatgggctagtccaggtatggtgtggctcatctggattcttgtttagggtctcatgaggctgaaatcaagttttcaaagcttcaatagaattaaaggatattataactattcatccagatggagaagcataatgtgcagcacctgtgtggtactcattcataccttgtctaatttgatctgctgagcaccctgagaggttggttgagacagcatccttgtgaggaggctcagcaagtgttactgtttattccagctgacatgacaaagcagcataggctgggggacttaaacaacagaagtttgggttttcacagttctggaagctggaagtccaaaatcaaggggtcagcagggttgatttcttctgaggccaaggtacttgtggtgtagatgctgtcttctccctgtgttctcacatggtccttccctcagtgtgtgtgtatattctgatctccttatcaggacaccagccatattggattaaggcccacccatatgacctcagtgtaccttaattacctccttaagggccctgtttccagatagagtcacattctggggtactgttgagggttaggacttcaacatttgaattgtggggtggcacaattcagccagtagcaggaagattaaatgacttgtctgattagtcatacaactggtgatggcagaggttgaattgagcacagatctcctgactcctagaacagctgaaccactgcgcctgtctgcttttctgtgagcctccagacagcccatggcaggggaggaaccaaagagaaaaatgacttatgttgacagatggtcctctccagttttcttccctaagcctcctagaatattcttagaagcctcatccttttaccacggaactatcagaatccccatgtaaccacacttcattcctcatatagggctctctggcctctcatttaaagcattttaaacattgagggttttggctaggcatggtggttcatgcctgtaatcccagcactttgggaggctgaggatgaggcagtggattgtttgagcccaggagttcaaggctagcttgggcaacatgttgtacaaaaaatacaaaaattagccgggcatggtgaggcacgcctttggtaccagcttcttgggaggctgaggtgggaggttcacttgagcctgggaggtcgaggctgcagtgagctgtgattgcgtcactgcattccagcctaggtgacacagcgagaccctgtctcaagcaaaataaatcaaaccccccccccaaattaaggtttttttaaacttggagacgctggacggttatggtagaggtttttaaagtaatgtatgaagcccttttaaattaagaaaaaaaaaatcctctcaaacctgcagtgttgatttaaatggatgtaaaatctttattttagtaacataaaactgggtatgtatgcttttctataagtgtatatttatataaatgacaatatattatgaagctcaaaaaagtttaagattaaaatttctataaaaccaattgaatccttgaaatacttgagagggatctgttttggcctggagtgctgcaatccccttatcgaattggagcatctctagtcctgggctgtatgtcttcagaacagccctcggaggagcagtgagttagttctgaagagctggagcaagctcccgaactattcccttttgtgtcccttgtcagatgacagtgtgtgcctctcacctgtgcaggtggagaagcactttagggaaagagcaaagcactgcacgaggttgtgattgctggtgctgagctgcatgccatcatagttctgttctggaatgtttagttgatttagattacatcttttagtctgatgtaattgttaatctaagaatgcttttttttttttttttttttttggtctttcaaagcaatttagctttgatatagctgaggaagcatctaaagtttgcttggcacaccttttcacataccaagattttgatatgggaactcttggattagcttatgttggctctcccagagcaaacagccatggaggtgtttgtccaaagggtaagtttttccatttcttgtgtgaatatgctgctgggattattaagatgattggattatattataattctgtatttaataagcaatttatctctgtttccttttgactttagcttattatagcccagttgggaagaaaaatatctatttgaatagtggtttgacgagcacaaagaattatggtaaaaccatccttacaaaggtatgttcttttatttctaaaagaatagtgttagagtttattgtagtagaacctcagttatatatttatgtaggtatttttttaaaaaatgtaatatatactgttttttaaatttctgcctaaataaaatttatgtatttttgtgggatatatgaaaattaaagcataaagaagaaaataaaaatggcctgtcagccttcttttgaaacatgtgaggaccactgcttttctcgaaccctctgtcctggacccctctgacctgcagcaactcttagagctccctgtctcctagtcctgcagtgcagctgtcattcaaggcatcccacaccctcttattttcagaaccccatggtctccctctttctcagtgccatcattttggtgtagtgtatcttgcaggagcttcctaagaaaacgtagatgacctgcatattgttgggatttcatatatctgaaaatgtctttattccactcttaagcctgattgataattttggctgagtatattcttagttctcatgttctctatggtcttctgtgcatgttgcttctaaagaatctgaagtcattttgagttcttatctttgtttgtcacctgtttttttctctggaatatcttaagatcttgtttttctccagctatgtctgttaaaatgtgtttgactacaaataacagaaaattaaataagcagtggtttaaataaggggtttatttgtctcagtcaacaagaagttcagggatagcattttctgggtggtacagcaactcagaggtaccctcagtggctcaagaacaagcaggaagtctttgtcctcatggatgtcacctcatggttttaagatggttctcttctgtgttggagaaaggaggagaaagagaacatggctagcctagtctggcccttctaaaaagcttctctggaggccccatcctggcttttgtttatatgttactggacagcactgggtcccgtggctgcccttagcctcaacggaatgtggaaagctggctattttagctgagtatattgctgtcctgggcaaaattagggctcattaagtaaggaagaaggggagagagatgttggtaggacatattagtatctgatatactgatttttaatttttatttaatttttattttttttgagacagagtcttgctctgtggcccagtctggagggcagtggcaccatcttggctcactgtaacctctgccttctgggttcaagcagttctcctgcttcaacctcctgagtagttgggattacaagcacctgtcaccacgcctggctaatttttgtatttttgttttagagacagggtttcaccatgttggccaggctggtctcatgaacccctgacctcaagtgatccactcaccttggcttcctaaagggctggttggtatactgattttttgactatgatgttatacttggtgtagggtatgggaaaacatttgcaaaagacacatctgagaaaagactgctatctgaaatatacaaagaggccgggcatggtggctcattcctataatcttcggcactttgggaggccgaggcaggagaatcacttgagcccaggagtttgaaactaacctgggcaagatggtcagaccctgtctctacaaaattaaaaataaataaataaataaaaatttccatatgtataaagaactgttaaaattcaacaataagaaaatgaacaacctaatttaaaaacagacaaaagagcagaacagatacctccaaagatatacagatagcagagaagcatatgaaaagatgctcagcgtcatatgtcattaggaaattgcaaattaacaatgaagctggttgtaggggtacatgcctgtagtcccagttgcttgggaggctgaggtgggaggattgctcgagcccaggagtttgagacccatcctgggcaacattagtgagatcctatttctataaaaaactttaagaaacccaacaacaatgtgctattactagtagcttattagaatggctaaaatcccaaacactggcaacacaattccaacaaggctatggagcaacaggaactctcattaattgctagtgggaatgcaaaaatggaacagccactttggaaggcagttggcagtttcttttctttttcttttttcttttttttttttttttggagacggagtttcactcttgtcacccaggctggagtgcaatggcgccatctcggctcactgcaacctctgcctcccaggtttaagcaattctgcctcagtctcctgagtagctgggattacaggtgcccgctgccactcccagctaatttttgtatttttagtagagatggggtttcaccatgttgtccaggctggtctcgaactcctgacctcaggtgatccgcctgcttcagcctcccaaagtgctgggattacgggtgtgagccactacgcccagccataagaatgtttatggcagcttaattcataattgataaaacttggaagcaaccaagatatcctttagttggtaaatggataaactggcacatccataaaatgagaaaaaaataaaaagctattaagccatgaaaagacatagaggaaccttaaaagcatactactaagtaaaataagccagtctgaaaggctacatactatatgattccaaatatatgacattctagaaaagacaaaaccatgcagactataaaatgatcagtgattgctagatgctgggggagggagggatgaataggtggagagcagggtaattactctgtatgatacttcaacagtcagtataagacattatgcatttgttgaaacacatagaatatacagcacaaagagtggaccctaacataaactgtggactttgggtgatttaaaaacaggtggtggcaggagcctatagtcccagctacgcgggaggatcacttgaggccaagagttagaggctgtagtgtgataaatgcaactgtgaatacccgctacattccagcctgagcaacttagcgagatcctccttttcttttttgagatggagtctcgctgtgtctcccatgctggagtgcaatggcatgatcttggctcactgcaagctctgtctcctgggttcatgccattctcttgcctcagcctcccaagtagctgggactacaggcacccccaccaccacgcccggctaattttttgtatttttagtagagacggggtttcactgtgttagccaggatggtctcaatctcctgaccttgtgatctgcccgccttggcctcccaaagtgttggaattacaggcgtgagccaccgtgcctggcctgagaccctgtctctttttatttatatatatatatatatatatatatatatatatatatatatatatatatatttatattttaaatttaagttctaggatacatgtgcacaacgtgcaggtttgttacatatgtatacatgtgccatgttggtgtgctgcacccattaactcgtcatttacattaggtatatctcctaatgctatcccttcccccttccccctccccccaccccacgacaggcaccggtgtgtgatgttccccttcctgtgtccaagtgttctcattgttcaattcccacctttgagtgagaacatgcggtgtttggcttttgtccttgcgatagtttgctgagaatgatggtttccagcttcatccatgtccctacgaaggacatgaactcatccttttttatggctgcatagtattccatggtgtatatgtgccacattttcttaatccagtctatcattgttggacaatgttgaacaataatgtagagtggtatgagaaaagaaaaagacactaattagcttttgggaatcttttaatttctttttttcttttcttttttttttttttgagatggagttttctcttgttgcccaggctggagtgcaatggtgtgatcttggctcactgcaacctccgcctcccggattcaagcaattctcctgcctctttctcctgagcagctgggattacaggcatgcgccatcacgaccagctaattttgtatttttagtagagatggggtttcttcatgttggtcaggctggctctcaggtgatccgtctgcctcggcctcccaaactgctggattacaggcgtgagccaccgtgcttggccttaatttctaaatttatttttttcttatggtactttgttttaggggaaaaaatctctcaaactgtgttttccctctattctcacatcacaaccatcatcatcaacacagaagacttgtgtgaccagaccaaacgtgtggggatttccccctacatatcaagcagtagacatcagctaggtgtcctccaattcaattcaaacactctccacccggaaatagtatcagatctcacagtttgagggcccagtcccacaagactgactgttccctcctccccaccagttacaagtctgagcctccagaacttctgaccaactggcttcaagttggggtttccacattctcctctttgggtctgattaatttgcttaagtggctcacagaactcagggaaaagcttaacttagtttatgggtttattacataggatattttaaaggatacaaagaagctgggtgcggtggctcacgcctgtaatcccagcactttgggaggccgaggtgggtagatacctgaggtcaggagtttgagaccagcctgaccaacatggtgaaacctcgtctctactaaaaatacaaaaattagccaggtgtggtggtgcatgcctataatctcagccactcgggaggctgaggcaggagaagtgcttgaacctgggaggcagagattgcagtgagctgagattgcgccactgtactggtcaacagagggagtctttgtctcaaaaaataaaaaaaaaagaaaggatacaaagaaatagccaaatgaagggatacatagggcgaggtctggaagggtcccgagtacaggagcttctgtccccatggagttgggatgtacctccctcctggcacacgaatgagttttgcaccttcctgtcaacctccatgtattcaaaatgctctctggaagctctctgaatcctgttttttgagattttatggaggcttcattacataagcacgaatgacaactgtgtagaaatgtgattggacaaaatgggtatgttctcatactaaccgactgagtggggaagcccaccaaggcctgtccagattctccttgacctctctgtgcagcattcctccctccacagtaaagggcaggaccctctctagaatgagaatgagaatgaggatctctggacccacaatcagattagagtcttgccttggatcaggtaaaaggaggacaggagaaggtcagagagagagattctgtttcctgaggattgctcctgagccctaaagcaccccaacattataacagaagaccgtaaccagggctacggagggttgtaagccaggagccatggacagaaacatacatgtgtgtacagtagctcacgcttttacttttttggagtcacaacttcttaatggcttgatttcatgacatattttctttggtcttccagaactttcctcttaaaaaaacacagcaaaaaaacaaaatttgatttgaaatttttgagatttttttttaagagtcattagcaaatccactaatgaattttccccaagcagttaggagatatttctcttcattacacctttgggatttgagtgcttttgctaaaaatttaagttttttttcccactacggttttaatatgaacatgtggaaagacttcttgtatagaaaaatgacttgcaaaatattattttttcaggttctatggagtgatttcccccccttaggaaaaaagaactcaggaattttaagtttatatgtatatatatttattttattttattttatttatttattttaagacagactctcactcttttgcccaggctgggggttcagtggcctatctcggctcacagcaacctccgcctcctgggttcaagcaattcttctggctcagcctcccaaatagctgcgattacaggcgcccaccacaatgcctggctaggttttatatttttagtagagacagggtttcaccatgttggccagtctggtctggaactcctgacctcaagtgatccagctgccttggcctcccaaagtgctggaattccaggcgtgagccactgtgcctggcctttaagtttgatattttattcagataaatatggaaaaaaaattttagctttattggcaaaatttattattcatatagaaatcatctgataatctgatagattaagtacagccctgcaactggattctaataaaccaagtcctctaggtcattaagattgttattggacatgaattcagtcattgagaaaataaaacattgttttgttgttcctcagttgtggtttttgttttttttttaagatagagtttcactcttgttgcctaggctggagtgcaatggcatgatctcagctcactgcaacctccgcctcctgggttcaagtgattttcctgtctcagcctcccgagtagccgggattacaggcgtgcgccaccacacccagctaattttttgtatttttagtagagatggggttttactatgttggccaggctggtctcgaactcctgacctcaggcgatcaacccaccttggcctcccaaagtgctgggattacaggtgtgagccactgcgcctatccgtactgttttttttaccccttgctttttttttcctttctgctgagatgctttaggttttaacagacatgtgattgggccgaggggcatgtgaggaggctggacaattaactacagttagcttattgcatttatcagcaccagattgtgtgtggttgaaatggccaaggtttgatgttttgttatgaatgttccagtatatcttataaattacattttcttaaattgatttgttactacttacaataatgtttgatagtattaaataaaatcctacttattctgttaaattcatataattggtagaagaatcatagtccggttattactcttttttgagacaaagtcttactctgtcacccaggctggagtgcagtggtgtgatcatagatcactgtagcctcagcctcctgggttcaggtgatactctcacctcagcctcccaagtagctgggaccacaggtgtgcaccaccatgcctggctaatttttttttttttttttttgagacgaagtctcgccctgtctcccaggctggagtgcaatggcgtgatctcagctcactgcaacctccgccccctgggttcaagcagttctcctgcctcagcctcccgagtagttgagattacaggcgcgtgcctccatgcccagctaatttttgtatttttagtagagacagggtttcaccatgttggccaggctggtctcgaactcctgacctcgtgatccacctgcctcagcctcccaaagtgctgggattacaggcgtgagccaccatgcctagcccacctggttaatattttttattatttttgtagagatagggtctccctgtgttacccaggctggcctcaaactcctagagtaaagtaatcctcccatctcagcctcctaaagtgctggtattataagcatgcagttcttattctcttgttgatctgattataaggctctatttaagacagcataggcccaactggcagaagtaggtgatggctggatattgagaaataatgttttctttgcatgatccttaaggaagctgacctggttacaactcatgaattgggacataattttggagcagaacatgatccggatggtctagcagaatgtgccccgaatgaggaccagggagggaaatatgtcatgtatcccatagctgtgagtggcgatcacgagaacaataaggtatgtgtgtgtcgagaattttttatgtggtttggaaagaggctgtgtataatgatcataatgagagctcagaaacgtattccattcctaggcgtttccctagggatggatgtgcaaattacaaagtaccttgaaacgtggttgtgtgttttggggtgaagcacggttcatctaaatctggttaaaactatcatttggactttgttgtcaagcttaatggtgtagatttgagctctaggaaaaattactaataataatggctttttttggagttctggatttcagggtctggtgggctcaggctttatgttaaaaatttgtcatttcatttacaagttgtcattcattttaactctacaatttacatgtacagtttacacgtttttattaacttttgcagttaaacacatagtttgcctgactacaagcctcatgggagaaaggcccttccttgtctgtcttattcatagctctatcttattcatagctctatctccagtgcctagtaggagtatctggcatgtaacaaatatttgttgaataattaatggaatcatttactattgggggtttctgatagagaatactagttgatttgtgatactgtaaaacactttcagagactttaagagtgccgtgactaactcttagagtctgaactaaaagttgtgttaataaatatctggttctttcattttatttgaagttaaacagcataaagcagtgtgaggaaaacaatagttgcactgctgagttaaagagggtcggtggggagagcttaaaggagtctgattctaatcacaaaagattgtgaagtatttgtcctgactcctattttgagcttggctgtgggctaatgtgcaagccttccctggacacagagggcaagattacttctgcttttccctggctctgacaccctgctttctgaaatttctgcctcctgttctttttgtgatctttgattgttgcatctcatttttttttggctttttatgtatattttctgcatctcattttctttggctgttatgtgtaaacagttcctctgttactttgcatgttatgttttatttttcctctgcttgacaacttgtgccagagaaacatttttctacccctttttgtctactcttccaacctgtcaaactgttgaattttccttctcttttcatagtctctgcatttctaatcatgttcactatagttcagtgctgcccaatagaactttctgctgcggggcgggggatgttttgtgtctgctctgcccagtatagtagccactagcccagtggagcaattgaaatgtggctagaaactgaggaactgaattgtaaattctattttatttaaatttttaataatgtttgcctgtgatgggagacgggaatgggcattaactgtaaaaggacatgagtgagattactggaaggatggaaatgtcctaaaattgacttatagcaatggtttcaacacttggtaaagttattagaaatcactgagttatatacttgaaatggatcaattttgtgatatgtgaaatatgtcttaataaagttgttaataagccaacaaacaaaaacagcagtgtgggagcagaggaaaagtagcgcggatgtagaggagctgtgaagtcataagttgattattgttgaagctggtgaggggcacgggggcattcatgataccatcctgtctacttcatagatgcttgaatatttctgtaatagaaactgtaaaatatgtgactaggaacaaaatttaagtagccacatatggttggtggctaccatattgcatactgtttctctaagtaataggtcatatgcttcttggttatgaggatagtgtcagaacttgggagcaaaatgttttactttgcagactgcctgggtggacatgcatgctgctgactcttcctgctgccagttctggggctcttcaaaacagccctgtaagaacttgccagtgaggcatggtggctcacacctgtaatcccagcactttgagaggccgaggtgggcagatcacttgagcctaggagttcaggatcagcctggacaacatgtgaaactccatctctacagaaaatacaaaaattagctgggcatagaagcacatgcttgtagtcccagctactcaggaggctaaggtaggaggaacccggggagttcaaggcggcagtgagccaaggttgtgctactacactccagcctggatgacagagtgagactttatctcaaaaaaaggaaaaagaaaaaaaagaacttgctaatgagaatggggcctgggaagaactttttttttctggagctgccagtctgtatcaatgaagaacaatttatttattttgtcctgagcacatcatatttagtctgtgtttttctagtttggttgcccaagtaggagtccccttgtaagaagataatgtgcatcttctatgttttatttatttattattatttattatgattttttgagtggagtctcactctgtcgcccaggctggagtgcagtggtgtgatctctgctcactgcaacctccacctcccaggttcaagcgattctcctgccttagcctcctgagtagctggggttacaggtgcatgccaccacacctggccaatttttgtagttttagtaggatggggtttcaccatgttggccaggttggtcaactgactggtcaacaaactcctgacctcaggtgatccacctgcctcgacctctcaaagtgctgggattacaggcatgagctgctgtgcccagcctatgttttaaatgaattccttaataaaaatatttttaactgatgaaaagggcttacaggacaaaaataaagtagttccttgacctagaaagacagaacccatcaccctctactaggcaagcctatgaagagcagtttgccacaggtggacttctctgtggacagatgacattagtgaaaaggaatgtaggacctttgagattgtaacttcttaggaaggtttgctgaacggaagaggaagtcttatgacaaggatgcaaacagaagctgccagatcttcagggatgtgtaggcagaaagccagagttgcgggttggtccttttatcgttagtgctctccagctgcttgggagttgtaactctgacaaatcagtgaagaggtcttcttatctgttcactgtgaattttaactccattttaacctgataaaatggaacccagagatacatgatgttgatgaataaacccaccaaaatgacaactgcctgaggccccgattagaataaccagaccccttagacatctgtactgtaacgacagatttgggccgggcgcggtggctcacgcctgtaatcccagcactttggagaccgaggtgggcagatcatgaggtcaagagatcgagaccatcctggtcaacatggtgaaaccctgtttctacaaaaaatacaaaaattagctgggcgtggtggcatgcacctgtagtcctagctactcaggaggctgaggcagaagaatcacttgaacccgggaggcggaggttacaataagccaagattgtgcctctgtagtccagcctggtgacagagcaagactccatctaaaaaaaaaaaaaaaaaaaaaaaaaaacagatttgaagatgttttttaaaaagccagttagtatttctgtgtaagatgaggtctttgctatctttctgaaagtagctcctttggtgtctgatttggtggttacaggcacctttggagggtctcatacacttggctctcaggggcttcatgattgttgtctggggtgaaagtgaagccattttggcatctgcagagcactttggagaccccgacctaagaagtaactatgctcagttttccctaagcctcttctttttttgataacttcaggaggtctggaaaatgaccgcagttttagagctcctgataaaaccctcagccttaaaagggagttatcctagtggttctgtactccagggtgggaaggtagtgtagagactttttgagacactggtcttgctggttgatgaaaatgtttaggtaacaattggggatttaatttatataaaatgtactattatgcctattactaagctcaaatatttaaacaactttaaacttggatcatccatataagtagccaaagaaggagaagaaaccccttctcctgcatttctgaattgttttgtctgggacaacattaacctacagaggttcttaattcttgtcactgcatgagtggcatgcctgaggtgaggagatttcaagtctgatggagctacgagctctctgttgtgctattctgcttgtccttaagtgggctttgactgggatgtttggtctcagtatttgtatagcttgcttaccttcgtaagaagaattatagatccttaaccaagttcacatcagccatttagcattctatggagggaggttcccagttccatatcagtggcctttggaggagactgtggtggccttgccataactccagggtggctctgatggtggttttacattaagagtttgtctctagagaagacacaaacattgcatgggaatacatttttatgatattattttgggtccttattgccttttttctctcaagatgttttcaaactgcagtaaacaatcaatctataagaccattgaaagtaaggcccaggagtgttttcaagaacgcagcaataaagtttgtgggaactcgagggtggatgaaggagaagagtgtgatcctggcatcatgtatctgaacaacgacacctgctgcaacagcgactgcacgttgaaggaaggtgtccagtgcaggtgaggagtctctccacagggattttgggaagttggtataacaagatgtccaaaataagagaagactgaacttgcaggggctttagaatcaactgaaaggggtgtgagtgtgtttgtttacatctacctcttttgcccttcacagcaagaaattgctttctgggcctggcacggtggctcactcctgtcatcccagcactctgggaggctgaggtgggagaaatgcttgagaacagcctgggcaacatagtgagacactatctcttaaaaaacaaaaaacaaataagaaaagaagaagctttctggaaagcagtgtgacattatgtaacaaaatccttgaccttgcatgctccttggtttagcagtcctatagttaaaagaatcttttttttttttttttttcctgagacagagtcttgctctgtcgccaggctggagtgcagtggcgcgatcttggcttactgcaatctttgtctcccgggttcaagtgattcccctgccttagcctcctgagtagtgggactacaggcacgcaccaccatgcccggctaattttttgtattagtagagacgaggtttcactacggtggccaggatggtctccaactcctgaccttgtgatccatccaccttggcctcccaaagtgctgggattacaggtgtgaggcaccgtgcctggcaaaataatcttttttatttaatttaatttatttatttattttgagacggcgtctcgctctgttgccaggctggagtgcagtggcgcgatctcagcgcactgcaatctccgcctcccaggttcaagcgattcccctgcctcagcctccccaataactgggactacaggtacgcaccatcacgcctggctgattttttgtattttagtagagacggagttttagcatgttggccaggatggtctcgatctcctgacttcatgatctgcccaccttggcctcccaaagtgctgggattacagaggggagccaccgtgcctggcctttattttctttttgagacagggtctcagtctgttgcccaagatggagtgcagtggcatgatcatggctcactgcagcctcaacctcccaggctcaatcagtccttccacctcagcctcccggatagacaggactacaggtgtgtgccacctggctaattttttttgtattttttatagagatggggttttgccatgttgcccaagcttgttgtaaagtcctgggctcaagtgatccacccttctaagcctcctaaagtgtggagattctaggtatgaggcaccatgcctggcccaaataatcttttatttctttttttttttttttgagacggagtcttgctctgtcgcccaggctggagtgcagtggcgtgatcttggctcactgcaacctccgcctcctgggttcaagccattcccctgcctcagcctccccagtagctgggattacagtgtgcaccaccacgcccagctaatttttgtgtttttagtagagatggggtttcaccatgttggccaggctggtctcgaactcctgacttcgtgatctgcctgcctcagcctcccaaagtgttgggattacaggcgtgagccactgctcctggctgcccaaagaatcttttgggcaacagagataagatttaacaagggtataagatttaacaaggtttttttatggctacatcctaatagcaaaattttggaaacaatcaaaatgacagtcttgggatatgaatgttatcatgattctatatactggaatagtgtggaggaagtaggttacaagttagaaagttacccaggttttcattttttatatacactgatagaccagtgcctggcttagaagtaaaagggttaaacttcagttttctggtgaataattgagatttaactggatacagtgcatattaacgctgtaaatactgatggggagtagagttctggctgccgagtgtcttagctatggattgccttgtggccccaccttgtcttttttttttttccttgtctttttttttttttttgagagagtctcgccctgttgaccaggctggagtgcagtggcgcgatcttggctcaccgcaacctctgccttccaggttcaagctattctcctgccttagcctcccgagtagctgggattacaggcatgtagcaccatgcccggctaattttttgtatctttagtagagacggagtttcaccatgttggccaggctggtctcaaacccctaacctcgtggtccacctgcctcatcttttttttttttttttttttttttgagacagaatttctctcttgttgcctaggctggagtgcagtggtgcgatctcggctcactgcaacctctgtctccggggtccaggcgattctcctgcctcagccttctaagtagctgggattacaggagcgcaccaccacgcccagctaatttttgtatttttagtagagatggggtttcaccatgttggccaggctcatctcgaactctcctgacctcaggtgatccacccacctcggcctcccaaagtgttgggttgggattataggtgtgagccacctcgcccagcccatcttgtcttttttaaattaatgcgttaaatgaatgaaaaccaagggcaccaagatgtttcacaggtgattgctgtgttcccattcttttctcctatagtgtggcatttatgtgacctcacgcacattaggaagggacaaagtgtgtgcaggtagctctagcagcggagatgtctgatgatgtaggagtgggtgacggagccaggaggtcttccccggtgatcttcaggtcactgtaacgtaactgtagcgtttgatttgatatggggccataatttgaattgctctgttcctgtctgctgttcttctccagtgacaggaacagtccttgctgtaaaaactgtcagtttgagactgcccagaagaagtgccaggaggcgattaatgctacttgcaaaggcgtgtcctactgcacaggttcgtgttcttgttgcttccttggaatgctgtgggtcaagtgtgtgtgtgtctttgaaaaacaagattatgttttgttcagatgagagacaccttatttttaatctcatatgccgggttgagtttctggcactccttagtttgtgacacttggctttggtgggtttaagacctgtttctatttctctttcatttccatcactctcctctttctcctcacagacatccactctactgtggttaatatttgcctggatatgtgtatatccttgaaagatcatatagtgttattttgtgcatgtatgtgtttttaatgtgccaaaatgatattctaccttaaatttacttttaaaaaattcagtatcatgttttaaagaattacccatattgtgctacagataatataacaaggtttttaatggctacatcctaatagcaaaattttggaaacaatcaaaatgacaatcttgggataatgaatgttatcatgaatctatgcactggaatagtgtggaggaagcaggatacaagttagaagggtaaccagtttttctatatgtatctatatgtatttcactgttggggacacctacatattgtttagttatatgattggctgtgttttacttacaagtcaccaagtggtagctacttccattgccttcatccccttgatattccagataggacacagatcacatcctcctacgtcccttcaggaacctgtgtgtttctctgggtactgaggagtgtcattgtgtagtcacagaggcaggatgtgctggtctctagagcaccactgctaggttgcctgtgtctgaggactccttatcctgacgttctggccaacgcttggaattaccctgctgtcctattagcatgatgagtataaagtaatctcttgttcttacttttttttttaacagcccttgtcctaatgcacttacttacatttttcttgagcatctctttatatttttcagctattcagatttctcctgtgaatagccagttcatatatttggttcattttttaaaaattgggtttcatgttatttcactactgtgaatttggaggagttcttatgtaatcatccatttgggcatacgtctcctatctgttgccattctcagaacagaaatctttaacgtaatcaaatccatcattttgttgtgtgtgtgtattttttaaacacatggttcagaaaagccatggcggatggttaaaaagatattttccacagctgcttctattagcttcataagttgtccttttacattcaggacttgaatctttctggagctaacctttccaggtgtccagtatcttttgttcggtcaattgttgctttaaaaatttcaaagctatgttattactaggtatataaacggacatatctctacatctttatctgctgttccttaccagtatataatgttccttttttacccttgcgatgttttttgacttaaattgtcaaaaagcaatattcagtttgctattctagtttttttgttcctctgatatatctatctgtcccattcttatatttttcaaaatttgtctctcttggttggttggtttgattttgtaatagctttattgatacataattcacactcatgtagtttgcccatttaaagtgtacagtttaatgatttttagtatattcagatttatgcagtcatcacaattaattttagaacatttacattactccagaaagaaaccctgtatcctttagctatgatcctccaatccccccattccccacaactcagagcaaccactaaccaccctattctttatggagttgtctgttttgaacatttcatataaatggaattatacaatatggtttcgtgaccacatattgtatgactggcttctttcactgaacatagcatttttaaggttcatgtatgttgtagcatgtatcagtacttcatgtacttttattgctgggtaaattccattgcatggatatgccacattttgtttattcattcattggttgatagacatttgggttgcttccacttttttgctataacaaataatgctgctgtgaacatttatctatgagtttttgtgtggacagttcctttggatattattcaggaatagaatttctgggtcatgtggtaactatgcttaatcttttgaggagctgtcagactgttttccaaaatggctacaccattttacagtctcagcagcattgtatgagggtcccagcttctccatatcctcaccaacacttgttatcttttttattgtaactatcctaggttttgtgataaggatgcaaacagaaagctggaggtcttcagggacctagtgaatgaagttgtgtcctattttggcttgattttggttttccgtgtgcatagtatgacatgttgcccatgtttttatcttttgggatctgtcactatcacattactttgccaaatgttaggaacctgatggcccggcacagtggctcacacctgtaatcctagcactttgggaggccgaggtgggcagatcacgagatcaggagatcgagaccatcctggctaacacggtgaaaccctgtgtctactaaaagatacaaaaaattagctgggcgtggtggcgggcgcctgtagtcccagctacttgggaggctgaggcaggagaatggcgtgaacccgggaggcggagcttgcagtgagccgagatcacgccactgcactccagcctgggcaac

SEQ ID NO: 15382 - DNA, 65815 bp, Homo sapiens
agttttccgaaaccccgtcaggcgaaggctgcccagagaggtggagtcggtagcggggccgggaacatgaggcagtctctcctattcctgaccagcgtggttcctttcgtgctggcgccgcgacctccggatgacccgggcttcggcccccaccagagactcggtaaagacccaggggagttggcttaggccggcgcctggagcgctcgtttgagggaagagcaggggagctgggtctatcaggtgtttgggggcggggtattggcgatggtggcgcgtccctaagttttcagtgtagaagggggtgtggctctcggagtttggggaaagaataaaggagatgggcctgtctctgagtgggaaagggctactggacgggctccatgtagtgactgagcgcctgagaggggtttgctccctagctttgtgttcggggagggtgttgggaaagcggtaaggagtagggtggctggatcttgtttggagagggagatgtggtcagggttcttgccttagtagggaacaaatctagtgttgtgtgttcctaccagagccagaaaggaagggcccaaagctccagaattcttcctggtcctcgaaggagggaactagaatttctgctgtaggaggtacttatgcagtaatctcgttgggaggcggagactggagttggagtcttaagagttgtgtttttgcgaacatcctaagcacgttcttggttatttcaattgtagcttattggaggtgcttgggagatggggggaggcggaaacctggtaagccaactcgtgatgctgccactatgaatgctttccttgcacttttaaacaaagaaattatcaagagtgacgagtttgatgaatttagaggctagaaagtagagggttcctatttcattagattttccagagagattggattttaaggatggagatgcattaagggatctgaactttggtggaagtaagtttgcgtgaacttttagtgtattttaaaatccttttatctttcaaaaattgacgtgtaagatactttaattagtaataaagtgtgaaataatgttttcccagtgtgtgaaattgtaggcttgcatggttgtactggttcccaaatttcaccatgataccatgtgtagtattttttttctttatatttagtggacagaaattgtaatggattggtatggatactaaaggtgttgagagtgttatcacttgaacagctgtcttatgattctttccgattgaaatggattacaagtgactaatgaaaggcaagggatcttgttaggaagtgctgagaagtggtaagtcagtacaaattgaaggacattttgaggtaggattgtggttaggatggagggatagggtaagggtcttcattttaaggataaatgttagtaaaaagaataaatatgtattttgagatattaaaattatatttgcaccaccctgacacaactgtttcacttatgttattaatctgttgttcgtaggtaaaaataagcatgagtcccaaggaagcatacagtttaaagagaaacattactttctagatcaattcataacatttgcagatcgtaaggttttttagaccattttttttttccaagacagagtcttgctctgttgcccaggctggagtgcagtggcgcgatctcagctcactgcaacctccgcctcccggggttcaagcagttcacctgccttagcctcctgagtagctgggattacaggcatgtgccaccacgcccagctaatttttgtattcctagtagagacggggtttcaccatgttggccaggctggtctagaactcttgacctcgtgatccgcccacctgggcctccctaagtgctgggattacaggcatgaaccaccgctcctggcccatgtgtttgttttttatttgcaaaatgcagaccacctgtgccagaagaatgcatagacttttcttttttcttttcttttctttttctttctttttttttttttttgaggcagtgttttgctcttgttgcccaggctggagtgcaatggcgtcatctcagctcaccacaacctccgcctcccgggttcaagcaattctcctgcctcagcctcccaagtagctgggattacaggcatgtgccaccacgtccggctaattttttgtatttttagtagagatggggtttctccatgttattcaggctggtctcgaactcctgacctcaggtgatcagcacacctcggcctcccaaagtgctgggattaaaggcttgagccaccaggcccggcctctttttttttttttaaacgaaatatttgaaggacacacaagtattatacgtggcattggaaatacaaagatcagacgatatccatcttcaaatggttatagcatagggaaatagacattcatttaggacacttctaaaacagcatagaggagagtgctagagtacgttatagcaagtgttatcaccaaatgaatcttagagatcaagtctagttttcaaataaaggaggaggaaaatgagtctcaggaagatgctgtcagttgtcaatgatgaacataggccttgtgggtatttttcttttgaagaatgactttttttttcagtttgtttgacagcttacaatataatttgttacttaaccttaccattagattgagttggtcaagactagcaaatagtttcatagttgaaaaacatgctttattatttattttttatgtttattgtcctacaaatactactatattgcagtactcaatatcgattaggcatatgacaacatttttctgaaaggcaaaaaatacctaataaaatgaagcctggtttttagagtcctctatgggtcaccaaaaatgatttcaattgaactgttatgaattgcataatttaggaaagttatgagtcatatgagcttagtcatgatgatatcttgttgaagttgcagctggggtgtataagtctcactttgatttcaaaatcgttttccctttgtgttacttttaataaaagaggatgtagtgggtgggaggaaaaaatataggtcacagatgagggatgagaaagtttgtatctgaaacatgtattttcaaatttaccttgaggttattggcatggggattctccatattgcagtgctgatttcattattgacagcaccattttactcagtattttgacatctggctttctcttttgatgttaattttgcttactggctgcattcctttgaaacctaaatgcttaactgccctaactgctccaagggagatttaatgtaactctgctttatattagtctaagagataaaccatatttcaagagtagaatggagaggaattaagcagataattgtgatggggaaactggagagatccttttgactttcacaggatttcctagaacattaaatataggtttcctccaaggccaattgtggttgatttttggatccttcaccattttctatttgtgagataataagtgtatacagctggaagtgtaatgtgaagaaagtctgaaaaagattgataggaaaggaggacaggaatgggcttcattgaggtaacggaagtgaaatgaaaggcttttcatatatgggttgagcatccctaatctgaaatgctccaaaatttgaaactttttgaatgctggcatgacagcacacattacccctaacacacgattttttcactgttagtggtatattttttactgtgtagtacttatgtgtgaataggtataacaaaacgattacttattgtagcatgtaaaatcagtcaggaatgatggtgatgccagacaaccacagattatttatgtgggtggccgagacagtgacacctttgctttcgaatgcttcgttgtacacaaactttttttcatgcaaaaaaagttacttaaaaatattgtttaggccaggcgcggtggctcatgcctgtaatcccagcactttgggaggccgagctgggtggatcacgaggtcaggagatcgagaccatcctggctaacatggtgaaaccctgtctgtactaaaaatacaaaaaattagccaggtgtggtagcaggcgcctgtagtcccagctactcgggaggctgaggcaggagaatggtgtgaacctgggaggtggagcttgcagtgagccgagatcgcgccactgcactccagcctgggcgacagagcaagactccatctcaaagtaagtgaataaatgaaacataaatgaattttatatttagacttgggtcccatccccaagatacctcattatgtatatgcaaatatttcaaaatttaaaaaattctgatgaatgaaacacttctggtctcaagcattttggataagggatgctcaatctgtatctctttatttactcctaaaatcagccaaggaaatgggcatctctccgttcccccccttccttttttttttttctttgttgttacatgagttgtactggtttcacttcatttgacagtgttctgctaatgactagacgtgtatctctgacctggacttgttctctggagttcatattcagctgcccatttggcacttcaaatataacatgtccaaaattagttaccttttttttttttttgagacagagtctcactgtcacccaggctggagcgcagtggcgcaatcttggcttactgcaacctccacttcccaggttcaagtgattctcgtgcctcagcctcacgaatagctgggattacaggtgtcccccaccacgcctggctaattttttttttttttttttttttgtatttttagtagagatggggtttcatcatattggacaggcctgtgttgaactcctgacctctggtgatccacctgcctcagcctcccaaagtgctgggattacagacgtgaaccactgccccagccagttacctattcttttgattacaagaatgagtagctggacacagtggcttacacctatagtcccagcactttgggaggctgaggccggcggatgacttgaggccaggagttcaagaccagcttgaccaacatggtgaaacctgtctctactaaaaatacaaaaattagccaggcgtggtggtgcgtgcctgtaatcccagctactggggagactgaggcaggagaattgcttgaacccgggaggcagaggttgcagtgtgccaaggttgagccactgcagtgcagcctgggcagcagagtgagactccatctcaaaaaaaaaaaaaaaaaaaaaaaagaatgagtatcggatacaggtttagcctaggactaggcagggctgctggtaattgtggaagtagtctcattgcctaacctgaaacttgcatcctggttactggtcttgctggagagtcttggctcaggttacgtcccaggtctgttgaggagctcttgatagggaattagttgaagcagctcatactctatcctcctttactggtataaatccataaaattgtttagttcccaggctctggggtccctggcctagcagagagcactgctccctttttctcattccttagtcccaacaacccgcacctgacacttactacacgtggcctgcttccctgtcctgtgtgttttggggggtgctgaagaggaaggctcctgtgtcttcagcacaaacacaataaacacttcacagcagtactggctttatgttttccatttctgatatcagaagtaggagcatgacattgatagtgtcattttgggggaacttttcgtacttcatgcagcagagcagtgaagagtgagctgagtgccttggggttctgcagtacactctcaagtagtattttaggaaaatgcaatttgctgaaaaaataaaagaaattaatgtaaaaaatccacaagctgggcgcggtggctcacgactgtcatctcagcattttggaaagctaagggggaaggatcacttgagcccaggagtttgagaccaggctgggcaacatggcaagaccttgtctctacaaaaaaatagaaacaaaaattagccaggtgcggtggcatgtgcctgtggtcccagccacccggaggattgctcatgcccaggaggttgaggctgcagtgagtggtgattgtgccctgcactctagcctgagcaacagagcgagaccctgtctcaaaaacaaaacaaaacaaaaacccacacgtttccagaaccttctcatataacactttatttacattgttcttaaatacgtgtgggacggttatatacataccactatacttatgtgtatatatgttgatatacacacaaaattatatacataatttttgtttgtttgtttttgagatggagtctcactctatcacctaggctggagtgcagtggcgtgatctcagctcactcactgcaacctctgccacccgggttcaagcgattctcctgcctcaggcttctgagtagctgggattacaggtgcctgccaccgcgcctggctaatttttgtatttttagtagagactgggttttaccatgttggccaggctggtcttgaactcccacccttgtgatccacccacctcggcctcccaaagtgctgggattacaggtgtgagccactgtgacctgccatatacataattttttaaagtttcacgattagttttagcttaaaaatgtcagctctgggcttaatgaagaaaatatggatatactttatgtcaatgcattaaagtgaatggccataaaagcttatcccagagacaaaacaattcagatataagagaagtgggagagtggaaggtttatctaatcttctgtaggcaactccacagctacaaccagaaggccattttgttacaggcctgaaagccccgttttctttttattcttctttgaaacctttagaaggaacaaagtattggctactttttaccgctgatgtcagtgttaagaatcttgtgataacatagatttactctccctgctgaaaatcactatgtggctcatcagtaacacaactagacatgatgacttaatgcaaaggaagtcctatgtaaatgagcaatgaaattgcaactgtgtataaggaacaaaatagaatatgaaactccagaatcttttgttttcatttctgtttctcccaaggctctatcattcaaaactccagaatctttcagcatgcaattgtctcctgatatcagcccctctcttgttttgttttcttttttttttttttaatcacagtgagccacaacctaggagtcttttagtggtttctacttggtttgctctgcagcctaccagcagatttcctacattccggtcttgttcccctctagcccattctccacactgcagtcataatgaaatttctttcttttttgggggggatggagtctcactctgtcacccaggttggagtgcagtggcatgatctcggctcactgccacctttgcctcctgggttcaagcgattctcatgcctcagcctcccaagtagctgagattatacgcacctgctaccacgcccagctaatcttgtatttttagcagagacagggttttgccacgttggccaggctggtctctaactcctgacctcaagtgatcgcccaccttggctttctctctctttttttttttttggattttgagacaggatctggcctcgttgcctaggctggagtgcagtggcacgatatcagctcactgcaacctctgcctcctgagctcaagccatcctcccacctcagcctcctgagcagctgggactgcaggtgtacaccaccacgcctggctaatttttgtattttattttatttatttttttggtagagacggggttttgctgtgttgcccaagcttgtcttgaactcctggggctcaagcgatctacccatcttggcctcccaaggtgctgggatgacaggcatgagccaccacagctggcctataatgaaatttccaacttacagctattgccattatccaaagcccagaatccctgatttccttccatagcccttcatggcctgaccagtgcctgactctccagcctcacacttcatattctctctgtactgctctgcactgtagcctcattgagttgctttcacgtctttaagtgttgtgttctattttttgtggaattcagcatatgttatgcccttgacctaaggcctctcctttcttttccttctctggggtgctgcctcatccttctggtcttcaaaaccgtttccctgggaaaacatctttgactcagcaggcagggatcatgcccctgctgtgtctgtgcataactttctgtggctacttctgtcttggtctgtgatgtactttataataattttggtctttcctccagtgtcacaatactggaagtctgtttctttttctctgtgttgtatccttagtgcctgaaaggtaggaggttctcaataaatatttgttaaataatcaagtaaatggagtctggtggaaaagagaaaaaataagtgtagaatgtgtgtgcaagaaaggaggggtagggggatgaaaaagataacaaaagcacataacaaaacaacaaaaagcaaaaacaacaaaaaatgcagatgacaaaaaagataacaaaatgatgactgctgtggcaacttgtagaaagtaaggaaggtgctctcattctagagagaagtaggcagccattgtagttttttaaagagagaatatgggctgggctctgtggcccacgcctgtaatcccagcactttgggaggccgaagtgggtggatcacgaggtcaagagatcaagaccatcctggccaacacagtgaaaccccttctctactaaaaatacaaaaattagctggataggtggtgtgcacctgtagtcccagctacttgggaggctgagacaggagaatcgcttgaacccaggaggcggaggttgcagtgagctgagatcacgccactgcattccagcctggcgacagagtgagactccatttcaaaaaaaaaaaaagaatatggccagacactgagctgagatagacagtgcggcagtgtctggtattaactgtaataaactctactgtcagaagcaggtggtttatacttaagtttattgagagaattggatatggataagagataaactcttgggaaatggggagaaatataaattctgttgtaaagcctgtaaaaaattgagattactagtggttagaattttggaagtgaagtgcagtgaaatattgagtacctgagaggttacttgttagtgaaaacacaatagcagtagtacgtagctacagtttggctccaaaggaagaactgtttttactatagtttgtaatggcttcagaatcttcaatttgagatatccagttattaaaagagaatcaattgcagttgaaatgcattagttaagtattttaaagtgctttagcaagctacatttaaaaagtgcttattatagaaaatatacccaaaataaccaatgatgttactgtcttgtgcttattttttctagacctatttttatacatagttaagattatacaatatgaatatttctgaaatctatatttaacattataacatatgtatttttccatgttctttctttttttttttttttgagactgggtctcatcctgtcacccaggctggagtgcagtggtgctatcttggcttactgcagccttgacctcctgggctcaagtgatcctcccgcctgaaccttctgagtagctgagactacaagcacatgccaccatgcctggctaattttatttttactttttggagagatgagggtctcactattttgcccaggctggtctcgaactccttgggtcaagcaattctctcaccttgacctcccaaagtgctgggattacaggagcgagccaccgccctcagccccatgttcttaaaaaccttttgtgaacgacatttaaaatagttgcagattttttcccctgtctttggaagtgttacaacatccaaccatttcacagttactaatttaccatcattctggtttttgtccttgaaaataaggcaaggctgaataatgaacatctttgtggctaaagtttttttctttactttgagttgttaccttcctttagcttagttcagtggttttttctttttcttttttgagatggagtcttgccttgttgcccaggctggagagtagtggtgtgatctcggctcactgcaacctccgcctcccaggttcaagcagttctcttgcctcagcctaccgagtagctgggattataggcgtctgctgccatgcccagctaattttttgtatttttagtagagacagggttttgccatgttggccaggctggtcttgaactcctgacctcaggtgatccacccgcctctgcctctccaagtgctgggattacaagtgtgagccaccatgcccagccagttcagtgattttcatatttgagtgtgtcagccttgcctggaagccttgttaaacacagactattggatcccactgggcggatttctgtttgagcaggtctgaggggagacctgagcatttgcatttttaacaaattcccagttgatgatgatgctgctggtttgggaactacactttgagaactactgggctatattattgacaatgaaactataatgttgaggttaagttcctaagtcagtaggagtgattatgatcttgaatgaaactgagttcatgtaccaacctgtatcagggaaattgaagaactaaaggaccatattgcatttcagcactgagaattcgtgcagtttgtgaacatgtgagtgctgatatgtgcaaggtttttgctgagtattgtgaggcaaggatgttgtaatgaataaaaaatagccctttttggctttttttttcttcttttgagatggagtcttgctctgtcgccaggctggagtgcagtgatgtgatctcagctcactgcaacttccgcctcccaggttcaagcgattcttctgcctcagcctcatgagtagctgggactacaggtgcccgccaccacgcctggctaattttttgtattttggtagagactgggtttcaccatgtttgccaggatggtctccatctcctgaccttgtgatccccctgccttggcctcccaaagtgctgggattacaggcgtgagccaccgtgcccagcccggccttttttcccccgcctagagatggagtcttgctctgtcgcccaggctagagtgtagtggtgcaatctcagctccctgcaacatctgcctcctgggttcaagcgattctcctgcctcaaactagctgggattacaggcatgcaccaccatgcccggctaattttgtatttttagtagagacagggtttcaccatgttaatcaggctggtctggaactcctggcttcaggtgatccttggcctcccaaagtgctgggattacaggtgtgagccaccatgcatggcctcatttgggaaacttttgatatcagaatcttaggtttttcattagagattgtcagatttccatattcctctggaaggtaaaggcctaattgctagcattctggaagccagttagggtaggagggtaggagggtagggtattgggtagaggataaagaaggggtttgggaaaggtggggggtgtctcttggcagttgtatggttaaattgagtttttgttttatttagtgatatgtgttttttgggtacatgtgatattttgatacctgtgtataatatgtagtgatcaaatcagggtgattgggatacccatcatttgaaacatcttttctgtgttaggaatattacaagtcttctagctgttttgaagtatacaataaattgttaactataatttctgtactgtactatcaaatattagaacttactaatcaaactgtatttttgtaacactaaccactttctgttcatctccaccactcccacttcccttctcagcctctggtaaccaccattctgctgtctacctccacgagatccacttttttagcttccacacatgagtaagagtctttcttttaaaactggttttgtgagcatatttaacatcagtagcaataaacttgtattttaagctcctgttgctgtattttgaggaccttctaagtccattggaaggattttgaataccatagtgtctgcagtgatagttgttgaaagaaagggaaggcatcagtgcaaatatttttagacagtttttaaagagactcaagtcacccaatttgtcttctaaaaatcctgattttggaagaggcagtggagtttctgttgataaaaaatgatttatagtttgtgcttggcacttcctaatggattacatcaggaaagatttattgtctggcactctcattttaacgatactacaattgattattaggtttagatgctaataccttttttacctttatttcagagaagcttgattctttgctctcagactacgatattctctctttatctaatatccagcagcattcggtaagaaaaagagatctacagacttcaacacatgtagaaacactactaactttttcagctttgaaaaggtaatttgaattattcatggaataatgttggggcactgggggcttggtttggcaaaaacaaaaaagtaagggtatctactgaaatcttgggaaattacattttaaagatttgtaattaatttccagtataatgcttattctaaaattcatactggggctgggtgcagtggctcacgcctataatccgagcactttggggggccaagacatgtggattgcttgagctcaggagtttgcccaagctcagcctgggcaacatggcaaaaccccgtctctactaaaagtacaaaaattaggcatggtgacacgtgcctgtaatcccagctacttgggaggctgaggcaggagaatcacttgaaccagggaggtggaggctgcactagccgagatggtgccactgcactccagactgggcaacagagtgagactctgtctcaaaaaataaataaataaaataaataaagttcatactgatgagtatttttaaaaaagtaaatagatattgcagaggtgttaatgatggtaacgatgtttagaaaattctaacataatttaaattaattgaatgcttataaaaccttttgtttttggtgctactttataaccatcaatcatgtgctaaatattatctttatatatgaagagataaagattttgttcaggaccccacagcctggtggtgagctgggtctagattttactgttctatttatttatttagctaactagttacttagtttccaggattctttaacctgcttcatatttatttatttttaaaaacagggtcttgccatgttgccaaggctgatcttgaacttctgggctcaggtggtctttccatcttggcctcccaaagtgctgggattacaggtgtgagccaccatgcctggcccaaatttaatattctttctacattgagttcctcttacttcttagcataaattgatggatatgttctatttcagtagtaattttaataccacgtattgttttgcacattgaaatgttaaataattgcaggcctctttttaaagtctttaggaagctttattcagtatcaaaaaacagacacatggagaattgactgaattattctttatttatttatttttttgagagtcttgctctgtcgtccaggctggagtgcagttgtgtgatcttggctcactgcaacctctgcctcctgggttcaagcgattcttgtgcctcagcctctcaagtagctgggactacaggtgcacagcaccacgcctgggtgatttttgttatttttagtagagacagagtttcaccatgttggccaggctggtcttgaactcctcacctcaagtgatccacgatctcggcctcccaaagtgctgggattacagacaggggccactgcatctggccatctttattctttatataggacaagccttctcaactatgttaaaaaataaaaggaatatgtgcgtctggtttaaaaaacaagccatggaggatatgcaaagtttttacttctaactcagttagacttctcagacccagagaggtttcctttgtaaacttccaattttttgttttgttttgttttttgttttttgagacagagtttttgctcttgtcgcccagactggagtgcaatggcacgatcttagctcactgaagcctccacctctcgggttcaagcagttctcctgcctcagcttcccgagtagctgggattacaggagcccactgccatgctcagctaatttttgtatttttagtagagatgaggtttcaccatgttggccaggatggtcttgaactcctgacctcaggtgatccacctgcctcaggctcccaatgtgatgggattacaggtgtgagccaccgtgcccgacccaaaatattttaatgcatgttttttgcctataggtctctgtgtgtgtataggtgatatagatagcatatttacctcattttaaacagctgcataaatattcctattgcatagaattgtaacaacatactgactaatacactacagatggatattgtttaaccaaagtgatttttttaatacaacaaacagtgctctagtgagtatctttgtaaatgtgtaccttgatgaggtgtttttataggatatattcctggaaggagaattactgggtcaaggatatgtatactatgtttattgatattgctctttcctcccaaagagatttgacaaatttattcttccagcagcaatatatgagtttacctgtttcctgttatctttgccaatagtaggtttatcagcctttaactgtcacccctctaaagggcatggcattttatagttgttttgattttcattttgtgtgacattgagcatctttttatatatttgtaagtaatttgttttatatttctgtaaactgcctttttatctcttttgactatttttctattgaatttgtctttctaactactgaattgtagcagtgcttagtatattaaggagattggttcattgtcatgtggttattttaggcaaatttttaatgcaaattaatttttcctagctattgcaattatccttaggttattttttaatgacttctttttattcgattttatgtcagaatattatagtattggttattagctttcaacttacaccaaatttgagcagattggtaatattaatagctacagttaatcaggtacttattttctgtaatttactggcattttacataagttatctctaaaagtgattccttttttgaaggaacaaaaaaaaaaaaattaaggcttagacagcttagtaacttgcccaagattactcagctagtaaatgacagatacaagatttgaacaaaggttggactccaaaacttgtgttatttctgctatactggtggagagtttggtgaagaagtggatatagtagcaagaaataagtaggagcgaaggaagagtgaggaaactataaaatgaaaagaactcaaagtttagctttttgggtttctttggatttgaagtggcctgtagaatccgtattctagaggcaaaaacttccatagccttacatatttctctttcaagtttcgtagatgacattgattccctaagaaaatattaaatcgtagccacttgttatcttttctctgtgtaagaaagcagggaagtatgtaatttattttacaaagtttccatactaaatatttaatgggaaatttatctaacagtctatggaattttataccaggtgttttaaaataggttatttcctttaatccccaaaaccgttcagttattaggtgatattatttccatttgtagataaatacttaggattcaaagattgaggccaaggtcggacagtgagtaaatgaaagtaggacttaagccaagtttgtcagactccaaagcccataccctttcttttctatcatattgcgtcattaaagtttaaaacaagaacaaaaacaaagatagctgaagtaatcagtttgtatcagggctgaattaactctatgaaacccctcattacttgatggtaaatgagaagattccgtttttcgatagcagtggaaggcaaagtaatttaaaccaagatcattgcattaaatttggatgtaactattagaggttgaaaaagcatagaaacactgagaggttgtatgaagagttgaagtaacttaagaaaaaaagaaacttgtttaaaatttgccttacaagtttcatttcctttttgttataaatcaagaaattatcagctaggcgtggtgactcacacatgtaatcccagcactttgggaggccgagctggatggatcatgaggtcatgaggtcaggagatcgagaccatcctggctaacacggtgaaaccccgtctctactaaaaatacaaaaaattagccaggcgtggtagcaggcgcctgtagtcccagctatttgggaggctgaggcaggggaatggcgtgaacccaggaggtggagcttgcagttagccgagattgcgccactgcactccagcctgggcgacagagtgagactccgtctcaaaaaaaaaaaaaaatcaagaaattatcttatttttaaataacgaaaaagctgcggagtatatactgttttgatacttttttgatgttgcctgaatttttttggaaaaagttaaatgtttctcctaaaagtgaaatatatcagattacttgagaaggtctagaactgataaagaaatgaaagtgatatacctgactaaatggaccattaaaaatggttagggtaataatgttaattcaaactggttagctggtctttagttactgtaaattcttaagtcaaaagtcagaaagataaaacgttaaagaaatctgtaagaaaatgacttcacataattttgggaggataaagtaaaagaaattttgacattctgttggacgttttataactcaaaagctaatattggaaaatcaaaaaacatgaattttataatcgcttggtctttatctttagaaaagattcttaatgtagcaaatgaaaaatgcaattccactgatttctttctgaaaagaacattaagtaatgttgcaactcttagctttaaaacaaaataataagacatttataataagtatgcttttgaaagttctcagcataactggagggaaaaatcataactgagaatgtgtgggaagatatgttttaggatagcagaagaaaatgttccaaggatttacgaaataatgttctattgtcttttccctttgaccattaaaaaaccacaagcaaactaaaattaccttgttatgctcaaaaagttaaaaatatttgttgccatggagatagtcccagtctagatttctttccggtagtttaaagacttttgcaatcccatggggaagtaatatattttcagtacaacagctgacaaaatttgtttctgtgggtgagatgaataatatacctttctttgtctttggtgttcatggacacattgaaagactataaataatacttgagaaagtcttgctcaccactcctagttttcatgtaaggatggaaagtcatagaaaacaaaaagaatagtaagccaattaaagaactggactgaaactcaacaaaaagaatagtaagcccactaaagaactgaagtgtataccccctcccctctcctcccctcccttcccctcccctcccttcccctcccttccccttcccttcccctctcttccccctccccttcccctctcctccccctctcctcccctctcctccccctctcctcccctcccctcccctcccctcccctcttttcctgtcttctggtgccaatggagtctatattctaatgtctgtcttagataccttgtatttattttcctaactgtaattgtgggttacttttttgcaagatatgttgttttgaggaggaaaaaaagcacgagtactttttttttttcttattttgagcgggagtctcgcgctgtcaaccaggctggcgatctcggctcacagcaggctccgcctcccgggttcactccattctcctgcctcagcctcccaagtagctgggactataggcacccgccaccatgcctggctaatttttgtatttttagtagagatggggtttcgctgtgttagccaggatggtctcgatctcctgacctcgtgatccgcccagctcaacctcccaaagtgctgggattacaggcgtgagccactacgcacggccgcatgagtacttttaaatatagaaagcagcatttattaattttgcacagcaataagaattttctcatagtccacccagcttgatagagacagcatagtacagggttttgaaataaaccaggtttatttcccagtttcaccatttactagctgtgtaactttgagtaggttgattagcttccaagcctcaatttgtacttgtgtgaagtggggataatagatgcatagtacctaacaccaagtaggtgttcaataaatggtatataataggattagtttttgataataatttttttagataatcaggattccaacttaactacgcagtcatgtgtgtttccttattcttcagtgttttccaggagagatgaatgtataagttctttgaatatctttaccctagtgtgagtttattgtgatctgctgtttttatagctaaataaattagttcatttgtcgttacaggagatatattgctctaagtacctaataagactttagttgtaacttgcatagtgttttattaatgtcaatgcttctggctttttaagaaagtttaattatgtgaaaatgagacttaaaatttgtgtgcttagagtaaaatatgaatgcatttttcttcaggcattttaaattatacctgacatcaagtactgaacgtttttcacaaaatttcaaggtcgtggtggtggatggtaaaaacgaaagcgagtacactgtaaaatggcaggacttcttcactggacacgtggttggttagtatggagcttgttggtttgcccctgtgtctggtgtattaggtctccaaatctaacttgattgcatattcttttctggtgcaggatagtggggacggggtgtcatagaagtgctattctttgacttttctttgaggtatataagtttagaggcaggaacattctaatagaaggaaatgagtattatctaaatgtcatactagctggctggtttaatgattaaaattaaattcttcttaagtgataggaatttaacctttcttttcctcagtgactgtaagctttctttatgatattttaaacagggaagcttggagataaaatacttggtgatcctattacgtatgtatttgagaaaatttatcaaacaagcaattgcagtttactttttgacctttttctgcaatgagaaaaaaaaatgtcattgaaatccacaaatagtatagttcctaggcctgtacattctaaatcatgctttctgtctctcttagttcttcctttacctagaagtagataaaattattccagaagaaaatcttagcagttttgtttgttttgggaaagggataggtttcaagtgactaaacttgaggctaccccttaggagttgagattatctagcttctttctggagcctttgtttcttgttttgcagagctctcacagtactaggcaaattccaccctgaaggatttaatttttattgagagtaatgcatagtttcttatttgatgtaagtatttttaaataataattttttttttctcttaaggtgagcctgactctagggttctagcccacataagagatgatgatgttataatcagaatcaacacagatggggccgaatataacatagaggtaaatttatatgtgaattttttttcagtagcttatatctctgattttcaaaaagctgctcagttctgcaaaggtgaaaagtaattatacttatttctttcctcttcgtatttgaagttttttactaggaaagtagactttttaaaaaaggataatctctaagaagctgtgttatgatacaccctgtatttctaagtaccataattgagagagttacatgtgggatggataataggaagagaaaactttctttccctcctgactcattttttaattctttctcaaataataaatgtaaacatcctcagaaatgaaaagtgaagtattatttttcaatttctctgtttttctgctagacacactggaaatgctagatcaatgaaaggtggtagttcatagtctgagaagttaaagaggaagctaggaaagtcaggctgtggtcactcttccattgaaagagtagcaatagaaatcaagaccacagtggctgcattggttaagacacatatctatctgtcagatattagtctacaaaacaaaacgtttcctcataattgtgaattgaagttgattctgtgtttcctgaaaaatgagaagactctgggtggtggtggtgatatcactaaaatagatcacctgtgggaaaactgagtaagattggtcaaaatgaaatgttcaggtgtatttgagtgcttaataggggtaaaacagtctgctggagctatatatactatatgttttaattatatccaatctacatgactgttagtcctttgactgtccattattgtgaaaaagaaacctatggccttgcagtatgttatagtttgttaatgtttaagctatttaatgtcaatgttttgaggagtctggcctaccagaaagagtcagaaatttagtagaaagtaaaggaactaatattataaatgcattcattctagaataggcaaagcatcactggaatgtcttaaatttgcctgttctttcaaatcaatttattttttaagaatacctttattttaaaatatatgctcattgcaaaattcggaaaatagattatctgtacttggacagataactactattgacattttgacagacatccttccaaatttttttttctatgtgtaaatacacaaataaatatagttatacccactattttttcctgcaaaactaggaccatacaatatgtacagtttgtcttcacacatttttcgtttaacaatatgattatgaaccttttcgtgttaatatagatctaaattagggttttgtttgtttgtttgtttgttttttgagacggagtcttgctctgtcacccaggctagagtgcaatggcgtgatcttggctcactataacctctgcctccccggttcaggcgattctcctgccttagcctcccaagtagctgggactgcaggtgtgcgccatgatgtccggctaattttttttcttttttttgagatggagtatcactctgtcactcaggctagagtgcactggcgtggtctcggctcactgcaacctctggctcctgggttcaggcggttctcccgccttagacccttgagtagctcagactacaggcacatgctacctcacctggctaatttttgtatttttagtagagacggggtttcaccatgttggccaggatggtctcgatctcctgacctcatgatctgccagcctcggcctctgaaaagtgctgggattataggcgtgagccactgtgcctggcctcaactgttttgtttctaacttttgaaataaaaggtattgtagtgaacagccttgggcacaccttttggtgcatgtgtttagttggaatagtctggatgataggtaatagtctgggaagttaaatgaagaaactgtaggaagctctgtctaggctgtgcgagggcttcagataaactcccatagctgagtagcttaacacaagcaaagttttttcttactctcctgtggcttgatgtgggttaggtggttctcctctactttgtggctttgacttttggacacatgtcctctgtagttctcacagaaagaaaacagagctagagaattatacaggatattaagggccaggcttggaaatggccttccgttcaatacattctagaacactttatctctgacctgctacaaaggagaatggaaaagatagtcgtaatttgagctcagaaagagaaaatagtgtggtaaatgcacagcattgtttttgctgcagtgcatatgtctgcttatttccttagaataatttattcttttttgtttttttgagactgagtctcactctgttaccaggctggagtgcagtggcgtgatctcagctcactgcagactctgcctcctgggttcaagccattctcctgcctcagcctcccgagtagctgggattacaggtgcgcaccaccacacccagctaatttttgtatttttggtagagacagggtttcacaatgttggccaggatggtctcgatctcctgacctcatgatctgccagcctcggcctctgaaagtgctgagattaaaggcgtgagccactgtgcctggccagcttattaattcttaagccaaaatatgtgtctttaggatccaagttaaatttgctcagattacatttttttttttttaagatggcatctcgccctgtcacccagactggagtgcaatggcgcgatctcggctcaccacatcctctgcctcccaggttaaagcgattctcctgcctcagtcccttgagtagctggaattacaggcgtgtgccaccatgccccgttaatttttgtagttttagtagagatggggtttcactgtgttggccaggctggtcttgaactcctgacctcgtgatctgcccatcttggcctcccaaagtgctgagattataggcatgagccaccacgcccagctagattactcatttttttcaaatacttccttttggaaaaataggaattctgtttccatccatacctttgtttcactaagtacaaaaatgagtataactaatatttcattgtaagatatttacttagccaggcacagtggctcacacttgtaatcagcactttgggaggctgaggcgggtggactgcttgagcccaggaatttgagaccagcccaggcaatatagggagaccttgtctctactcctccacaaaaaaaaaaaaaaaaaaaaaattagctgggcatggtggcacatgcctgtggtctcagctacttagaatgctgaagcagtaggatcagttgaattcggaaggcggagactgcagtgagctgagattgtactgctgcactccagcctgggtgacagagcgagaccctatctcacacatacacacacacaaagatgtttacttacaagtatactcatcagataccttgagggacttttgcatgaaattaataatgtttattgaaaaaatgatttactacttacaggggtgattttcatactctttataattcttttgatacttttatagttcataagtgtggtgattggctgttcacacacacatatgagatgtaccaccctagaaccttgttacaatgttagcacattaccagtctgacatgaaaaaaaataattctttacacttaccttgatgcaaaaacattgtctatctgcactaatatcttaggaatataagtgagcaggaaaaaatatatatcttatttttaacacatcatcattaaatattttgtttatgacagtcttacttggtcactcaggctgaagtgcagtggtgccatcatagctcactgcagccttgacctcctgggctcaaacaatccctcttttctgcctcctgagtagctgggactacaggtgcatgccaccatgcccaactaatttgttaaatttttgtagagtgtatcagatttttgatgaggtctcactgtgttgcccaggctgatctcaaatgtctgactgtaagcaatcctcttgcttggcctcccaaagtgctgggattacaggtgtgagccactgtgcgcagccgttaaatattttaaaccgtcactgactttaccatagcttactatttatataaataatcctgggttaaacttgcatagtgagataatatttcccccaacttttatttatttatttgagatggagtcttgctctgtcgcccaggctggagtgcagtggcgcaatctcggctcactgcagtctccgcctcccaggttcaagcatttctcctgcctcagcctcccaagtagctgggattacaggcacacgccactgtgcccggctagtttttatatttttggtagagacagggttttgccacgttggccaggctggtcttgaactcctggtctcaggtgatccacccgcgtcggcctcccaaggtgctgggattacaggcatgagccactgcatccggcctaatttttgtatttttagtagagacggggtttcaccatgttagtgaggctggtcttgaacttctgaccttgtgatctgcccacctcggcctcccaaagtgctgggatgacagacgtgagccaccatgcttggcctcccccagcttctagttttaaaaatgttcagctggtgcagtggctcatgcctgtcatcccagcactttgggaagctgaggtgggtggatcacttcaggccaggagttcgaggccagcctggccaacatggtgaaacctcgtctctactaaaaatacaaaaattagccaggcttggtggcttgcgcccgtaatcccaactgctcgggaggcctaggtgggagaatcgcttgaacctgggagacagaggttgcagtgagctgagatcgctccactgtactccaatgtgggtgacagggtgaaactctgtctcagaaaaaaataaaaaagaaaatgtgcaaatctacagaaagattaaaaagtaccctgtagttacagaaagatttttttaaaaaataccctgtagcccttaaacaatttctaacataatgtcctgttagctttctctctttttttcgtgaatcatatgaaaatcatttgcaaacatcatgacccttcacccctaaatacttctgtatgcatccttaggaataaaggcactcttttctatagctgtaataaaagtaacatacctgagaaaatgacaagaattctacaatattatctaataatcatgccatagtcaaaatctctagtcatcctcaaaatctcctttgtagattttttttggttttccagtccaggatccaatccagttttctgccttttagtcaattactcatcaaattattttttccagcaacttactagtaataatggtaatagccttagcttttattaataacaaccacttttcttttgaaatgttaatataaaactagatttattacctacataatcttcataatcttcaagttaggtattatcactactttacctaatgagggaggttatgctcagggtacttgtccaaggcacatagtgaggtatggttgaggtttgaactcagatatatctgatcccaaagccagctgtctttttctgtgctggactgactatactaggaaacaatcaatgtgaacttagaaatgtttgacccaaaagaaaaaaaatttcactcctattcataggctaaatgaactttactaaatatggaagattcctgtagcccggaagttgggttagttaacttttgagatctctgccaaccctgaaattctgtaacccttgtttcttacatctgcctcatacatggattaccaaagatgtatatgcatataatatttaacagttttattgagataaaattcacatactatattattcacccacttaatgtatacaattttgtagttttgtgtgtgtgtgtgtgtgtgtgtatttttgagatggagtctcactctgtcacccaggctggagtgcagtggcacgatcactgcaacctctgcctcctgggttcaagtgattctgtggcctcagcctgttgagtagctgggattacaggcgcccaccaccatgcccggctgatttttgtgtttcagtagagatggggtttcaccgtgttggtcaggctgttctcgaactcctggactcaagttatctgcccaccatggcctccccaaagtgctgagattacaggcgtgagccatcgcgcccggcagttttcgtatattgatggagttgtgcaaacaccacctcattcaattttagaacatttttatcacctgaaaaagaaacgctgtatcctttagccatacttcccccttcctccctaactcccccagctctaggcaaccagggatctactgtctatttagatttgtctgtttgggtcatctcatataaatggaattacataacatgtcttttgtgtgtggcttcaatttttttatttttttgagatggagtcttgctctgtcacccaggctggagtgcagtggcatgatctcagctcactgcaacttttgcctcctgggttcaactgattctcttgcctcagcctcccaggtagctgggattacaggctcctgccaccatgcctgactaatttttgtattttttactagagtcggggtttcactatgttggccaggctgttctcaaactcctgacctcaagtgatccacctgcctcggcctcccgaagtgctgggattaaagacatgagccaccacgcccagcctgtgtgtggcttctttcacttagaataatgtttccaaggttcatctgtgttgtagcatgtatctgtatcttatttatttttattgctgaatagtattccattgtatggataaactgcattttgtttattcattgattagttgttgatggacatttgggttgtttccactttttagctatatttacattactgcttgtgttttcatttctcttggttatatactaggagcagaattgctgggtcatatggtacttctacttttaacctttgaggacctgccagactgttttctaaagtggttttaccattttacattctcatcagcatatgtgagggttctggatttctctacatcctcaccagtatttgtctttgatcatagtcatcctagtgggtatacaggggtgtctcattgtgggggtttttttccccattggggttttgatttgcatttccctgatggagataaatatattttttgtgtgtccccccacaaactgcctggttctgatgagaccagtgttcttacagagaataactttgctttgaaacaaaacaaacaaacagccttttgacttgggtaacctttggagtatgttaattgtgatttactctggccttgtaacattgtaagtggagattttgtttaaaaactgcgttcgctgaaacaagtaataaggttcagacctattgttacaagttctgagttttctttcatataaatatgtttgttcttttgtgtggataaaacctaacgtggcaaaaaggtgtcaaacacctaagtattaaggaaactaaaatgaaaatgctgcatgaacagaaaccttgtccaattttcattactatagcaccatcacctataacagtgccagtgtacagtagatattacataatatttttgaatgaatgagtggaaaatgatatgcatttttctcttctgcatcctctgaaagatttcacaacgtgcaaagtatgtaaggctttatttatatacagataaaataatcagagtttataatctatgtatttactttcctgcatagaaactccatatgattaaaaattgagattatttattttaataacatgactaatcagtttacttaacctagaaatgaatgttatctaagaacaagcaaagaatgttagaagaatttagtgtttaggaattattattgttttccatctcagtcgtatatattttctgttttagccactttggagatttgttaatgataccaaagacaaaagaatgttagtttataaatctgaagatatcaagaatgtttcacgtttgcagtctccaaaagtgtgtggttatttaaaagtggataatgaagagttgctcccaaaagggttagtagacagagaaccacctgaaggtaagacttaaagagtgtatttcaaataagaaacaaacatactacaattgacttcagtaggggtggttgttatttgttaaaaaataacatgattgtcaagtaactatagtatttggcatgaaaataagaggtttgttccagaaattttcatcttcttttgtttataatgtaagagttgaaaactctggaaaataatgggaacaacagagattagactttaaaaaagattagggaaaagggaaatggagtgatctgagggaaaatattcctgcagatatttagaaatgataaaataatatggtggaaagacaatctttagagtttataagaaattaattggtagtaggagggacctatatatatactgcttagaatacaagaaggttatatccatcttgggacaatccatttagggtcatttaaaaaacgtaaccatcttggaattttactgcccaaaacacctctggttaggttttttgttttgttttgttttgttttgtttgcagcgcgatctcggctcactgcaacctttgacttccaggttcaggtgattctcctgcctcagactcctgagtagctggattataggcatgtgccaccaggcctggctaatttttgtatttttagtggagatggggtttcaccatgttggtcaggctgttctcaaactcctggcctcaagtgatctgcccacctcagcctcccaaagtgttgggattacaggcgtgcaccaacatgcccggccaaagacggttatgttattaaaattatatattagcattttaatatataaataaagaaattcttaatttatttcacaagaaagttgtcctattaaactaattttcaatgtgaatatcttgacatttttactgttacattggttaattcataaacttcttgttgtagaatatgactgacagcttcatagcccagcattaggtgactgttttactctgttgagcactatttatttatttatttatttagagatgaagtctcacttttgtcgccctggcttgagtgcaatggcacaatcttggctcactgcaacctccgcaccctgggttgaagtgattctcctgcctcagccttacaagtagctgggattacaggcgggtgccaccatatctggctaatttttgtatttttaatagagatggggtttcatcatgttggccaggctggtctcgaactcccgtcctcaggtgattcacccaccttggcctcgcaaagtgctgggattacaggcctgagccaacatgcccggccttactctgttgagcactttttaaagtttctgtattggaaaaattaaagaggcacttgtccttggttttgaattctacagtgttttaactttatgttacttttcacttttctgtcttcctccaaattattttttgttgttgttcagaatcctttagtgatattaagctcacataatgtttgtttcaaaaatatgttagatttaaagtgttaccataaaactccttgttttggtgaattttgatttaatagtgcatacaaattcatattagagcttgttcatcgagtgaaaagaagagctgacccagatcccatgaagaacacgtgtaaattattggtggtagcagatcatcgcttctacagatacatgggcagaggggaagagagtacaactacaaattacttagtaagtatttgatattgcatcgagtaattgaaaaaaaaatttgggtgggtacattccatgaaacttaatgcaaccagatctgttccagatactctgttatttccctaaaatatttgagggatattctctgaggtttttatgttactgtatggaaattatagtttcaaatttgtgacaacccattttacccttgaactaatattttctgcatgttagaatttatgcatatagggtttgggagaggttataatgtagtccttcctccttgatataagtgagttctttaaaaacatcactgctatcatggtagtgaacctgtggtgtcacatgtgaatgtaaaaatatgtatttgcatgaacccatgtttttcttttgcttatatgtatatttcagagaggaaggcgagttttgtttgtcatgttaaagacctaatcattggacttcacttgaaataggtgggactttcatggtcataactagttctagggcacagaagtgaaggaaagatgtaagaagtgatgatactggatttttaagtatgaactattatgatttttgaagtctggggaatcatttttcattgacattttttgctagtgtgacttcattcgtcatgattacttggcactgaccaaaatgttgttactgagggaataatggagaatgcagctattcatgaagcaagaagaagctggtgcagtaaagatgtctttctcattgccttgcttttcccatgctgtccattttattcataccctcccaacttctttcccttccctttcatgtcaagtggatttttttttttttttttcaacacagagtctcactgtgtcgcccaggctggagtgcagtggcacaatctcagctcactgcaacccccacctcctgggttcaagcaattctcctgcctcagcatcacaagtagctggaattacaggcgtgaaccacagcactcggccccatatcaagtgaatttattatgaggctagtaagagtcactgtgattcttgttcctaaataagagagatttttactttaaaaagcttctctcttaatctgggttttatattaaggggctcctcttattttacttctttgttcattgcactataaatatgaatataatgagagatctagtcttaaaaattgtatttttttacaacttcttaggcataacttgtttcacagttgctagaacaaacctcatcaacccagtttttgaacagtagaatattctctttgagaaaaagataggtaattagcattttgttctttctcatgtcattttccttggaaactatactgccttccttctccagttttcccaaatcagagaacaaaagaaggagggttgctgaaatgaaccttgttctttctggctgtcttcttacccattcctcagtgctgaactttttggggtgagagtgggggaatagggttggcagttgtctgccacggccccttacttgtttctggggaagacattcgaggtactcaccaagagatagagtgaagatggaattctttttagaagggaatacagttgacccaggaacagtgcgggggtgtggttagaagcactgaccttcttccctctgcagtcgaaaatcctcacgtgactttttttttttaaggctctgtcgcccaggccggagtgcagtggtgaaatcatagcttgctgcagcctctattgcccgggccaaagcaatcttcccacctcagcctcctctagctgggacaacaggtgttcacccttcctggctaagttttttgatttttagtagagatggagaatttcccaggatggtctcaaacttctaagcttaagcaatcctcctgcctcagcctcccaaggtgctgggattacaggcatgagccactatgcccggccactgtataactttgattctccaaaaatttaactactaatagtctactgttgaccagaagccttaccaataaaataagttgattaacacatttttaaaatatgtattattactgtgttcttacaatcaagtaagctagagaaaggaaaatgttatgatgaaaatcataaaaaaaaaaaaaagcccggcatggtggtgtgtgcctgtagtcttctgttactcaggaggctgaggtgagaggattgcttgagtccagaaattcaggctgtagtgagctatgatcgtgccgctgtactgcacccctggtgacagagcaagaccttgtctcttgaaaaaaaaaaaagaaaatcataaggaagagaaaaatacatttactattcactaagtggaagtggatcatcataatggtcttcatgttgagtaggctgaggaggaagaggaagagttgatcatattgtctctggtgacagaggctcaaggaaatccatatgtaagtggacacttgaagttcaaatctgttgttcaagggtcaactgtatttcaggtatactgattgacttttaaatttaatttttattattggctgaaacggtagttttaaaaaagcctgttacttgtcattttggttccatgtgcaattgagtacctgaaatttaggttaaactataccattgttttattctggtaacagcactttaagtttggggccaaaggttgggaatactctgatacagtaacatctcaatgctagtttttgcgaaagtagaaacttttgcaatggcctctaaactgagattttttctttccccatagattttatattgcattgccaggagaggtaaagagttacataatgtcttttttcttttttaaatacacacagatagagctaattgacagagttgatgacatctatcggaacacttcatgggataatgcaggttttaaaggctatggaatacagatagagcaggtatttatcaatagatatggcttatattacttaagttttgtaatgtaaatatttgtcacttgtattcaaaacctaaaaacttgtccttaacaataattgtaaataagttttctcagatgccaatgattttttatgatgaattgtgcagtatttttgatgttaattagttctagattgtgaagttttctgtccttagtctcgctttaggtagaaagccttttatgctgctgtgctttgttccttctttgaattcatggcctttatattctctgtagttttcttcccccctccgattatgcttaagtctttagttaaaactctggcatgcaccattgaatccttagtcagaaaatttactaaaaaatactgtgtacctttgcaaggctgtatttatatatacagaacctttaggttctttcctctcagatatctccttctgatttcttgtaatctgttaacagagtgtgtctagtaatgttatattaatgtcatcttaataatagctcatattaaaagttatttcaaattgctaggactaattaaaaaggcttctgacaaagggtattgctttgggcagagagacattttgatatgtaaattatataaattgttatctctatttttttccaagctttttgtagtaaaccatatttttataagttatatagtatagaatttagaggttgaaaaaatttttaaaaatcattcaccatgtttataaatgttaaactttgatattacttgtataaaactaagagaattatttttcccttttcattctctttcactgttacgcattttctttttaagttattatttgaataggtaacatgtacacagtacaaaagccagtgaaaagtaagtctctgcagcctgtttattgtcaaaccagttcctttccccaaagacattcatgtcactagtttcatatgtatctttctagagatgtcgtatgcaggtatagtgtatgtatatgtctgtatttgacacaacggtgctatgcagtacacttttacaccttgctttttcatttcacagtatgttggagagtacttcatgttcatgcatgtaaagctgcttcacttgttttattataaatagctgcatcatgtttgagtttcagggaacctgtaaattttctttttgctttaggcatttggaaccagtcgaagaaacaggaataatataggagattaaaacattaacttctttacatctgatgaaggatggattggagggtgtggtttagatgtgtatcatggtgggcttctaagtagttctatcccagatttgaccttgaccagccaccatcaaaactgcagagtccaccccagtaaacttaccacacagtggcagaggagaccagaatgggccttctctgcaggcaggcaggcaggcaggcaggcagagagactcacagaaactctgagctgagcatggtttccttctttatctcacacttactaatgggagcctttgttacttttttttttcttctttgcaggtttaatatgaatttgtctgaaatgcctgtataaggagaagactctattcttagccttttattcctttgatgcacaaagagatgtatattttattattctttcctgagttgtcgactgtagtcgtaataaatattttaggctcctgtaacccaagttcttattttttcaaaataaacatggaggatatgaaaatttaagagtacatttataatattataaataattcattgacatatgttttccataccatatgcttctctgtttgtttcaaacattgaatattggtactgaagaatttatgaattttggttttaaaatgttttttttctagaacgattctttttttgaacagataaaataatgcagtattcagagccttctgacttattttggaagtgttctaagtatatgatctctttaagtatagattcgcattctcaagtctccacaagaggtaaaacctggtgaaaagcactacaacatggcaaaaagttacccaaatgaagaaaaggatgcttgggatgtgaagatgttgctagaggtaggtcttagaatcctggatatggtgctaacaccactttgtcatttctgatatgtggattgtatgtgttttaatgaaggagcatgttagaaaagatggacacccagaagcagtctcctccagctgatccagcagtaaccccatcccatgtagcagcatagacaacaaataacaaaaactctatgaaaaagaaaaacgctataaagcaatgcttccttttttttttttttttttttttgagacagagtttcactcttgttgccctggctggagggcaatggcgtgatcttggctcaccgcaacctccatctcccaggttcaagagattctcctgcctcagcctcccaagtagctaggattataggcatgcaccaccacggccggctaatttttgtatttttagtagagacagggtttctccatgttggtcaggctggtcttgaactcccgacctcagatgatccgtctgcctcggcctcccaaagtgctgggattacaagtgtgagccaccatgcccggccaaagcagtgcgtcttaaccttaatatctttgaggatctaatgagacaatcagtggatcttctctagaaaataacatggatacccaatatatagagtttttgcacactgtttcattagttctgcacacttagttcagctctctctgaagcttatcaatttatcttttagggcagtaattatcaaacaggttatgaacatgtattggagagtagaaatatagcttggagatctgaaagttctctacaggaatttaaaatttttgtgtttttattctggcgattaatctaaagatggctaacttaatcattttatgtcatttggagtcttgccgtataacagggtgctgccatgtgattccagtgtcttgagtttgtgtgtgctattactttggtgtagaatgactttatatgaagcgatagtttttatcttttaatgtgttggcaagtttattagtttcttgttgttgctttaattatcacaagtggagcagcttagaacaacacttatttatcccatagtttgcatgggctagtccaggtatggtgtggctcatctggattcttgtttagggtctcatgaggctgaaatcaagttttcaaagcttcaatagaattaaaggatattataactattcatccagatggagaagcataatgtgcagcacctgtgtggtactcattcataccttgtctaatttgatctgctgagcaccctgagaggttggttgagacagcatccttgtgaggaggctcagcaagtgttactgtttattccagctgacatgacaaagcagcataggctgggggacttaaacaacagaagtttgggttttcacagttctggaagctggaagtccaaaatcaaggggtcagcagggttgatttcttctgaggccaaggtacttgtggtgtagatgctgtcttctccctgtgttctcacatggtccttccctcagtgtgtgtgtatattctgatctccttatcaggacaccagccatattggattaaggcccacccatatgacctcagtgtaccttaattacctccttaagggccctgtttccagatagagtcacattctggggtactgttgagggttaggacttcaacatttgaattgtggggtggcacaattcagccagtagcaggaagattaaatgacttgtctgattagtcatacaactggtgatggcagaggttgaattgagcacagatctcctgactcctagaacagctgaaccactgcgcctgtctgcttttctgtgagcctccagacagcccatggcaggggaggaaccaaagagaaaaatgacttatgttgacagatggtcctctccagttttcttccctaagcctcctagaatattcttagaagcctcatccttttaccacggaactatcagaatccccatgtaaccacacttcattcctcatatagggctctctggcctctcatttaaagcattttaaacattgagggttttggctaggcatggtggttcatgcctgtaatcccagcactttgggaggctgaggatgaggcagtggattgtttgagcccaggagttcaaggctagcttgggcaacatgttgtacaaaaaatacaaaaattagccgggcatggtgaggcacgcctttggtaccagcttcttgggaggctgaggtgggaggttcacttgagcctgggaggtcgaggctgcagtgagctgtgattgcgtcactgcattccagcctaggtgacacagcgagaccctgtctcaagcaaaataaatcaaaccccccccccaaattaaggtttttttaaacttggagacgctggacggttatggtagaggtttttaaagtaatgtatgaagcccttttaaattaagaaaaaaaaaatcctctcaaacctgcagtgttgatttaaatggatgtaaaatctttattttagtaacataaaactgggtatgtatgcttttctataagtgtatatttatataaatgacaatatattatgaagctcaaaaaagtttaagattaaaatttctataaaaccaattgaatccttgaaatacttgagagggatctgttttggcctggagtgctgcaatccccttatcgaattggagcatctctagtcctgggctgtatgtcttcagaacagccctcggaggagcagtgagttagttctgaagagctggagcaagctcccgaactattcccttttgtgtcccttgtcagatgacagtgtgtgcctctcacctgtgcaggtggagaagcactttagggaaagagcaaagcactgcacgaggttgtgattgctggtgctgagctgcatgccatcatagttctgttctggaatgtttagttgatttagattacatcttttagtctgatgtaattgttaatctaagaatgcttttttttttttttttttttttggtctttcaaagcaatttagctttgatatagctgaggaagcatctaaagtttgcttggcacaccttttcacataccaagattttgatatgggaactcttggattagcttatgttggctctcccagagcaaacagccatggaggtgtttgtccaaagggtaagtttttccatttcttgtgtgaatatgctgctgggattattaagatgattggattatattataattctgtatttaataagcaatttatctctgtttccttttgactttagcttattatagcccagttgggaagaaaaatatctatttgaatagtggtttgacgagcacaaagaattatggtaaaaccatccttacaaaggtatgttcttttatttctaaaagaatagtgttagagtttattgtagtagaacctcagttatatatttatgtaggtatttttttaaaaaatgtaatatatactgttttttaaatttctgcctaaataaaatttatgtatttttgtgggatatatgaaaattaaagcataaagaagaaaataaaaatggcctgtcagccttcttttgaaacatgtgaggaccactgcttttctcgaaccctctgtcctggacccctctgacctgcagcaactcttagagctccctgtctcctagtcctgcagtgcagctgtcattcaaggcatcccacaccctcttattttcagaaccccatggtctccctctttctcagtgccatcattttggtgtagtgtatcttgcaggagcttcctaagaaaacgtagatgacctgcatattgttgggatttcatatatctgaaaatgtctttattccactcttaagcctgattgataattttggctgagtatattcttagttctcatgttctctatggtcttctgtgcatgttgcttctaaagaatctgaagtcattttgagttcttatctttgtttgtcacctgtttttttctctggaatatcttaagatcttgtttttctccagctatgtctgttaaaatgtgtttgactacaaataacagaaaattaaataagcagtggtttaaataaggggtttatttgtctcagtcaacaagaagttcagggatagcattttctgggtggtacagcaactcagaggtaccctcagtggctcaagaacaagcaggaagtctttgtcctcatggatgtcacctcatggttttaagatggttctcttctgtgttggagaaaggaggagaaagagaacatggctagcctagtctggcccttctaaaaagcttctctggaggccccatcctggcttttgtttatatgttactggacagcactgggtcccgtggctgcccttagcctcaacggaatgtggaaagctggctattttagctgagtatattgctgtcctgggcaaaattagggctcattaagtaaggaagaaggggagagagatgttggtaggacatattagtatctgatatactgatttttaatttttatttaatttttattttttttgagacagagtcttgctctgtggcccagtctggagggcagtggcaccatcttggctcactgtaacctctgccttctgggttcaagcagttctcctgcttcaacctcctgagtagttgggattacaagcacctgtcaccacgcctggctaatttttgtatttttgttttagagacagggtttcaccatgttggccaggctggtctcatgaacccctgacctcaagtgatccactcaccttggcttcctaaagggctggttggtatactgattttttgactatgatgttatacttggtgtagggtatgggaaaacatttgcaaaagacacatctgagaaaagactgctatctgaaatatacaaagaggccgggcatggtggctcattcctataatcttcggcactttgggaggccgaggcaggagaatcacttgagcccaggagtttgaaactaacctgggcaagatggtcagaccctgtctctacaaaattaaaaataaataaataaataaaaatttccatatgtataaagaactgttaaaattcaacaataagaaaatgaacaacctaatttaaaaacagacaaaagagcagaacagatacctccaaagatatacagatagcagagaagcatatgaaaagatgctcagcgtcatatgtcattaggaaattgcaaattaacaatgaagctggttgtaggggtacatgcctgtagtcccagttgcttgggaggctgaggtgggaggattgctcgagcccaggagtttgagacccatcctgggcaacattagtgagatcctatttctataaaaaactttaagaaacccaacaacaatgtgctattactagtagcttattagaatggctaaaatcccaaacactggcaacacaattccaacaaggctatggagcaacaggaactctcattaattgctagtgggaatgcaaaaatggaacagccactttggaaggcagttggcagtttcttttctttttcttttttcttttttttttttttttggagacggagtttcactcttgtcacccaggctggagtgcaatggcgccatctcggctcactgcaacctctgcctcccaggtttaagcaattctgcctcagtctcctgagtagctgggattacaggtgcccgctgccactcccagctaatttttgtatttttagtagagatggggtttcaccatgttgtccaggctggtctcgaactcctgacctcaggtgatccgcctgcttcagcctcccaaagtgctgggattacgggtgtgagccactacgcccagccataagaatgtttatggcagcttaattcataattgataaaacttggaagcaaccaagatatcctttagttggtaaatggataaactggcacatccataaaatgagaaaaaaataaaaagctattaagccatgaaaagacatagaggaaccttaaaagcatactactaagtaaaataagccagtctgaaaggctacatactatatgattccaaatatatgacattctagaaaagacaaaaccatgcagactataaaatgatcagtgattgctagatgctgggggagggagggatgaataggtggagagcagggtaattactctgtatgatacttcaacagtcagtataagacattatgcatttgttgaaacacatagaatatacagcacaaagagtggaccctaacataaactgtggactttgggtgatttaaaaacaggtggtggcaggagcctatagtcccagctacgcgggaggatcacttgaggccaagagttagaggctgtagtgtgataaatgcaactgtgaatacccgctacattccagcctgagcaacttagcgagatcctccttttcttttttgagatggagtctcgctgtgtctcccatgctggagtgcaatggcatgatcttggctcactgcaagctctgtctcctgggttcatgccattctcttgcctcagcctcccaagtagctgggactacaggcacccccaccaccacgcccggctaattttttgtatttttagtagagacggggtttcactgtgttagccaggatggtctcaatctcctgaccttgtgatctgcccgccttggcctcccaaagtgttggaattacaggcgtgagccaccgtgcctggcctgagaccctgtctctttttatttatatatatatatatatatatatatatatatatatatatatatatatatatttatattttaaatttaagttctaggatacatgtgcacaacgtgcaggtttgttacatatgtatacatgtgccatgttggtgtgctgcacccattaactcgtcatttacattaggtatatctcctaatgctatcccttcccccttccccctccccccaccccacgacaggcaccggtgtgtgatgttccccttcctgtgtccaagtgttctcattgttcaattcccacctttgagtgagaacatgcggtgtttggcttttgtccttgcgatagtttgctgagaatgatggtttccagcttcatccatgtccctacgaaggacatgaactcatccttttttatggctgcatagtattccatggtgtatatgtgccacattttcttaatccagtctatcattgttggacaatgttgaacaataatgtagagtggtatgagaaaagaaaaagacactaattagcttttgggaatcttttaatttctttttttcttttcttttttttttttttgagatggagttttctcttgttgcccaggctggagtgcaatggtgtgatcttggctcactgcaacctccgcctcccggattcaagcaattctcctgcctctttctcctgagcagctgggattacaggcatgcgccatcacgaccagctaattttgtatttttagtagagatggggtttcttcatgttggtcaggctggctctcaggtgatccgtctgcctcggcctcccaaactgctggattacaggcgtgagccaccgtgcttggccttaatttctaaatttatttttttcttatggtactttgttttaggggaaaaaatctctcaaactgtgttttccctctattctcacatcacaaccatcatcatcaacacagaagacttgtgtgaccagaccaaacgtgtggggatttccccctacatatcaagcagtagacatcagctaggtgtcctccaattcaattcaaacactctccacccggaaatagtatcagatctcacagtttgagggcccagtcccacaagactgactgttccctcctccccaccagttacaagtctgagcctccagaacttctgaccaactggcttcaagttggggtttccacattctcctctttgggtctgattaatttgcttaagtggctcacagaactcagggaaaagcttaacttagtttatgggtttattacataggatattttaaaggatacaaagaagctgggtgcggtggctcacgcctgtaatcccagcactttgggaggccgaggtgggtagatacctgaggtcaggagtttgagaccagcctgaccaacatggtgaaacctcgtctctactaaaaatacaaaaattagccaggtgtggtggtgcatgcctataatctcagccactcgggaggctgaggcaggagaagtgcttgaacctgggaggcagagattgcagtgagctgagattgcgccactgtactggtcaacagagggagtctttgtctcaaaaaataaaaaaaaaagaaaggatacaaagaaatagccaaatgaagggatacatagggcgaggtctggaagggtcccgagtacaggagcttctgtccccatggagttgggatgtacctccctcctggcacacgaatgagttttgcaccttcctgtcaacctccatgtattcaaaatgctctctggaagctctctgaatcctgttttttgagattttatggaggcttcattacataagcacgaatgacaactgtgtagaaatgtgattggacaaaatgggtatgttctcatactaaccgactgagtggggaagcccaccaaggcctgtccagattctccttgacctctctgtgcagcattcctccctccacagtaaagggcaggaccctctctagaatgagaatgagaatgaggatctctggacccacaatcagattagagtcttgccttggatcaggtaaaaggaggacaggagaaggtcagagagagagattctgtttcctgaggattgctcctgagccctaaagcaccccaacattataacagaagaccgtaaccagggctacggagggttgtaagccaggagccatggacagaaacatacatgtgtgtacagtagctcacgcttttacttttttggagtcacaacttcttaatggcttgatttcatgacatattttctttggtcttccagaactttcctcttaaaaaaacacagcaaaaaaacaaaatttgatttgaaatttttgagatttttttttaagagtcattagcaaatccactaatgaattttccccaagcagttaggagatatttctcttcattacacctttgggatttgagtgcttttgctaaaaatttaagttttttttcccactacggttttaatatgaacatgtggaaagacttcttgtatagaaaaatgacttgcaaaatattattttttcaggttctatggagtgatttcccccccttaggaaaaaagaactcaggaattttaagtttatatgtatatatatttattttattttattttatttatttattttaagacagactctcactcttttgcccaggctgggggttcagtggcctatctcggctcacagcaacctccgcctcctgggttcaagcaattcttctggctcagcctcccaaatagctgcgattacaggcgcccaccacaatgcctggctaggttttatatttttagtagagacagggtttcaccatgttggccagtctggtctggaactcctgacctcaagtgatccagctgccttggcctcccaaagtgctggaattccaggcgtgagccactgtgcctggcctttaagtttgatattttattcagataaatatggaaaaaaaattttagctttattggcaaaatttattattcatatagaaatcatctgataatctgatagattaagtacagccctgcaactggattctaataaaccaagtcctctaggtcattaagattgttattggacatgaattcagtcattgagaaaataaaacattgttttgttgttcctcagttgtggtttttgttttttttttaagatagagtttcactcttgttgcctaggctggagtgcaatggcatgatctcagctcactgcaacctccgcctcctgggttcaagtgattttcctgtctcagcctcccgagtagccgggattacaggcgtgcgccaccacacccagctaattttttgtatttttagtagagatggggttttactatgttggccaggctggtctcgaactcctgacctcaggcgatcaacccaccttggcctcccaaagtgctgggattacaggtgtgagccactgcgcctatccgtactgttttttttaccccttgctttttttttcctttctgctgagatgctttaggttttaacagacatgtgattgggccgaggggcatgtgaggaggctggacaattaactacagttagcttattgcatttatcagcaccagattgtgtgtggttgaaatggccaaggtttgatgttttgttatgaatgttccagtatatcttataaattacattttcttaaattgatttgttactacttacaataatgtttgatagtattaaataaaatcctacttattctgttaaattcatataattggtagaagaatcatagtccggttattactcttttttgagacaaagtcttactctgtcacccaggctggagtgcagtggtgtgatcatagatcactgtagcctcagcctcctgggttcaggtgatactctcacctcagcctcccaagtagctgggaccacaggtgtgcaccaccatgcctggctaatttttttttttttttttttgagacgaagtctcgccctgtctcccaggctggagtgcaatggcgtgatctcagctcactgcaacctccgccccctgggttcaagcagttctcctgcctcagcctcccgagtagttgagattacaggcgcgtgcctccatgcccagctaatttttgtatttttagtagagacagggtttcaccatgttggccaggctggtctcgaactcctgacctcgtgatccacctgcctcagcctcccaaagtgctgggattacaggcgtgagccaccatgcctagcccacctggttaatattttttattatttttgtagagatagggtctccctgtgttacccaggctggcctcaaactcctagagtaaagtaatcctcccatctcagcctcctaaagtgctggtattataagcatgcagttcttattctcttgttgatctgattataaggctctatttaagacagcataggcccaactggcagaagtaggtgatggctggatattgagaaataatgttttctttgcatgatccttaaggaagctgacctggttacaactcatgaattgggacataattttggagcagaacatgatccggatggtctagcagaatgtgccccgaatgaggaccagggagggaaatatgtcatgtatcccatagctgtgagtggcgatcacgagaacaataaggtatgtgtgtgtcgagaattttttatgtggtttggaaagaggctgtgtataatgatcataatgagagctcagaaacgtattccattcctaggcgtttccctagggatggatgtgcaaattacaaagtaccttgaaacgtggttgtgtgttttggggtgaagcacggttcatctaaatctggttaaaactatcatttggactttgttgtcaagcttaatggtgtagatttgagctctaggaaaaattactaataataatggctttttttggagttctggatttcagggtctggtgggctcaggctttatgttaaaaatttgtcatttcatttacaagttgtcattcattttaactctacaatttacatgtacagtttacacgtttttattaacttttgcagttaaacacatagtttgcctgactacaagcctcatgggagaaaggcccttccttgtctgtcttattcatagctctatcttattcatagctctatctccagtgcctagtaggagtatctggcatgtaacaaatatttgttgaataattaatggaatcatttactattgggggtttctgatagagaatactagttgatttgtgatactgtaaaacactttcagagactttaagagtgccgtgactaactcttagagtctgaactaaaagttgtgttaataaatatctggttctttcattttatttgaagttaaacagcataaagcagtgtgaggaaaacaatagttgcactgctgagttaaagagggtcggtggggagagcttaaaggagtctgattctaatcacaaaagattgtgaagtatttgtcctgactcctattttgagcttggctgtgggctaatgtgcaagccttccctggacacagagggcaagattacttctgcttttccctggctctgacaccctgctttctgaaatttctgcctcctgttctttttgtgatctttgattgttgcatctcatttttttttggctttttatgtatattttctgcatctcattttctttggctgttatgtgtaaacagttcctctgttactttgcatgttatgttttatttttcctctgcttgacaacttgtgccagagaaacatttttctacccctttttgtctactcttccaacctgtcaaactgttgaattttccttctcttttcatagtctctgcatttctaatcatgttcactatagttcagtgctgcccaatagaactttctgctgcggggcgggggatgttttgtgtctgctctgcccagtatagtagccactagcccagtggagcaattgaaatgtggctagaaactgaggaactgaattgtaaattctattttatttaaatttttaataatgtttgcctgtgatgggagacgggaatgggcattaactgtaaaaggacatgagtgagattactggaaggatggaaatgtcctaaaattgacttatagcaatggtttcaacacttggtaaagttattagaaatcactgagttatatacttgaaatggatcaattttgtgatatgtgaaatatgtcttaataaagttgttaataagccaacaaacaaaaacagcagtgtgggagcagaggaaaagtagcgcggatgtagaggagctgtgaagtcataagttgattattgttgaagctggtgaggggcacgggggcattcatgataccatcctgtctacttcatagatgcttgaatatttctgtaatagaaactgtaaaatatgtgactaggaacaaaatttaagtagccacatatggttggtggctaccatattgcatactgtttctctaagtaataggtcatatgcttcttggttatgaggatagtgtcagaacttgggagcaaaatgttttactttgcagactgcctgggtggacatgcatgctgctgactcttcctgctgccagttctggggctcttcaaaacagccctgtaagaacttgccagtgaggcatggtggctcacacctgtaatcccagcactttgagaggccgaggtgggcagatcacttgagcctaggagttcaggatcagcctggacaacatgtgaaactccatctctacagaaaatacaaaaattagctgggcatagaagcacatgcttgtagtcccagctactcaggaggctaaggtaggaggaacccggggagttcaaggcggcagtgagccaaggttgtgctactacactccagcctggatgacagagtgagactttatctcaaaaaaaggaaaaagaaaaaaaagaacttgctaatgagaatggggcctgggaagaactttttttttctggagctgccagtctgtatcaatgaagaacaatttatttattttgtcctgagcacatcatatttagtctgtgtttttctagtttggttgcccaagtaggagtccccttgtaagaagataatgtgcatcttctatgttttatttatttattattatttattatgattttttgagtggagtctcactctgtcgcccaggctggagtgcagtggtgtgatctctgctcactgcaacctccacctcccaggttcaagcgattctcctgccttagcctcctgagtagctggggttacaggtgcatgccaccacacctggccaatttttgtagttttagtaggatggggtttcaccatgttggccaggttggtcaactgactggtcaacaaactcctgacctcaggtgatccacctgcctcgacctctcaaagtgctgggattacaggcatgagctgctgtgcccagcctatgttttaaatgaattccttaataaaaatatttttaactgatgaaaagggcttacaggacaaaaataaagtagttccttgacctagaaagacagaacccatcaccctctactaggcaagcctatgaagagcagtttgccacaggtggacttctctgtggacagatgacattagtgaaaaggaatgtaggacctttgagattgtaacttcttaggaaggtttgctgaacggaagaggaagtcttatgacaaggatgcaaacagaagctgccagatcttcagggatgtgtaggcagaaagccagagttgcgggttggtccttttatcgttagtgctctccagctgcttgggagttgtaactctgacaaatcagtgaagaggtcttcttatctgttcactgtgaattttaactccattttaacctgataaaatggaacccagagatacatgatgttgatgaataaacccaccaaaatgacaactgcctgaggccccgattagaataaccagaccccttagacatctgtactgtaacgacagatttgggccgggcgcggtggctcacgcctgtaatcccagcactttggagaccgaggtgggcagatcatgaggtcaagagatcgagaccatcctggtcaacatggtgaaaccctgtttctacaaaaaatacaaaaattagctgggcgtggtggcatgcacctgtagtcctagctactcaggaggctgaggcagaagaatcacttgaacccgggaggcggaggttacaataagccaagattgtgcctctgtagtccagcctggtgacagagcaagactccatctaaaaaaaaaaaaaaaaaaaaaaaaaaacagatttgaagatgttttttaaaaagccagttagtatttctgtgtaagatgaggtctttgctatctttctgaaagtagctcctttggtgtctgatttggtggttacaggcacctttggagggtctcatacacttggctctcaggggcttcatgattgttgtctggggtgaaagtgaagccattttggcatctgcagagcactttggagaccccgacctaagaagtaactatgctcagttttccctaagcctcttctttttttgataacttcaggaggtctggaaaatgaccgcagttttagagctcctgataaaaccctcagccttaaaagggagttatcctagtggttctgtactccagggtgggaaggtagtgtagagactttttgagacactggtcttgctggttgatgaaaatgtttaggtaacaattggggatttaatttatataaaatgtactattatgcctattactaagctcaaatatttaaacaactttaaacttggatcatccatataagtagccaaagaaggagaagaaaccccttctcctgcatttctgaattgttttgtctgggacaacattaacctacagaggttcttaattcttgtcactgcatgagtggcatgcctgaggtgaggagatttcaagtctgatggagctacgagctctctgttgtgctattctgcttgtccttaagtgggctttgactgggatgtttggtctcagtatttgtatagcttgcttaccttcgtaagaagaattatagatccttaaccaagttcacatcagccatttagcattctatggagggaggttcccagttccatatcagtggcctttggaggagactgtggtggccttgccataactccagggtggctctgatggtggttttacattaagagtttgtctctagagaagacacaaacattgcatgggaatacatttttatgatattattttgggtccttattgccttttttctctcaagatgttttcaaactgcagtaaacaatcaatctataagaccattgaaagtaaggcccaggagtgttttcaagaacgcagcaataaagtttgtgggaactcgagggtggatgaaggagaagagtgtgatcctggcatcatgtatctgaacaacgacacctgctgcaacagcgactgcacgttgaaggaaggtgtccagtgcaggtgaggagtctctccacagggattttgggaagttggtataacaagatgtccaaaataagagaagactgaacttgcaggggctttagaatcaactgaaaggggtgtgagtgtgtttgtttacatctacctcttttgcccttcacagcaagaaattgctttctgggcctggcacggtggctcactcctgtcatcccagcactctgggaggctgaggtgggagaaatgcttgagaacagcctgggcaacatagtgagacactatctcttaaaaaacaaaaaacaaataagaaaagaagaagctttctggaaagcagtgtgacattatgtaacaaaatccttgaccttgcatgctccttggtttagcagtcctatagttaaaagaatcttttttttttttttttttcctgagacagagtcttgctctgtcgccaggctggagtgcagtggcgcgatcttggcttactgcaatctttgtctcccgggttcaagtgattcccctgccttagcctcctgagtagtgggactacaggcacgcaccaccatgcccggctaattttttgtattagtagagacgaggtttcactacggtggccaggatggtctccaactcctgaccttgtgatccatccaccttggcctcccaaagtgctgggattacaggtgtgaggcaccgtgcctggcaaaataatcttttttatttaatttaatttatttatttattttgagacggcgtctcgctctgttgccaggctggagtgcagtggcgcgatctcagcgcactgcaatctccgcctcccaggttcaagcgattcccctgcctcagcctccccaataactgggactacaggtacgcaccatcacgcctggctgattttttgtattttagtagagacggagttttagcatgttggccaggatggtctcgatctcctgacttcatgatctgcccaccttggcctcccaaagtgctgggattacagaggggagccaccgtgcctggcctttattttctttttgagacagggtctcagtctgttgcccaagatggagtgcagtggcatgatcatggctcactgcagcctcaacctcccaggctcaatcagtccttccacctcagcctcccggatagacaggactacaggtgtgtgccacctggctaattttttttgtattttttatagagatggggttttgccatgttgcccaagcttgttgtaaagtcctgggctcaagtgatccacccttctaagcctcctaaagtgtggagattctaggtatgaggcaccatgcctggcccaaataatcttttatttctttttttttttttttgagacggagtcttgctctgtcgcccaggctggagtgcagtggcgtgatcttggctcactgcaacctccgcctcctgggttcaagccattcccctgcctcagcctccccagtagctgggattacagtgtgcaccaccacgcccagctaatttttgtgtttttagtagagatggggtttcaccatgttggccaggctggtctcgaactcctgacttcgtgatctgcctgcctcagcctcccaaagtgttgggattacaggcgtgagccactgctcctggctgcccaaagaatcttttgggcaacagagataagatttaacaagggtataagatttaacaaggtttttttatggctacatcctaatagcaaaattttggaaacaatcaaaatgacagtcttgggatatgaatgttatcatgattctatatactggaatagtgtggaggaagtaggttacaagttagaaagttacccaggttttcattttttatatacactgatagaccagtgcctggcttagaagtaaaagggttaaacttcagttttctggtgaataattgagatttaactggatacagtgcatattaacgctgtaaatactgatggggagtagagttctggctgccgagtgtcttagctatggattgccttgtggccccaccttgtcttttttttttttccttgtctttttttttttttttgagagagtctcgccctgttgaccaggctggagtgcagtggcgcgatcttggctcaccgcaacctctgccttccaggttcaagctattctcctgccttagcctcccgagtagctgggattacaggcatgtagcaccatgcccggctaattttttgtatctttagtagagacggagtttcaccatgttggccaggctggtctcaaacccctaacctcgtggtccacctgcctcatcttttttttttttttttttttttttgagacagaatttctctcttgttgcctaggctggagtgcagtggtgcgatctcggctcactgcaacctctgtctccggggtccaggcgattctcctgcctcagccttctaagtagctgggattacaggagcgcaccaccacgcccagctaatttttgtatttttagtagagatggggtttcaccatgttggccaggctcatctcgaactctcctgacctcaggtgatccacccacctcggcctcccaaagtgttgggttgggattataggtgtgagccacctcgcccagcccatcttgtcttttttaaattaatgcgttaaatgaatgaaaaccaagggcaccaagatgtttcacaggtgattgctgtgttcccattcttttctcctatagtgtggcatttatgtgacctcacgcacattaggaagggacaaagtgtgtgcaggtagctctagcagcggagatgtctgatgatgtaggagtgggtgacggagccaggaggtcttccccggtgatcttcaggtcactgtaacgtaactgtagcgtttgatttgatatggggccataatttgaattgctctgttcctgtctgctgttcttctccagtgacaggaacagtccttgctgtaaaaactgtcagtttgagactgcccagaagaagtgccaggaggcgattaatgctacttgcaaaggcgtgtcctactgcacaggttcgtgttcttgttgcttccttggaatgctgtgggtcaagtgtgtgtgtgtctttgaaaaacaagattatgttttgttcagatgagagacaccttatttttaatctcatatgccgggttgagtttctggcactccttagtttgtgacacttggctttggtgggtttaagacctgtttctatttctctttcatttccatcactctcctctttctcctcacagacatccactctactgtggttaatatttgcctggatatgtgtatatccttgaaagatcatatagtgttattttgtgcatgtatgtgtttttaatgtgccaaaatgatattctaccttaaatttacttttaaaaaattcagtatcatgttttaaagaattacccatattgtgctacagataatataacaaggtttttaatggctacatcctaatagcaaaattttggaaacaatcaaaatgacaatcttgggataatgaatgttatcatgaatctatgcactggaatagtgtggaggaagcaggatacaagttagaagggtaaccagtttttctatatgtatctatatgtatttcactgttggggacacctacatattgtttagttatatgattggctgtgttttacttacaagtcaccaagtggtagctacttccattgccttcatccccttgatattccagataggacacagatcacatcctcctacgtcccttcaggaacctgtgtgtttctctgggtactgaggagtgtcattgtgtagtcacagaggcaggatgtgctggtctctagagcaccactgctaggttgcctgtgtctgaggactccttatcctgacgttctggccaacgcttggaattaccctgctgtcctattagcatgatgagtataaagtaatctcttgttcttacttttttttttaacagcccttgtcctaatgcacttacttacatttttcttgagcatctctttatatttttcagctattcagatttctcctgtgaatagccagttcatatatttggttcattttttaaaaattgggtttcatgttatttcactactgtgaatttggaggagttcttatgtaatcatccatttgggcatacgtctcctatctgttgccattctcagaacagaaatctttaacgtaatcaaatccatcattttgttgtgtgtgtgtattttttaaacacatggttcagaaaagccatggcggatggttaaaaagatattttccacagctgcttctattagcttcataagttgtccttttacattcaggacttgaatctttctggagctaacctttccaggtgtccagtatcttttgttcggtcaattgttgctttaaaaatttcaaagctatgttattactaggtatataaacggacatatctctacatctttatctgctgttccttaccagtatataatgttccttttttacccttgcgatgttttttgacttaaattgtcaaaaagcaatattcagtttgctattctagtttttttgttcctctgatatatctatctgtcccattcttatatttttcaaaatttgtctctcttggttggttggtttgattttgtaatagctttattgatacataattcacactcatgtagtttgcccatttaaagtgtacagtttaatgatttttagtatattcagatttatgcagtcatcacaattaattttagaacatttacattactccagaaagaaaccctgtatcctttagctatgatcctccaatccccccattccccacaactcagagcaaccactaaccaccctattctttatggagttgtctgttttgaacatttcatataaatggaattatacaatatggtttcgtgaccacatattgtatgactggcttctttcactgaacatagcatttttaaggttcatgtatgttgtagcatgtatcagtacttcatgtacttttattgctgggtaaattccattgcatggatatgccacattttgtttattcattcattggttgatagacatttgggttgcttccacttttttgctataacaaataatgctgctgtgaacatttatctatgagtttttgtgtggacagttcctttggatattattcaggaatagaatttctgggtcatgtggtaactatgcttaatcttttgaggagctgtcagactgttttccaaaatggctacaccattttacagtctcagcagcattgtatgagggtcccagcttctccatatcctcaccaacacttgttatcttttttattgtaactatcctaggttttgtgataaggatgcaaacagaaagctggaggtcttcagggacctagtgaatgaagttgtgtcctattttggcttgattttggttttccgtgtgcatagtatgacatgttgcccatgtttttatcttttgggatctgtcactatcacattactttgccaaatgttaggaacctgatggcccggcacagtggctcacacctgtaatcctagcactttgggaggccgaggtgggcagatcacgagatcaggagatcgagaccatcctggctaacacggtgaaaccctgtgtctactaaaagatacaaaaaattagctgggcgtggtggcgggcgcctgtagtcccagctacttgggaggctgaggcaggagaatggcgtgaacccgggaggcggagcttgcagtgagccgagatcacgccactgcactccagcctgggcaacagagcaagactccatctcaaaaaaaaaccaaaaaaacaaatgttaggaacctgaatatctaaatcaagctttaaagaagcatttgctagctatgctcaatgtttcatcttcactgtaataataaaatagattgagaaaaatgctttcttttaaataaacgtaagtaaaacaatttgaaaacgtttgttcttatcaaacagccttttgttcccttgatattttatacaaaatagtagatagcagaggataagttcctgataaggaatcagtattttctagcaggaaaagctagagaacaacaacctcaaaaaaaaaaaaaaaaaagaagaagaaagaaaaaaagcaattagcatttcacaaccagcagcagcagcatcacctgggagcttattagaaatggaaattgtcagtcccctccctggatctactgcatcaaaaaatgtgggaagggaggccagcagtctgtgctgtgtaaccttctgtcaggtgatttccatgcatgctaaactttggggaccatgctagatagatgataccattttcagaattattttcctacctgtctaatactctgactttagtcttttaagaacagatgctcaacagatatttattgagcattttttaatgtatcagggcagtatcatataccaaaaatacaataatgatccacaatataaaccttccctgagctcactggacatcatactttcagtaatagtttgttaaatgactgttgacatgatgaatgcccagtgctcatgaaaggttttatgagaaccagaggcaaagtgcctggttatctgttgggtacttaataaaccatcacttttgtttgaaactggccagattttctgtacattttgtgttactgctctgaaaccctctaagtcagaattcttttgattggcttcattcttcagctgaaaggccagtccagagctgtggatatatagtccattgctttcataaagtgttttttttctcctcctctatttgtgttgacttttagctacttgtgctattcattttccagaatgattcactcattccatcctgtctctcccagtttaactttctttggtgggttttctttggcattattggcctgggcacagtggctcatgcctatcattccagcacttggaaggccaaggtgggaggatcccttgagcccagcagttttacaccagcatggtcaacacagggagatctcgtctctcaaaaaaaaagaaagaaaattagccaggtatggtggcgtacgcctgaaatcctaggtacttgtgaggctgaggcaggaggattgccggaacctaggagtttgaggctgcagtaagctatgatcacacccctgccttccagcctgggtgacagactgagaccctgtctcaaaagaaaaataaaaagaataattgatttatttaagaaatatttgtagtatacctataatatgatagggattggagataacttaatagatttgatcattgctgtcatggggctttccagtctagtagagggaaaacagaaaataacattaaatatatatatataaattgcaaaacatatgcaatgaaggagagaaggagtgtgatagtgcataatggaagtgggaggccacatcaacttagcatcctcagggatatctcagaaaacctttgagacaaaacttaatccataagaaaagccagctaattgccccaaaagagtggaaacaccagcattccaggtagaaggaatagtatctgttaatattgaaggaactgaatggaggttgtcatagccaaagcagtgggctgtgggagagttgtgtgcgatgaagtcagggccagatagggaaggccgtggagttcttttaagccttcatacaaagtttgcaatttattctaagtaatagcacataggatattcttttatatatgactgtgagatgcagaagtggagaccatgcattctaactggggcttgggaggccagggactcatgcagcctagcctggcacatagccaggcactcccatttaaatgctgattgctggtgagatgcaggctcttgtcctagctctgtaggtcactttttgcttttgcaaggtaagatgctcacttgtatgagaaacagcgtattatgcacctgtagaactggtggacctgtgactcattctttttgttatgactggtgtttgcttccaggtaatagcagtgagtgcccgcctccaggaaatgctgaagatgacactgtttgcttggatcttggcaagtgtaaggatgggaaatgcatccctttctgcgagagggaacagcagctggagtcctgtgcatgtaatggtgagcagttttattcccagtccagcagcaggagaaaacatggcctttgtctgccaggctcccttcctccatttggaggttgtgcgaatgacagcagtggtgagatccaagccgaggatgaggggatggggaagggcagggtggtgtctggagacaggcatctctgcatgcagatccaccatacctgggagacctatcctgttggtgtttcttcttgctgcagtttcaggccatatggcaggctttgaggtgggagaggagggaattttgttgggggtgagtgggtgggtaggtagaggtgtgtcctagccttcctctgctccatatcatacaaaccacaaaagcagcagtagctatctacattacattggcatggaactaggatactcctgcaacaactccaccagagagagctgattccaggacctaaccccactagatgaggatttttgcagttatcaagaaggctgggtctgctcccctctgatctcttagagcagcctggggcaggagcctctctcctgctggcctgtcagttttccttaggtttctgtgctattttggaacccctgggtttgagggcatcctcatggactggtcagggactggctggactctgcttcccaccccacttaaaccatgggagtcgatgagggagttctcttgctttcaaaatagacagagagccaggtgtggtgactcacacctgtaatcccatcactttgggaggccgaggtgggcagatcacttgaggtcaggagtttgagagcagcttggtcaacatggcaaaacgctgtctctactaaaaataaaaaaaattagccgggtgtggtagcgtacacctgtaatcccagctgctagggaggctgaggcaggagaattgcttgaacccagggggcggaggttgctgtgagctgagattgcgccgctacactctagcctgggcaacagagcgagactccatttcaaataaataaataaataagtaaaaaataaaataaataaaagacaaagaacccggtagttaaataaaatcactgggttggaagctcaccatccatacagtggagtgaggaactcttccaagttcaataatgtgtaggtaaagaagataggttgagggcagtgtctcacatctataatcccagcactttgggaggccaaggtgggtggatcacttgagctcaggagttgtttgagaccagcctgggcaacattgtgaaacctcacctcttaaaaaaaaaaaaaaaaaaggtaacacgtagcagatgccaaataaatctgttgtgttgaatgccaagaggcttggggtgctctggaaggacagagcccgacacagtaaaagtccaagaaatattttataaattagtgaatgatgaaaaggttttctttttttttttttgagatggagtctcactctcgcccaggctggagtgcagtggcgcgatctcaggtcaccgcagcctccgcctcccgggttcaagtgattctcgtgcctcagcctcctgagtagctgggactacaggcaagcaccaccacatctggctaattttttttatttttagtagagatggggtcttgccatgttggccaggctgttctcgaactcctggcctcaagtgatctgtccgccttggcctcccaaagtgctgggattacaagcgagagccactgctcccggccttttctgaaaaggttttctttttgcttgtttttgtgttctagttgatttctttttctcctaagtatggtttaattttctggcatttctgccattcttatgtatgcccacatggctcacagatgcccggtgttttatcctgtgacctgtcagagctgttcttgggaggagttgtggagctttggctgcagggctcatgctcctggggtcactgagctccccacccaagggtggacagttgtgtcccagctgctctcgctttcagggagccagtgtgggccctgaggggcacactttagactgaaaaaccaaggattgaagtcagcagggtgacaagaaagttgggacaaagggaagcatttagaagagcattgtgaggggcttgaaggggagagaatagttagactttgaagagaggtcttgaatctagaatggatttttctctgcatttttttttaaaccttgtggcctctgtcactgaaggctgaggagtgtgacctcagaaactactccttggtgggggctatggatagtattagctatttaaataaaaaataaatgtgatttcttacctctttgggagcatggtcagggaggaaagaggaggcaggaggagaggcaggtctcagaacaatccagctgtcaatgcgtgttctctgttccagaaactgacaactcctgcaaggtgtgctgcagggacctttctggccgctgtgtgccctatgtcgatgctgaacaaaagaacttatttttgaggaaaggaaagccctgtacagtaggattttgtgacatgaatgtgagtatttatgtacagctttttctgtaacagccagataggaagtttttattttgtaagtacttgattttgcagatgaaaacaaatcaaaacacaagtggggctacatccttctggcccattgttatctacgggtattacttaggaggagaagacggagtgctttcaggtccctgcctgtagtttccttctgtggtgggaggctttgagcccagagactgagaaggactggggtggggactttatggtaaagttggttggtttcaggcagtgggtcctaattatgttttcctagattacttacagaactgactaagattgcaaaattattcagggtgtgattttgaaacaggtgctgaatgagtaggaaagacctagaaggctgcttgacttacttaagccagacccttttgttctctagagaagcataatttttctcatgcagaatgatgggagagggttttaagatttacgaggcttcacagggagtctggctgtgttgttcactgtccactgtgtatgtgtagagtccttactggaatgcctcatctttagcaaactggtttccttgatttttgtctcctggtaattctaaatcacttgtaaaaatggagtaattatgaaagtgttaatgacagatgttctactttcttgggtactcattacgcggaagttattgccttgtgtcaaagatgggaaaacgtttgattttaatgaagccctttacatgtcagttatttttataaagctacattgcttctgaatacattgtgtttgggaatgatgctgtatgtatgttttttcttcatagggcaaatgtgagaaacgagtacaggatgtaattgaacgattttgggatttcattgaccagctgagcatcaatacttttggtaggtgatttccccagattacttactgagagctgagtcaatttctgtgatgacattagaaaagtgtgctttcagagtgatgtgctttaattctgcagtagaaggtggaactattcacagctttagttatgaaacaactttgttggctagaataaaatgaactcatagatagtctgtccccgtggagcttggatgcacagattttctgacaagggaaataaagtcaaaatactggcttccttctttacccaaaaatatccatgtgattagcataagcatagtttaatgctatagactgaatcctgattgatgtaagagtgtttatttgactgaatgctatatactgaatcctgcttgatgtaaaagtgagcctcatattttgcagaagcagggtatatcatgttgtcacgagtccataatttaatcacaaaaataatatccaggtaacaaaaactttgtcttcttaagcatttactagtagtagcattccatattaatctgttgacacagctactccaggtaacatgttgaatattctgcaatctcttcctgtcagccagtatatgagggctatttctttaaaagcacttggtatggagagatggtgtggtgtaatacaggcagcacagacattctgctctcggtagtatgtctagccagcagctctggcatttgacacaatggtaatatcctaagagcatttcactttagatttgtgaagtacttggtcaagacattaactgtttggaattgttcacaggaaagtttttagcagacaacatcgttgggtctgtcctggttttctccttgatattttggattcctttcagcattcttgtccattgtgtggtaagtcatcaacttttaagtaattaaatgttttatttaaattttgatcaactccaaccatgtaatctctggaaaaggtaaaacttgttcttagcaaagtttggcctgatatttccaatagctttttttgttgttattcctaggggaacatgtcttgtagaaagcttaactaatggtcttttaaaaaaaatactatttttgtgtgttggtgttttaatatataaatttcttaggaattttatacttttaagcataggagactgtttaactggatttgtccaggtcctttgatgagtaaagcccttattgaagagcattttcaggctgacttcgttgcaatagagcaaatatcaaacatcggcatttcagatgttccccatatatcatgtagattattggcagcagatggctatgtcttcagccttctgcacaaataggatgtagggactggggcccagctgtcatatagagtatttacatcttccccaaaaaataagagtaagcagtcttttctgttctcattcagaatcagtaacagctacaagttgaattgggctttgactaaggaactcctggtcctttataaatttgaggccctttttcataaatgttcttacgaatccattcacttgcatctgtggggaatggggatttgtctgctgtagagatgagaaagtcacacccaggcttccagacttgttttcccaaactctttcatagtggccttcctatgagcatttaaaaattccagcacaactctgatgacaaaggagtttttcctactgcctccttcctttcctttcctgctggcttctcctgcctaggggccatctcacagagcagctcttcctcagggtggtgagcatgatgggtataggaagatctctagggagcacttgtgctgaagaaagctgaaggtgacgtgcttgaagctttgacagatgtctctggatgacagtgccatccatcacgattgcttctattggaggatggaacctattttgtttacagggaagttgcacatgtggacaaggcacgacccttgatttcagagcaaagcctccgataggagggagggccatggcttgtttttggtcatagaatgcattgatggcacccagacaggaagcctagtcctggattcttggtccttgccctctgtcacctattatgcttcagccacaggcagggatggggcagcagatggccatgtggttagccttctgcagaagtaggatgtagggattgaggcccagttcctccagcagagcatggtccacagaaactgtggagacagctaagagagtgaggccatgggccggggcagtgcgaagaatgctgcaggcccagccacctgggtcttcctaccagttgcccttccagtcagtgcggtcctggtgtacccagcatctgggacatttgtcatttcatgcacaggaagatgcctttattattcccctgcccacagagggataaatttctcagaaaacatagcacttaaaccttgcctctttctgtacttaacgccaaaatgtatttcctttgagtgcaaaggaaacacttctagactggtggcataactaaagcttgggtgagaaatggattgtcatctgttgagcctgctatcactttctacaactcaggttctaagttcttcagttagtgttaggaatagcctgtgatgaaatagtactcactaactgaattgtatttgtagggaatgaccttcttgctgtttctttctaggataagaaattggataaacagtatgaatctctgtctctgtttcaccccagtgtaagtataccatatgaaagaaacataatcttcgcctggtctgaggccctgttaggcaaagaccttcacctgacccagcaagagctttcactggctgatggaaggtcatgttgcagcaggaagggtctaggttggaatgtttacccttctgacaacagtgatggtgaacttcgattagttgcatggatggacatttaaagagctgtgctgtccccttcccaagccataaggagtgatttagccattcaacacttagttaatattttgagttcaatttctctcttgggatcttaccttgagaggtttgaatcctcttttgggtcttcaaatggtaagtaagttttcaggatgcttgaaagctagtaattactgtttttgccattaaaagtaatggcattaattacttttgcaccaacctagtattttttagtcacttaggttgagtgagcctcacctagcacttttttcttagcatcacagtgccaacagaataagaggctgtttgatgggtaagggtggagctgtgaggacctccgattcatcttttattcctatcaatcaattgaacccatgtctttgcagaacgtcgaaatgctgagcagcatggattctgcatcggttcgcattatcaaaccctttcctgcgccccagactccaggccgcctgcagcctgcccctgtgatcccttcggcgccagcagctccaaaactggaccaccagagaatggacaccatccaggaagaccccagcacagactcacatatggacgaggatgggtttgagaaggaccccttcccaaatagcagcacagctgccaagtcatttgaggatctcacggaccatccggtcaccagaagtgaaaaggctgcctcctttaaactgcagcgtcagaatcgtgttgacagcaaagaaacagagtgctaatttagttctcagctcttctgacttaagtgtgcaaaatatttttatagatttgacctacaaatcaatcacagcttgtattttgtgaagactgggaagtgacttagcagatgctggtcatgtgtttgaacttcctgcaggtaaacagttcttgtgtggtttggcccttctccttttgaaaaggtaaggtgaaggtgaatctagcttattttgaggctttcaggttttagtttttaaaatatcttttgacctgtggtgcaaaagcagaaaatacagctggattgggttatgaatatttacgtttttgtaaattaatcttttat

SEQ ID NO: 15383 - DNA, 52023 bp, Homo sapiens
gcactccagcctgggcgacagagcaagactccatctcaaagtaagtgaataaatgaaacataaatgaattttatatttagacttgggtcccatccccaagatacctcattatgtatatgcaaatatttcaaaatttaaaaaattctgatgaatgaaacacttctggtctcaagcattttggataagggatgctcaatctgtatctctttatttactcctaaaatcagccaaggaaatgggcatctctccgttcccccccttccttttttttttttctttgttgttacatgagttgtactggtttcacttcatttgacagtgttctgctaatgactagacgtgtatctctgacctggacttgttctctggagttcatattcagctgcccatttggcacttcaaatataacatgtccaaaattagttaccttttttttttttttgagacagagtctcactgtcacccaggctggagcgcagtggcgcaatcttggcttactgcaacctccacttcccaggttcaagtgattctcgtgcctcagcctcacgaatagctgggattacaggtgtcccccaccacgcctggctaattttttttttttttttttttttgtatttttagtagagatggggtttcatcatattggacaggcctgtgttgaactcctgacctctggtgatccacctgcctcagcctcccaaagtgctgggattacagacgtgaaccactgccccagccagttacctattcttttgattacaagaatgagtagctggacacagtggcttacacctatagtcccagcactttgggaggctgaggccggcggatgacttgaggccaggagttcaagaccagcttgaccaacatggtgaaacctgtctctactaaaaatacaaaaattagccaggcgtggtggtgcgtgcctgtaatcccagctactggggagactgaggcaggagaattgcttgaacccgggaggcagaggttgcagtgtgccaaggttgagccactgcagtgcagcctgggcagcagagtgagactccatctcaaaaaaaaaaaaaaaaaaaaaaaagaatgagtatcggatacaggtttagcctaggactaggcagggctgctggtaattgtggaagtagtctcattgcctaacctgaaacttgcatcctggttactggtcttgctggagagtcttggctcaggttacgtcccaggtctgttgaggagctcttgatagggaattagttgaagcagctcatactctatcctcctttactggtataaatccataaaattgtttagttcccaggctctggggtccctggcctagcagagagcactgctccctttttctcattccttagtcccaacaacccgcacctgacacttactacacgtggcctgcttccctgtcctgtgtgttttggggggtgctgaagaggaaggctcctgtgtcttcagcacaaacacaataaacacttcacagcagtactggctttatgttttccatttctgatatcagaagtaggagcatgacattgatagtgtcattttgggggaacttttcgtacttcatgcagcagagcagtgaagagtgagctgagtgccttggggttctgcagtacactctcaagtagtattttaggaaaatgcaatttgctgaaaaaataaaagaaattaatgtaaaaaatccacaagctgggcgcggtggctcacgactgtcatctcagcattttggaaagctaagggggaaggatcacttgagcccaggagtttgagaccaggctgggcaacatggcaagaccttgtctctacaaaaaaatagaaacaaaaattagccaggtgcggtggcatgtgcctgtggtcccagccacccggaggattgctcatgcccaggaggttgaggctgcagtgagtggtgattgtgccctgcactctagcctgagcaacagagcgagaccctgtctcaaaaacaaaacaaaacaaaaacccacacgtttccagaaccttctcatataacactttatttacattgttcttaaatacgtgtgggacggttatatacataccactatacttatgtgtatatatgttgatatacacacaaaattatatacataatttttgtttgtttgtttttgagatggagtctcactctatcacctaggctggagtgcagtggcgtgatctcagctcactcactgcaacctctgccacccgggttcaagcgattctcctgcctcaggcttctgagtagctgggattacaggtgcctgccaccgcgcctggctaatttttgtatttttagtagagactgggttttaccatgttggccaggctggtcttgaactcccacccttgtgatccacccacctcggcctcccaaagtgctgggattacaggtgtgagccactgtgacctgccatatacataattttttaaagtttcacgattagttttagcttaaaaatgtcagctctgggcttaatgaagaaaatatggatatactttatgtcaatgcattaaagtgaatggccataaaagcttatcccagagacaaaacaattcagatataagagaagtgggagagtggaaggtttatctaatcttctgtaggcaactccacagctacaaccagaaggccattttgttacaggcctgaaagccccgttttctttttattcttctttgaaacctttagaaggaacaaagtattggctactttttaccgctgatgtcagtgttaagaatcttgtgataacatagatttactctccctgctgaaaatcactatgtggctcatcagtaacacaactagacatgatgacttaatgcaaaggaagtcctatgtaaatgagcaatgaaattgcaactgtgtataaggaacaaaatagaatatgaaactccagaatcttttgttttcatttctgtttctcccaaggctctatcattcaaaactccagaatctttcagcatgcaattgtctcctgatatcagcccctctcttgttttgttttcttttttttttttttaatcacagtgagccacaacctaggagtcttttagtggtttctacttggtttgctctgcagcctaccagcagatttcctacattccggtcttgttcccctctagcccattctccacactgcagtcataatgaaatttctttcttttttgggggggatggagtctcactctgtcacccaggttggagtgcagtggcatgatctcggctcactgccacctttgcctcctgggttcaagcgattctcatgcctcagcctcccaagtagctgagattatacgcacctgctaccacgcccagctaatcttgtatttttagcagagacagggttttgccacgttggccaggctggtctctaactcctgacctcaagtgatcgcccaccttggctttctctctctttttttttttttggattttgagacaggatctggcctcgttgcctaggctggagtgcagtggcacgatatcagctcactgcaacctctgcctcctgagctcaagccatcctcccacctcagcctcctgagcagctgggactgcaggtgtacaccaccacgcctggctaatttttgtattttattttatttatttttttggtagagacggggttttgctgtgttgcccaagcttgtcttgaactcctggggctcaagcgatctacccatcttggcctcccaaggtgctgggatgacaggcatgagccaccacagctggcctataatgaaatttccaacttacagctattgccattatccaaagcccagaatccctgatttccttccatagcccttcatggcctgaccagtgcctgactctccagcctcacacttcatattctctctgtactgctctgcactgtagcctcattgagttgctttcacgtctttaagtgttgtgttctattttttgtggaattcagcatatgttatgcccttgacctaaggcctctcctttcttttccttctctggggtgctgcctcatccttctggtcttcaaaaccgtttccctgggaaaacatctttgactcagcaggcagggatcatgcccctgctgtgtctgtgcataactttctgtggctacttctgtcttggtctgtgatgtactttataataattttggtctttcctccagtgtcacaatactggaagtctgtttctttttctctgtgttgtatccttagtgcctgaaaggtaggaggttctcaataaatatttgttaaataatcaagtaaatggagtctggtggaaaagagaaaaaataagtgtagaatgtgtgtgcaagaaaggaggggtagggggatgaaaaagataacaaaagcacataacaaaacaacaaaaagcaaaaacaacaaaaaatgcagatgacaaaaaagataacaaaatgatgactgctgtggcaacttgtagaaagtaaggaaggtgctctcattctagagagaagtaggcagccattgtagttttttaaagagagaatatgggctgggctctgtggcccacgcctgtaatcccagcactttgggaggccgaagtgggtggatcacgaggtcaagagatcaagaccatcctggccaacacagtgaaaccccttctctactaaaaatacaaaaattagctggataggtggtgtgcacctgtagtcccagctacttgggaggctgagacaggagaatcgcttgaacccaggaggcggaggttgcagtgagctgagatcacgccactgcattccagcctggcgacagagtgagactccatttcaaaaaaaaaaaaagaatatggccagacactgagctgagatagacagtgcggcagtgtctggtattaactgtaataaactctactgtcagaagcaggtggtttatacttaagtttattgagagaattggatatggataagagataaactcttgggaaatggggagaaatataaattctgttgtaaagcctgtaaaaaattgagattactagtggttagaattttggaagtgaagtgcagtgaaatattgagtacctgagaggttacttgttagtgaaaacacaatagcagtagtacgtagctacagtttggctccaaaggaagaactgtttttactatagtttgtaatggcttcagaatcttcaatttgagatatccagttattaaaagagaatcaattgcagttgaaatgcattagttaagtattttaaagtgctttagcaagctacatttaaaaagtgcttattatagaaaatatacccaaaataaccaatgatgttactgtcttgtgcttattttttctagacctatttttatacatagttaagattatacaatatgaatatttctgaaatctatatttaacattataacatatgtatttttccatgttctttctttttttttttttttgagactgggtctcatcctgtcacccaggctggagtgcagtggtgctatcttggcttactgcagccttgacctcctgggctcaagtgatcctcccgcctgaaccttctgagtagctgagactacaagcacatgccaccatgcctggctaattttatttttactttttggagagatgagggtctcactattttgcccaggctggtctcgaactccttgggtcaagcaattctctcaccttgacctcccaaagtgctgggattacaggagcgagccaccgccctcagccccatgttcttaaaaaccttttgtgaacgacatttaaaatagttgcagattttttcccctgtctttggaagtgttacaacatccaaccatttcacagttactaatttaccatcattctggtttttgtccttgaaaataaggcaaggctgaataatgaacatctttgtggctaaagtttttttctttactttgagttgttaccttcctttagcttagttcagtggttttttctttttcttttttgagatggagtcttgccttgttgcccaggctggagagtagtggtgtgatctcggctcactgcaacctccgcctcccaggttcaagcagttctcttgcctcagcctaccgagtagctgggattataggcgtctgctgccatgcccagctaattttttgtatttttagtagagacagggttttgccatgttggccaggctggtcttgaactcctgacctcaggtgatccacccgcctctgcctctccaagtgctgggattacaagtgtgagccaccatgcccagccagttcagtgattttcatatttgagtgtgtcagccttgcctggaagccttgttaaacacagactattggatcccactgggcggatttctgtttgagcaggtctgaggggagacctgagcatttgcatttttaacaaattcccagttgatgatgatgctgctggtttgggaactacactttgagaactactgggctatattattgacaatgaaactataatgttgaggttaagttcctaagtcagtaggagtgattatgatcttgaatgaaactgagttcatgtaccaacctgtatcagggaaattgaagaactaaaggaccatattgcatttcagcactgagaattcgtgcagtttgtgaacatgtgagtgctgatatgtgcaaggtttttgctgagtattgtgaggcaaggatgttgtaatgaataaaaaatagccctttttggctttttttttcttcttttgagatggagtcttgctctgtcgccaggctggagtgcagtgatgtgatctcagctcactgcaacttccgcctcccaggttcaagcgattcttctgcctcagcctcatgagtagctgggactacaggtgcccgccaccacgcctggctaattttttgtattttggtagagactgggtttcaccatgtttgccaggatggtctccatctcctgaccttgtgatccccctgccttggcctcccaaagtgctgggattacaggcgtgagccaccgtgcccagcccggccttttttcccccgcctagagatggagtcttgctctgtcgcccaggctagagtgtagtggtgcaatctcagctccctgcaacatctgcctcctgggttcaagcgattctcctgcctcaaactagctgggattacaggcatgcaccaccatgcccggctaattttgtatttttagtagagacagggtttcaccatgttaatcaggctggtctggaactcctggcttcaggtgatccttggcctcccaaagtgctgggattacaggtgtgagccaccatgcatggcctcatttgggaaacttttgatatcagaatcttaggtttttcattagagattgtcagatttccatattcctctggaaggtaaaggcctaattgctagcattctggaagccagttagggtaggagggtaggagggtagggtattgggtagaggataaagaaggggtttgggaaaggtggggggtgtctcttggcagttgtatggttaaattgagtttttgttttatttagtgatatgtgttttttgggtacatgtgatattttgatacctgtgtataatatgtagtgatcaaatcagggtgattgggatacccatcatttgaaacatcttttctgtgttaggaatattacaagtcttctagctgttttgaagtatacaataaattgttaactataatttctgtactgtactatcaaatattagaacttactaatcaaactgtatttttgtaacactaaccactttctgttcatctccaccactcccacttcccttctcagcctctggtaaccaccattctgctgtctacctccacgagatccacttttttagcttccacacatgagtaagagtctttcttttaaaactggttttgtgagcatatttaacatcagtagcaataaacttgtattttaagctcctgttgctgtattttgaggaccttctaagtccattggaaggattttgaataccatagtgtctgcagtgatagttgttgaaagaaagggaaggcatcagtgcaaatatttttagacagtttttaaagagactcaagtcacccaatttgtcttctaaaaatcctgattttggaagaggcagtggagtttctgttgataaaaaatgatttatagtttgtgcttggcacttcctaatggattacatcaggaaagatttattgtctggcactctcattttaacgatactacaattgattattaggtttagatgctaataccttttttacctttatttcagagaagcttgattctttgctctcagactacgatattctctctttatctaatatccagcagcattcggtaagaaaaagagatctacagacttcaacacatgtagaaacactactaactttttcagctttgaaaaggtaatttgaattattcatggaataatgttggggcactgggggcttggtttggcaaaaacaaaaaagtaagggtatctactgaaatcttgggaaattacattttaaagatttgtaattaatttccagtataatgcttattctaaaattcatactggggctgggtgcagtggctcacgcctataatccgagcactttggggggccaagacatgtggattgcttgagctcaggagtttgcccaagctcagcctgggcaacatggcaaaaccccgtctctactaaaagtacaaaaattaggcatggtgacacgtgcctgtaatcccagctacttgggaggctgaggcaggagaatcacttgaaccagggaggtggaggctgcactagccgagatggtgccactgcactccagactgggcaacagagtgagactctgtctcaaaaaataaataaataaaataaataaagttcatactgatgagtatttttaaaaaagtaaatagatattgcagaggtgttaatgatggtaacgatgtttagaaaattctaacataatttaaattaattgaatgcttataaaaccttttgtttttggtgctactttataaccatcaatcatgtgctaaatattatctttatatatgaagagataaagattttgttcaggaccccacagcctggtggtgagctgggtctagattttactgttctatttatttatttagctaactagttacttagtttccaggattctttaacctgcttcatatttatttatttttaaaaacagggtcttgccatgttgccaaggctgatcttgaacttctgggctcaggtggtctttccatcttggcctcccaaagtgctgggattacaggtgtgagccaccatgcctggcccaaatttaatattctttctacattgagttcctcttacttcttagcataaattgatggatatgttctatttcagtagtaattttaataccacgtattgttttgcacattgaaatgttaaataattgcaggcctctttttaaagtctttaggaagctttattcagtatcaaaaaacagacacatggagaattgactgaattattctttatttatttatttttttgagagtcttgctctgtcgtccaggctggagtgcagttgtgtgatcttggctcactgcaacctctgcctcctgggttcaagcgattcttgtgcctcagcctctcaagtagctgggactacaggtgcacagcaccacgcctgggtgatttttgttatttttagtagagacagagtttcaccatgttggccaggctggtcttgaactcctcacctcaagtgatccacgatctcggcctcccaaagtgctgggattacagacaggggccactgcatctggccatctttattctttatataggacaagccttctcaactatgttaaaaaataaaaggaatatgtgcgtctggtttaaaaaacaagccatggaggatatgcaaagtttttacttctaactcagttagacttctcagacccagagaggtttcctttgtaaacttccaattttttgttttgttttgttttttgttttttgagacagagtttttgctcttgtcgcccagactggagtgcaatggcacgatcttagctcactgaagcctccacctctcgggttcaagcagttctcctgcctcagcttcccgagtagctgggattacaggagcccactgccatgctcagctaatttttgtatttttagtagagatgaggtttcaccatgttggccaggatggtcttgaactcctgacctcaggtgatccacctgcctcaggctcccaatgtgatgggattacaggtgtgagccaccgtgcccgacccaaaatattttaatgcatgttttttgcctataggtctctgtgtgtgtataggtgatatagatagcatatttacctcattttaaacagctgcataaatattcctattgcatagaattgtaacaacatactgactaatacactacagatggatattgtttaaccaaagtgatttttttaatacaacaaacagtgctctagtgagtatctttgtaaatgtgtaccttgatgaggtgtttttataggatatattcctggaaggagaattactgggtcaaggatatgtatactatgtttattgatattgctctttcctcccaaagagatttgacaaatttattcttccagcagcaatatatgagtttacctgtttcctgttatctttgccaatagtaggtttatcagcctttaactgtcacccctctaaagggcatggcattttatagttgttttgattttcattttgtgtgacattgagcatctttttatatatttgtaagtaatttgttttatatttctgtaaactgcctttttatctcttttgactatttttctattgaatttgtctttctaactactgaattgtagcagtgcttagtatattaaggagattggttcattgtcatgtggttattttaggcaaatttttaatgcaaattaatttttcctagctattgcaattatccttaggttattttttaatgacttctttttattcgattttatgtcagaatattatagtattggttattagctttcaacttacaccaaatttgagcagattggtaatattaatagctacagttaatcaggtacttattttctgtaatttactggcattttacataagttatctctaaaagtgattccttttttgaaggaacaaaaaaaaaaaaattaaggcttagacagcttagtaacttgcccaagattactcagctagtaaatgacagatacaagatttgaacaaaggttggactccaaaacttgtgttatttctgctatactggtggagagtttggtgaagaagtggatatagtagcaagaaataagtaggagcgaaggaagagtgaggaaactataaaatgaaaagaactcaaagtttagctttttgggtttctttggatttgaagtggcctgtagaatccgtattctagaggcaaaaacttccatagccttacatatttctctttcaagtttcgtagatgacattgattccctaagaaaatattaaatcgtagccacttgttatcttttctctgtgtaagaaagcagggaagtatgtaatttattttacaaagtttccatactaaatatttaatgggaaatttatctaacagtctatggaattttataccaggtgttttaaaataggttatttcctttaatccccaaaaccgttcagttattaggtgatattatttccatttgtagataaatacttaggattcaaagattgaggccaaggtcggacagtgagtaaatgaaagtaggacttaagccaagtttgtcagactccaaagcccataccctttcttttctatcatattgcgtcattaaagtttaaaacaagaacaaaaacaaagatagctgaagtaatcagtttgtatcagggctgaattaactctatgaaacccctcattacttgatggtaaatgagaagattccgtttttcgatagcagtggaaggcaaagtaatttaaaccaagatcattgcattaaatttggatgtaactattagaggttgaaaaagcatagaaacactgagaggttgtatgaagagttgaagtaacttaagaaaaaaagaaacttgtttaaaatttgccttacaagtttcatttcctttttgttataaatcaagaaattatcagctaggcgtggtgactcacacatgtaatcccagcactttgggaggccgagctggatggatcatgaggtcatgaggtcaggagatcgagaccatcctggctaacacggtgaaaccccgtctctactaaaaatacaaaaaattagccaggcgtggtagcaggcgcctgtagtcccagctatttgggaggctgaggcaggggaatggcgtgaacccaggaggtggagcttgcagttagccgagattgcgccactgcactccagcctgggcgacagagtgagactccgtctcaaaaaaaaaaaaaaatcaagaaattatcttatttttaaataacgaaaaagctgcggagtatatactgttttgatacttttttgatgttgcctgaatttttttggaaaaagttaaatgtttctcctaaaagtgaaatatatcagattacttgagaaggtctagaactgataaagaaatgaaagtgatatacctgactaaatggaccattaaaaatggttagggtaataatgttaattcaaactggttagctggtctttagttactgtaaattcttaagtcaaaagtcagaaagataaaacgttaaagaaatctgtaagaaaatgacttcacataattttgggaggataaagtaaaagaaattttgacattctgttggacgttttataactcaaaagctaatattggaaaatcaaaaaacatgaattttataatcgcttggtctttatctttagaaaagattcttaatgtagcaaatgaaaaatgcaattccactgatttctttctgaaaagaacattaagtaatgttgcaactcttagctttaaaacaaaataataagacatttataataagtatgcttttgaaagttctcagcataactggagggaaaaatcataactgagaatgtgtgggaagatatgttttaggatagcagaagaaaatgttccaaggatttacgaaataatgttctattgtcttttccctttgaccattaaaaaaccacaagcaaactaaaattaccttgttatgctcaaaaagttaaaaatatttgttgccatggagatagtcccagtctagatttctttccggtagtttaaagacttttgcaatcccatggggaagtaatatattttcagtacaacagctgacaaaatttgtttctgtgggtgagatgaataatatacctttctttgtctttggtgttcatggacacattgaaagactataaataatacttgagaaagtcttgctcaccactcctagttttcatgtaaggatggaaagtcatagaaaacaaaaagaatagtaagccaattaaagaactggactgaaactcaacaaaaagaatagtaagcccactaaagaactgaagtgtataccccctcccctctcctcccctcccttcccctcccctcccttcccctcccttccccttcccttcccctctcttccccctccccttcccctctcctccccctctcctcccctctcctccccctctcctcccctcccctcccctcccctcccctcttttcctgtcttctggtgccaatggagtctatattctaatgtctgtcttagataccttgtatttattttcctaactgtaattgtgggttacttttttgcaagatatgttgttttgaggaggaaaaaaagcacgagtactttttttttttcttattttgagcgggagtctcgcgctgtcaaccaggctggcgatctcggctcacagcaggctccgcctcccgggttcactccattctcctgcctcagcctcccaagtagctgggactataggcacccgccaccatgcctggctaatttttgtatttttagtagagatggggtttcgctgtgttagccaggatggtctcgatctcctgacctcgtgatccgcccagctcaacctcccaaagtgctgggattacaggcgtgagccactacgcacggccgcatgagtacttttaaatatagaaagcagcatttattaattttgcacagcaataagaattttctcatagtccacccagcttgatagagacagcatagtacagggttttgaaataaaccaggtttatttcccagtttcaccatttactagctgtgtaactttgagtaggttgattagcttccaagcctcaatttgtacttgtgtgaagtggggataatagatgcatagtacctaacaccaagtaggtgttcaataaatggtatataataggattagtttttgataataatttttttagataatcaggattccaacttaactacgcagtcatgtgtgtttccttattcttcagtgttttccaggagagatgaatgtataagttctttgaatatctttaccctagtgtgagtttattgtgatctgctgtttttatagctaaataaattagttcatttgtcgttacaggagatatattgctctaagtacctaataagactttagttgtaacttgcatagtgttttattaatgtcaatgcttctggctttttaagaaagtttaattatgtgaaaatgagacttaaaatttgtgtgcttagagtaaaatatgaatgcatttttcttcaggcattttaaattatacctgacatcaagtactgaacgtttttcacaaaatttcaaggtcgtggtggtggatggtaaaaacgaaagcgagtacactgtaaaatggcaggacttcttcactggacacgtggttggttagtatggagcttgttggtttgcccctgtgtctggtgtattaggtctccaaatctaacttgattgcatattcttttctggtgcaggatagtggggacggggtgtcatagaagtgctattctttgacttttctttgaggtatataagtttagaggcaggaacattctaatagaaggaaatgagtattatctaaatgtcatactagctggctggtttaatgattaaaattaaattcttcttaagtgataggaatttaacctttcttttcctcagtgactgtaagctttctttatgatattttaaacagggaagcttggagataaaatacttggtgatcctattacgtatgtatttgagaaaatttatcaaacaagcaattgcagtttactttttgacctttttctgcaatgagaaaaaaaaatgtcattgaaatccacaaatagtatagttcctaggcctgtacattctaaatcatgctttctgtctctcttagttcttcctttacctagaagtagataaaattattccagaagaaaatcttagcagttttgtttgttttgggaaagggataggtttcaagtgactaaacttgaggctaccccttaggagttgagattatctagcttctttctggagcctttgtttcttgttttgcagagctctcacagtactaggcaaattccaccctgaaggatttaatttttattgagagtaatgcatagtttcttatttgatgtaagtatttttaaataataattttttttttctcttaaggtgagcctgactctagggttctagcccacataagagatgatgatgttataatcagaatcaacacagatggggccgaatataacatagaggtaaatttatatgtgaattttttttcagtagcttatatctctgattttcaaaaagctgctcagttctgcaaaggtgaaaagtaattatacttatttctttcctcttcgtatttgaagttttttactaggaaagtagactttttaaaaaaggataatctctaagaagctgtgttatgatacaccctgtatttctaagtaccataattgagagagttacatgtgggatggataataggaagagaaaactttctttccctcctgactcattttttaattctttctcaaataataaatgtaaacatcctcagaaatgaaaagtgaagtattatttttcaatttctctgtttttctgctagacacactggaaatgctagatcaatgaaaggtggtagttcatagtctgagaagttaaagaggaagctaggaaagtcaggctgtggtcactcttccattgaaagagtagcaatagaaatcaagaccacagtggctgcattggttaagacacatatctatctgtcagatattagtctacaaaacaaaacgtttcctcataattgtgaattgaagttgattctgtgtttcctgaaaaatgagaagactctgggtggtggtggtgatatcactaaaatagatcacctgtgggaaaactgagtaagattggtcaaaatgaaatgttcaggtgtatttgagtgcttaataggggtaaaacagtctgctggagctatatatactatatgttttaattatatccaatctacatgactgttagtcctttgactgtccattattgtgaaaaagaaacctatggccttgcagtatgttatagtttgttaatgtttaagctatttaatgtcaatgttttgaggagtctggcctaccagaaagagtcagaaatttagtagaaagtaaaggaactaatattataaatgcattcattctagaataggcaaagcatcactggaatgtcttaaatttgcctgttctttcaaatcaatttattttttaagaatacctttattttaaaatatatgctcattgcaaaattcggaaaatagattatctgtacttggacagataactactattgacattttgacagacatccttccaaatttttttttctatgtgtaaatacacaaataaatatagttatacccactattttttcctgcaaaactaggaccatacaatatgtacagtttgtcttcacacatttttcgtttaacaatatgattatgaaccttttcgtgttaatatagatctaaattagggttttgtttgtttgtttgtttgttttttgagacggagtcttgctctgtcacccaggctagagtgcaatggcgtgatcttggctcactataacctctgcctccccggttcaggcgattctcctgccttagcctcccaagtagctgggactgcaggtgtgcgccatgatgtccggctaattttttttcttttttttgagatggagtatcactctgtcactcaggctagagtgcactggcgtggtctcggctcactgcaacctctggctcctgggttcaggcggttctcccgccttagacccttgagtagctcagactacaggcacatgctacctcacctggctaatttttgtatttttagtagagacggggtttcaccatgttggccaggatggtctcgatctcctgacctcatgatctgccagcctcggcctctgaaaagtgctgggattataggcgtgagccactgtgcctggcctcaactgttttgtttctaacttttgaaataaaaggtattgtagtgaacagccttgggcacaccttttggtgcatgtgtttagttggaatagtctggatgataggtaatagtctgggaagttaaatgaagaaactgtaggaagctctgtctaggctgtgcgagggcttcagataaactcccatagctgagtagcttaacacaagcaaagttttttcttactctcctgtggcttgatgtgggttaggtggttctcctctactttgtggctttgacttttggacacatgtcctctgtagttctcacagaaagaaaacagagctagagaattatacaggatattaagggccaggcttggaaatggccttccgttcaatacattctagaacactttatctctgacctgctacaaaggagaatggaaaagatagtcgtaatttgagctcagaaagagaaaatagtgtggtaaatgcacagcattgtttttgctgcagtgcatatgtctgcttatttccttagaataatttattcttttttgtttttttgagactgagtctcactctgttaccaggctggagtgcagtggcgtgatctcagctcactgcagactctgcctcctgggttcaagccattctcctgcctcagcctcccgagtagctgggattacaggtgcgcaccaccacacccagctaatttttgtatttttggtagagacagggtttcacaatgttggccaggatggtctcgatctcctgacctcatgatctgccagcctcggcctctgaaagtgctgagattaaaggcgtgagccactgtgcctggccagcttattaattcttaagccaaaatatgtgtctttaggatccaagttaaatttgctcagattacatttttttttttttaagatggcatctcgccctgtcacccagactggagtgcaatggcgcgatctcggctcaccacatcctctgcctcccaggttaaagcgattctcctgcctcagtcccttgagtagctggaattacaggcgtgtgccaccatgccccgttaatttttgtagttttagtagagatggggtttcactgtgttggccaggctggtcttgaactcctgacctcgtgatctgcccatcttggcctcccaaagtgctgagattataggcatgagccaccacgcccagctagattactcatttttttcaaatacttccttttggaaaaataggaattctgtttccatccatacctttgtttcactaagtacaaaaatgagtataactaatatttcattgtaagatatttacttagccaggcacagtggctcacacttgtaatcagcactttgggaggctgaggcgggtggactgcttgagcccaggaatttgagaccagcccaggcaatatagggagaccttgtctctactcctccacaaaaaaaaaaaaaaaaaaaaaattagctgggcatggtggcacatgcctgtggtctcagctacttagaatgctgaagcagtaggatcagttgaattcggaaggcggagactgcagtgagctgagattgtactgctgcactccagcctgggtgacagagcgagaccctatctcacacatacacacacacaaagatgtttacttacaagtatactcatcagataccttgagggacttttgcatgaaattaataatgtttattgaaaaaatgatttactacttacaggggtgattttcatactctttataattcttttgatacttttatagttcataagtgtggtgattggctgttcacacacacatatgagatgtaccaccctagaaccttgttacaatgttagcacattaccagtctgacatgaaaaaaaataattctttacacttaccttgatgcaaaaacattgtctatctgcactaatatcttaggaatataagtgagcaggaaaaaatatatatcttatttttaacacatcatcattaaatattttgtttatgacagtcttacttggtcactcaggctgaagtgcagtggtgccatcatagctcactgcagccttgacctcctgggctcaaacaatccctcttttctgcctcctgagtagctgggactacaggtgcatgccaccatgcccaactaatttgttaaatttttgtagagtgtatcagatttttgatgaggtctcactgtgttgcccaggctgatctcaaatgtctgactgtaagcaatcctcttgcttggcctcccaaagtgctgggattacaggtgtgagccactgtgcgcagccgttaaatattttaaaccgtcactgactttaccatagcttactatttatataaataatcctgggttaaacttgcatagtgagataatatttcccccaacttttatttatttatttgagatggagtcttgctctgtcgcccaggctggagtgcagtggcgcaatctcggctcactgcagtctccgcctcccaggttcaagcatttctcctgcctcagcctcccaagtagctgggattacaggcacacgccactgtgcccggctagtttttatatttttggtagagacagggttttgccacgttggccaggctggtcttgaactcctggtctcaggtgatccacccgcgtcggcctcccaaggtgctgggattacaggcatgagccactgcatccggcctaatttttgtatttttagtagagacggggtttcaccatgttagtgaggctggtcttgaacttctgaccttgtgatctgcccacctcggcctcccaaagtgctgggatgacagacgtgagccaccatgcttggcctcccccagcttctagttttaaaaatgttcagctggtgcagtggctcatgcctgtcatcccagcactttgggaagctgaggtgggtggatcacttcaggccaggagttcgaggccagcctggccaacatggtgaaacctcgtctctactaaaaatacaaaaattagccaggcttggtggcttgcgcccgtaatcccaactgctcgggaggcctaggtgggagaatcgcttgaacctgggagacagaggttgcagtgagctgagatcgctccactgtactccaatgtgggtgacagggtgaaactctgtctcagaaaaaaataaaaaagaaaatgtgcaaatctacagaaagattaaaaagtaccctgtagttacagaaagatttttttaaaaaataccctgtagcccttaaacaatttctaacataatgtcctgttagctttctctctttttttcgtgaatcatatgaaaatcatttgcaaacatcatgacccttcacccctaaatacttctgtatgcatccttaggaataaaggcactcttttctatagctgtaataaaagtaacatacctgagaaaatgacaagaattctacaatattatctaataatcatgccatagtcaaaatctctagtcatcctcaaaatctcctttgtagattttttttggttttccagtccaggatccaatccagttttctgccttttagtcaattactcatcaaattattttttccagcaacttactagtaataatggtaatagccttagcttttattaataacaaccacttttcttttgaaatgttaatataaaactagatttattacctacataatcttcataatcttcaagttaggtattatcactactttacctaatgagggaggttatgctcagggtacttgtccaaggcacatagtgaggtatggttgaggtttgaactcagatatatctgatcccaaagccagctgtctttttctgtgctggactgactatactaggaaacaatcaatgtgaacttagaaatgtttgacccaaaagaaaaaaaatttcactcctattcataggctaaatgaactttactaaatatggaagattcctgtagcccggaagttgggttagttaacttttgagatctctgccaaccctgaaattctgtaacccttgtttcttacatctgcctcatacatggattaccaaagatgtatatgcatataatatttaacagttttattgagataaaattcacatactatattattcacccacttaatgtatacaattttgtagttttgtgtgtgtgtgtgtgtgtgtgtatttttgagatggagtctcactctgtcacccaggctggagtgcagtggcacgatcactgcaacctctgcctcctgggttcaagtgattctgtggcctcagcctgttgagtagctgggattacaggcgcccaccaccatgcccggctgatttttgtgtttcagtagagatggggtttcaccgtgttggtcaggctgttctcgaactcctggactcaagttatctgcccaccatggcctccccaaagtgctgagattacaggcgtgagccatcgcgcccggcagttttcgtatattgatggagttgtgcaaacaccacctcattcaattttagaacatttttatcacctgaaaaagaaacgctgtatcctttagccatacttcccccttcctccctaactcccccagctctaggcaaccagggatctactgtctatttagatttgtctgtttgggtcatctcatataaatggaattacataacatgtcttttgtgtgtggcttcaatttttttatttttttgagatggagtcttgctctgtcacccaggctggagtgcagtggcatgatctcagctcactgcaacttttgcctcctgggttcaactgattctcttgcctcagcctcccaggtagctgggattacaggctcctgccaccatgcctgactaatttttgtattttttactagagtcggggtttcactatgttggccaggctgttctcaaactcctgacctcaagtgatccacctgcctcggcctcccgaagtgctgggattaaagacatgagccaccacgcccagcctgtgtgtggcttctttcacttagaataatgtttccaaggttcatctgtgttgtagcatgtatctgtatcttatttatttttattgctgaatagtattccattgtatggataaactgcattttgtttattcattgattagttgttgatggacatttgggttgtttccactttttagctatatttacattactgcttgtgttttcatttctcttggttatatactaggagcagaattgctgggtcatatggtacttctacttttaacctttgaggacctgccagactgttttctaaagtggttttaccattttacattctcatcagcatatgtgagggttctggatttctctacatcctcaccagtatttgtctttgatcatagtcatcctagtgggtatacaggggtgtctcattgtgggggtttttttccccattggggttttgatttgcatttccctgatggagataaatatattttttgtgtgtccccccacaaactgcctggttctgatgagaccagtgttcttacagagaataactttgctttgaaacaaaacaaacaaacagccttttgacttgggtaacctttggagtatgttaattgtgatttactctggccttgtaacattgtaagtggagattttgtttaaaaactgcgttcgctgaaacaagtaataaggttcagacctattgttacaagttctgagttttctttcatataaatatgtttgttcttttgtgtggataaaacctaacgtggcaaaaaggtgtcaaacacctaagtattaaggaaactaaaatgaaaatgctgcatgaacagaaaccttgtccaattttcattactatagcaccatcacctataacagtgccagtgtacagtagatattacataatatttttgaatgaatgagtggaaaatgatatgcatttttctcttctgcatcctctgaaagatttcacaacgtgcaaagtatgtaaggctttatttatatacagataaaataatcagagtttataatctatgtatttactttcctgcatagaaactccatatgattaaaaattgagattatttattttaataacatgactaatcagtttacttaacctagaaatgaatgttatctaagaacaagcaaagaatgttagaagaatttagtgtttaggaattattattgttttccatctcagtcgtatatattttctgttttagccactttggagatttgttaatgataccaaagacaaaagaatgttagtttataaatctgaagatatcaagaatgtttcacgtttgcagtctccaaaagtgtgtggttatttaaaagtggataatgaagagttgctcccaaaagggttagtagacagagaaccacctgaaggtaagacttaaagagtgtatttcaaataagaaacaaacatactacaattgacttcagtaggggtggttgttatttgttaaaaaataacatgattgtcaagtaactatagtatttggcatgaaaataagaggtttgttccagaaattttcatcttcttttgtttataatgtaagagttgaaaactctggaaaataatgggaacaacagagattagactttaaaaaagattagggaaaagggaaatggagtgatctgagggaaaatattcctgcagatatttagaaatgataaaataatatggtggaaagacaatctttagagtttataagaaattaattggtagtaggagggacctatatatatactgcttagaatacaagaaggttatatccatcttgggacaatccatttagggtcatttaaaaaacgtaaccatcttggaattttactgcccaaaacacctctggttaggttttttgttttgttttgttttgttttgtttgcagcgcgatctcggctcactgcaacctttgacttccaggttcaggtgattctcctgcctcagactcctgagtagctggattataggcatgtgccaccaggcctggctaatttttgtatttttagtggagatggggtttcaccatgttggtcaggctgttctcaaactcctggcctcaagtgatctgcccacctcagcctcccaaagtgttgggattacaggcgtgcaccaacatgcccggccaaagacggttatgttattaaaattatatattagcattttaatatataaataaagaaattcttaatttatttcacaagaaagttgtcctattaaactaattttcaatgtgaatatcttgacatttttactgttacattggttaattcataaacttcttgttgtagaatatgactgacagcttcatagcccagcattaggtgactgttttactctgttgagcactatttatttatttatttatttagagatgaagtctcacttttgtcgccctggcttgagtgcaatggcacaatcttggctcactgcaacctccgcaccctgggttgaagtgattctcctgcctcagccttacaagtagctgggattacaggcgggtgccaccatatctggctaatttttgtatttttaatagagatggggtttcatcatgttggccaggctggtctcgaactcccgtcctcaggtgattcacccaccttggcctcgcaaagtgctgggattacaggcctgagccaacatgcccggccttactctgttgagcactttttaaagtttctgtattggaaaaattaaagaggcacttgtccttggttttgaattctacagtgttttaactttatgttacttttcacttttctgtcttcctccaaattattttttgttgttgttcagaatcctttagtgatattaagctcacataatgtttgtttcaaaaatatgttagatttaaagtgttaccataaaactccttgttttggtgaattttgatttaatagtgcatacaaattcatattagagcttgttcatcgagtgaaaagaagagctgacccagatcccatgaagaacacgtgtaaattattggtggtagcagatcatcgcttctacagatacatgggcagaggggaagagagtacaactacaaattacttagtaagtatttgatattgcatcgagtaattgaaaaaaaaatttgggtgggtacattccatgaaacttaatgcaaccagatctgttccagatactctgttatttccctaaaatatttgagggatattctctgaggtttttatgttactgtatggaaattatagtttcaaatttgtgacaacccattttacccttgaactaatattttctgcatgttagaatttatgcatatagggtttgggagaggttataatgtagtccttcctccttgatataagtgagttctttaaaaacatcactgctatcatggtagtgaacctgtggtgtcacatgtgaatgtaaaaatatgtatttgcatgaacccatgtttttcttttgcttatatgtatatttcagagaggaaggcgagttttgtttgtcatgttaaagacctaatcattggacttcacttgaaataggtgggactttcatggtcataactagttctagggcacagaagtgaaggaaagatgtaagaagtgatgatactggatttttaagtatgaactattatgatttttgaagtctggggaatcatttttcattgacattttttgctagtgtgacttcattcgtcatgattacttggcactgaccaaaatgttgttactgagggaataatggagaatgcagctattcatgaagcaagaagaagctggtgcagtaaagatgtctttctcattgccttgcttttcccatgctgtccattttattcataccctcccaacttctttcccttccctttcatgtcaagtggatttttttttttttttttcaacacagagtctcactgtgtcgcccaggctggagtgcagtggcacaatctcagctcactgcaacccccacctcctgggttcaagcaattctcctgcctcagcatcacaagtagctggaattacaggcgtgaaccacagcactcggccccatatcaagtgaatttattatgaggctagtaagagtcactgtgattcttgttcctaaataagagagatttttactttaaaaagcttctctcttaatctgggttttatattaaggggctcctcttattttacttctttgttcattgcactataaatatgaatataatgagagatctagtcttaaaaattgtatttttttacaacttcttaggcataacttgtttcacagttgctagaacaaacctcatcaacccagtttttgaacagtagaatattctctttgagaaaaagataggtaattagcattttgttctttctcatgtcattttccttggaaactatactgccttccttctccagttttcccaaatcagagaacaaaagaaggagggttgctgaaatgaaccttgttctttctggctgtcttcttacccattcctcagtgctgaactttttggggtgagagtgggggaatagggttggcagttgtctgccacggccccttacttgtttctggggaagacattcgaggtactcaccaagagatagagtgaagatggaattctttttagaagggaatacagttgacccaggaacagtgcgggggtgtggttagaagcactgaccttcttccctctgcagtcgaaaatcctcacgtgactttttttttttaaggctctgtcgcccaggccggagtgcagtggtgaaatcatagcttgctgcagcctctattgcccgggccaaagcaatcttcccacctcagcctcctctagctgggacaacaggtgttcacccttcctggctaagttttttgatttttagtagagatggagaatttcccaggatggtctcaaacttctaagcttaagcaatcctcctgcctcagcctcccaaggtgctgggattacaggcatgagccactatgcccggccactgtataactttgattctccaaaaatttaactactaatagtctactgttgaccagaagccttaccaataaaataagttgattaacacatttttaaaatatgtattattactgtgttcttacaatcaagtaagctagagaaaggaaaatgttatgatgaaaatcataaaaaaaaaaaaaagcccggcatggtggtgtgtgcctgtagtcttctgttactcaggaggctgaggtgagaggattgcttgagtccagaaattcaggctgtagtgagctatgatcgtgccgctgtactgcacccctggtgacagagcaagaccttgtctcttgaaaaaaaaaaaagaaaatcataaggaagagaaaaatacatttactattcactaagtggaagtggatcatcataatggtcttcatgttgagtaggctgaggaggaagaggaagagttgatcatattgtctctggtgacagaggctcaaggaaatccatatgtaagtggacacttgaagttcaaatctgttgttcaagggtcaactgtatttcaggtatactgattgacttttaaatttaatttttattattggctgaaacggtagttttaaaaaagcctgttacttgtcattttggttccatgtgcaattgagtacctgaaatttaggttaaactataccattgttttattctggtaacagcactttaagtttggggccaaaggttgggaatactctgatacagtaacatctcaatgctagtttttgcgaaagtagaaacttttgcaatggcctctaaactgagattttttctttccccatagattttatattgcattgccaggagaggtaaagagttacataatgtcttttttcttttttaaatacacacagatagagctaattgacagagttgatgacatctatcggaacacttcatgggataatgcaggttttaaaggctatggaatacagatagagcaggtatttatcaatagatatggcttatattacttaagttttgtaatgtaaatatttgtcacttgtattcaaaacctaaaaacttgtccttaacaataattgtaaataagttttctcagatgccaatgattttttatgatgaattgtgcagtatttttgatgttaattagttctagattgtgaagttttctgtccttagtctcgctttaggtagaaagccttttatgctgctgtgctttgttccttctttgaattcatggcctttatattctctgtagttttcttcccccctccgattatgcttaagtctttagttaaaactctggcatgcaccattgaatccttagtcagaaaatttactaaaaaatactgtgtacctttgcaaggctgtatttatatatacagaacctttaggttctttcctctcagatatctccttctgatttcttgtaatctgttaacagagtgtgtctagtaatgttatattaatgtcatcttaataatagctcatattaaaagttatttcaaattgctaggactaattaaaaaggcttctgacaaagggtattgctttgggcagagagacattttgatatgtaaattatataaattgttatctctatttttttccaagctttttgtagtaaaccatatttttataagttatatagtatagaatttagaggttgaaaaaatttttaaaaatcattcaccatgtttataaatgttaaactttgatattacttgtataaaactaagagaattatttttcccttttcattctctttcactgttacgcattttctttttaagttattatttgaataggtaacatgtacacagtacaaaagccagtgaaaagtaagtctctgcagcctgtttattgtcaaaccagttcctttccccaaagacattcatgtcactagtttcatatgtatctttctagagatgtcgtatgcaggtatagtgtatgtatatgtctgtatttgacacaacggtgctatgcagtacacttttacaccttgctttttcatttcacagtatgttggagagtacttcatgttcatgcatgtaaagctgcttcacttgttttattataaatagctgcatcatgtttgagtttcagggaacctgtaaattttctttttgctttaggcatttggaaccagtcgaagaaacaggaataatataggagattaaaacattaacttctttacatctgatgaaggatggattggagggtgtggtttagatgtgtatcatggtgggcttctaagtagttctatcccagatttgaccttgaccagccaccatcaaaactgcagagtccaccccagtaaacttaccacacagtggcagaggagaccagaatgggccttctctgcaggcaggcaggcaggcaggcaggcagagagactcacagaaactctgagctgagcatggtttccttctttatctcacacttactaatgggagcctttgttacttttttttttcttctttgcaggtttaatatgaatttgtctgaaatgcctgtataaggagaagactctattcttagccttttattcctttgatgcacaaagagatgtatattttattattctttcctgagttgtcgactgtagtcgtaataaatattttaggctcctgtaacccaagttcttattttttcaaaataaacatggaggatatgaaaatttaagagtacatttataatattataaataattcattgacatatgttttccataccatatgcttctctgtttgtttcaaacattgaatattggtactgaagaatttatgaattttggttttaaaatgttttttttctagaacgattctttttttgaacagataaaataatgcagtattcagagccttctgacttattttggaagtgttctaagtatatgatctctttaagtatagattcgcattctcaagtctccacaagaggtaaaacctggtgaaaagcactacaacatggcaaaaagttacccaaatgaagaaaaggatgcttgggatgtgaagatgttgctagaggtaggtcttagaatcctggatatggtgctaacaccactttgtcatttctgatatgtggattgtatgtgttttaatgaaggagcatgttagaaaagatggacacccagaagcagtctcctccagctgatccagcagtaaccccatcccatgtagcagcatagacaacaaataacaaaaactctatgaaaaagaaaaacgctataaagcaatgcttccttttttttttttttttttttttgagacagagtttcactcttgttgccctggctggagggcaatggcgtgatcttggctcaccgcaacctccatctcccaggttcaagagattctcctgcctcagcctcccaagtagctaggattataggcatgcaccaccacggccggctaatttttgtatttttagtagagacagggtttctccatgttggtcaggctggtcttgaactcccgacctcagatgatccgtctgcctcggcctcccaaagtgctgggattacaagtgtgagccaccatgcccggccaaagcagtgcgtcttaaccttaatatctttgaggatctaatgagacaatcagtggatcttctctagaaaataacatggatacccaatatatagagtttttgcacactgtttcattagttctgcacacttagttcagctctctctgaagcttatcaatttatcttttagggcagtaattatcaaacaggttatgaacatgtattggagagtagaaatatagcttggagatctgaaagttctctacaggaatttaaaatttttgtgtttttattctggcgattaatctaaagatggctaacttaatcattttatgtcatttggagtcttgccgtataacagggtgctgccatgtgattccagtgtcttgagtttgtgtgtgctattactttggtgtagaatgactttatatgaagcgatagtttttatcttttaatgtgttggcaagtttattagtttcttgttgttgctttaattatcacaagtggagcagcttagaacaacacttatttatcccatagtttgcatgggctagtccaggtatggtgtggctcatctggattcttgtttagggtctcatgaggctgaaatcaagttttcaaagcttcaatagaattaaaggatattataactattcatccagatggagaagcataatgtgcagcacctgtgtggtactcattcataccttgtctaatttgatctgctgagcaccctgagaggttggttgagacagcatccttgtgaggaggctcagcaagtgttactgtttattccagctgacatgacaaagcagcataggctgggggacttaaacaacagaagtttgggttttcacagttctggaagctggaagtccaaaatcaaggggtcagcagggttgatttcttctgaggccaaggtacttgtggtgtagatgctgtcttctccctgtgttctcacatggtccttccctcagtgtgtgtgtatattctgatctccttatcaggacaccagccatattggattaaggcccacccatatgacctcagtgtaccttaattacctccttaagggccctgtttccagatagagtcacattctggggtactgttgagggttaggacttcaacatttgaattgtggggtggcacaattcagccagtagcaggaagattaaatgacttgtctgattagtcatacaactggtgatggcagaggttgaattgagcacagatctcctgactcctagaacagctgaaccactgcgcctgtctgcttttctgtgagcctccagacagcccatggcaggggaggaaccaaagagaaaaatgacttatgttgacagatggtcctctccagttttcttccctaagcctcctagaatattcttagaagcctcatccttttaccacggaactatcagaatccccatgtaaccacacttcattcctcatatagggctctctggcctctcatttaaagcattttaaacattgagggttttggctaggcatggtggttcatgcctgtaatcccagcactttgggaggctgaggatgaggcagtggattgtttgagcccaggagttcaaggctagcttgggcaacatgttgtacaaaaaatacaaaaattagccgggcatggtgaggcacgcctttggtaccagcttcttgggaggctgaggtgggaggttcacttgagcctgggaggtcgaggctgcagtgagctgtgattgcgtcactgcattccagcctaggtgacacagcgagaccctgtctcaagcaaaataaatcaaaccccccccccaaattaaggtttttttaaacttggagacgctggacggttatggtagaggtttttaaagtaatgtatgaagcccttttaaattaagaaaaaaaaaatcctctcaaacctgcagtgttgatttaaatggatgtaaaatctttattttagtaacataaaactgggtatgtatgcttttctataagtgtatatttatataaatgacaatatattatgaagctcaaaaaagtttaagattaaaatttctataaaaccaattgaatccttgaaatacttgagagggatctgttttggcctggagtgctgcaatccccttatcgaattggagcatctctagtcctgggctgtatgtcttcagaacagccctcggaggagcagtgagttagttctgaagagctggagcaagctcccgaactattcccttttgtgtcccttgtcagatgacagtgtgtgcctctcacctgtgcaggtggagaagcactttagggaaagagcaaagcactgcacgaggttgtgattgctggtgctgagctgcatgccatcatagttctgttctggaatgtttagttgatttagattacatcttttagtctgatgtaattgttaatctaagaatgcttttttttttttttttttttttggtctttcaaagcaatttagctttgatatagctgaggaagcatctaaagtttgcttggcacaccttttcacataccaagattttgatatgggaactcttggattagcttatgttggctctcccagagcaaacagccatggaggtgtttgtccaaagggtaagtttttccatttcttgtgtgaatatgctgctgggattattaagatgattggattatattataattctgtatttaataagcaatttatctctgtttccttttgactttagcttattatagcccagttgggaagaaaaatatctatttgaatagtggtttgacgagcacaaagaattatggtaaaaccatccttacaaaggtatgttcttttatttctaaaagaatagtgttagagtttattgtagtagaacctcagttatatatttatgtaggtatttttttaaaaaatgtaatatatactgttttttaaatttctgcctaaataaaatttatgtatttttgtgggatatatgaaaattaaagcataaagaagaaaataaaaatggcctgtcagccttcttttgaaacatgtgaggaccactgcttttctcgaaccctctgtcctggacccctctgacctgcagcaactcttagagctccctgtctcctagtcctgcagtgcagctgtcattcaaggcatcccacaccctcttattttcagaaccccatggtctccctctttctcagtgccatcattttggtgtagtgtatcttgcaggagcttcctaagaaaacgtagatgacctgcatattgttgggatttcatatatctgaaaatgtctttattccactcttaagcctgattgataattttggctgagtatattcttagttctcatgttctctatggtcttctgtgcatgttgcttctaaagaatctgaagtcattttgagttcttatctttgtttgtcacctgtttttttctctggaatatcttaagatcttgtttttctccagctatgtctgttaaaatgtgtttgactacaaataacagaaaattaaataagcagtggtttaaataaggggtttatttgtctcagtcaacaagaagttcagggatagcattttctgggtggtacagcaactcagaggtaccctcagtggctcaagaacaagcaggaagtctttgtcctcatggatgtcacctcatggttttaagatggttctcttctgtgttggagaaaggaggagaaagagaacatggctagcctagtctggcccttctaaaaagcttctctggaggccccatcctggcttttgtttatatgttactggacagcactgggtcccgtggctgcccttagcctcaacggaatgtggaaagctggctattttagctgagtatattgctgtcctgggcaaaattagggctcattaagtaaggaagaaggggagagagatgttggtaggacatattagtatctgatatactgatttttaatttttatttaatttttattttttttgagacagagtcttgctctgtggcccagtctggagggcagtggcaccatcttggctcactgtaacctctgccttctgggttcaagcagttctcctgcttcaacctcctgagtagttgggattacaagcacctgtcaccacgcctggctaatttttgtatttttgttttagagacagggtttcaccatgttggccaggctggtctcatgaacccctgacctcaagtgatccactcaccttggcttcctaaagggctggttggtatactgattttttgactatgatgttatacttggtgtagggtatgggaaaacatttgcaaaagacacatctgagaaaagactgctatctgaaatatacaaagaggccgggcatggtggctcattcctataatcttcggcactttgggaggccgaggcaggagaatcacttgagcccaggagtttgaaactaacctgggcaagatggtcagaccctgtctctacaaaattaaaaataaataaataaataaaaatttccatatgtataaagaactgttaaaattcaacaataagaaaatgaacaacctaatttaaaaacagacaaaagagcagaacagatacctccaaagatatacagatagcagagaagcatatgaaaagatgctcagcgtcatatgtcattaggaaattgcaaattaacaatgaagctggttgtaggggtacatgcctgtagtcccagttgcttgggaggctgaggtgggaggattgctcgagcccaggagtttgagacccatcctgggcaacattagtgagatcctatttctataaaaaactttaagaaacccaacaacaatgtgctattactagtagcttattagaatggctaaaatcccaaacactggcaacacaattccaacaaggctatggagcaacaggaactctcattaattgctagtgggaatgcaaaaatggaacagccactttggaaggcagttggcagtttcttttctttttcttttttcttttttttttttttttggagacggagtttcactcttgtcacccaggctggagtgcaatggcgccatctcggctcactgcaacctctgcctcccaggtttaagcaattctgcctcagtctcctgagtagctgggattacaggtgcccgctgccactcccagctaatttttgtatttttagtagagatggggtttcaccatgttgtccaggctggtctcgaactcctgacctcaggtgatccgcctgcttcagcctcccaaagtgctgggattacgggtgtgagccactacgcccagccataagaatgtttatggcagcttaattcataattgataaaacttggaagcaaccaagatatcctttagttggtaaatggataaactggcacatccataaaatgagaaaaaaataaaaagctattaagccatgaaaagacatagaggaaccttaaaagcatactactaagtaaaataagccagtctgaaaggctacatactatatgattccaaatatatgacattctagaaaagacaaaaccatgcagactataaaatgatcagtgattgctagatgctgggggagggagggatgaataggtggagagcagggtaattactctgtatgatacttcaacagtcagtataagacattatgcatttgttgaaacacatagaatatacagcacaaagagtggaccctaacataaactgtggactttgggtgatttaaaaacaggtggtggcaggagcctatagtcccagctacgcgggaggatcacttgaggccaagagttagaggctgtagtgtgataaatgcaactgtgaatacccgctacattccagcctgagcaacttagcgagatcctccttttcttttttgagatggagtctcgctgtgtctcccatgctggagtgcaatggcatgatcttggctcactgcaagctctgtctcctgggttcatgccattctcttgcctcagcctcccaagtagctgggactacaggcacccccaccaccacgcccggctaattttttgtatttttagtagagacggggtttcactgtgttagccaggatggtctcaatctcctgaccttgtgatctgcccgccttggcctcccaaagtgttggaattacaggcgtgagccaccgtgcctggcctgagaccctgtctctttttatttatatatatatatatatatatatatatatatatatatatatatatatatatttatattttaaatttaagttctaggatacatgtgcacaacgtgcaggtttgttacatatgtatacatgtgccatgttggtgtgctgcacccattaactcgtcatttacattaggtatatctcctaatgctatcccttcccccttccccctccccccaccccacgacaggcaccggtgtgtgatgttccccttcctgtgtccaagtgttctcattgttcaattcccacctttgagtgagaacatgcggtgtttggcttttgtccttgcgatagtttgctgagaatgatggtttccagcttcatccatgtccctacgaaggacatgaactcatccttttttatggctgcatagtattccatggtgtatatgtgccacattttcttaatccagtctatcattgttggacaatgttgaacaataatgtagagtggtatgagaaaagaaaaagacactaattagcttttgggaatcttttaatttctttttttcttttcttttttttttttttgagatggagttttctcttgttgcccaggctggagtgcaatggtgtgatcttggctcactgcaacctccgcctcccggattcaagcaattctcctgcctctttctcctgagcagctgggattacaggcatgcgccatcacgaccagctaattttgtatttttagtagagatggggtttcttcatgttggtcaggctggctctcaggtgatccgtctgcctcggcctcccaaactgctggattacaggcgtgagccaccgtgcttggccttaatttctaaatttatttttttcttatggtactttgttttaggggaaaaaatctctcaaactgtgttttccctctattctcacatcacaaccatcatcatcaacacagaagacttgtgtgaccagaccaaacgtgtggggatttccccctacatatcaagcagtagacatcagctaggtgtcctccaattcaattcaaacactctccacccggaaatagtatcagatctcacagtttgagggcccagtcccacaagactgactgttccctcctccccaccagttacaagtctgagcctccagaacttctgaccaactggcttcaagttggggtttccacattctcctctttgggtctgattaatttgcttaagtggctcacagaactcagggaaaagcttaacttagtttatgggtttattacataggatattttaaaggatacaaagaagctgggtgcggtggctcacgcctgtaatcccagcactttgggaggccgaggtgggtagatacctgaggtcaggagtttgagaccagcctgaccaacatggtgaaacctcgtctctactaaaaatacaaaaattagccaggtgtggtggtgcatgcctataatctcagccactcgggaggctgaggcaggagaagtgcttgaacctgggaggcagagattgcagtgagctgagattgcgccactgtactggtcaacagagggagtctttgtctcaaaaaataaaaaaaaaagaaaggatacaaagaaatagccaaatgaagggatacatagggcgaggtctggaagggtcccgagtacaggagcttctgtccccatggagttgggatgtacctccctcctggcacacgaatgagttttgcaccttcctgtcaacctccatgtattcaaaatgctctctggaagctctctgaatcctgttttttgagattttatggaggcttcattacataagcacgaatgacaactgtgtagaaatgtgattggacaaaatgggtatgttctcatactaaccgactgagtggggaagcccaccaaggcctgtccagattctccttgacctctctgtgcagcattcctccctccacagtaaagggcaggaccctctctagaatgagaatgagaatgaggatctctggacccacaatcagattagagtcttgccttggatcaggtaaaaggaggacaggagaaggtcagagagagagattctgtttcctgaggattgctcctgagccctaaagcaccccaacattataacagaagaccgtaaccagggctacggagggttgtaagccaggagccatggacagaaacatacatgtgtgtacagtagctcacgcttttacttttttggagtcacaacttcttaatggcttgatttcatgacatattttctttggtcttccagaactttcctcttaaaaaaacacagcaaaaaaacaaaatttgatttgaaatttttgagatttttttttaagagtcattagcaaatccactaatgaattttccccaagcagttaggagatatttctcttcattacacctttgggatttgagtgcttttgctaaaaatttaagttttttttcccactacggttttaatatgaacatgtggaaagacttcttgtatagaaaaatgacttgcaaaatattattttttcaggttctatggagtgatttcccccccttaggaaaaaagaactcaggaattttaagtttatatgtatatatatttattttattttattttatttatttattttaagacagactctcactcttttgcccaggctgggggttcagtggcctatctcggctcacagcaacctccgcctcctgggttcaagcaattcttctggctcagcctcccaaatagctgcgattacaggcgcccaccacaatgcctggctaggttttatatttttagtagagacagggtttcaccatgttggccagtctggtctggaactcctgacctcaagtgatccagctgccttggcctcccaaagtgctggaattccaggcgtgagccactgtgcctggcctttaagtttgatattttattcagataaatatggaaaaaaaattttagctttattggcaaaatttattattcatatagaaatcatctgataatctgatagattaagtacagccctgcaactggattctaataaaccaagtcctctaggtcattaagattgttattggacatgaattcagtcattgagaaaataaaacattgttttgttgttcctcagttgtggtttttgttttttttttaagatagagtttcactcttgttgcctaggctggagtgcaatggcatgatctcagctcactgcaacctccgcctcctgggttcaagtgattttcctgtctcagcctcccgagtagccgggattacaggcgtgcgccaccacacccagctaattttttgtatttttagtagagatggggttttactatgttggccaggctggtctcgaactcctgacctcaggcgatcaacccaccttggcctcccaaagtgctgggattacaggtgtgagccactgcgcctatccgtactgttttttttaccccttgctttttttttcctttctgctgagatgctttaggttttaacagacatgtgattgggccgaggggcatgtgaggaggctggacaattaactacagttagcttattgcatttatcagcaccagattgtgtgtggttgaaatggccaaggtttgatgttttgttatgaatgttccagtatatcttataaattacattttcttaaattgatttgttactacttacaataatgtttgatagtattaaataaaatcctacttattctgttaaattcatataattggtagaagaatcatagtccggttattactcttttttgagacaaagtcttactctgtcacccaggctggagtgcagtggtgtgatcatagatcactgtagcctcagcctcctgggttcaggtgatactctcacctcagcctcccaagtagctgggaccacaggtgtgcaccaccatgcctggctaatttttttttttttttttttgagacgaagtctcgccctgtctcccaggctggagtgcaatggcgtgatctcagctcactgcaacctccgccccctgggttcaagcagttctcctgcctcagcctcccgagtagttgagattacaggcgcgtgcctccatgcccagctaatttttgtatttttagtagagacagggtttcaccatgttggccaggctggtctcgaactcctgacctcgtgatccacctgcctcagcctcccaaagtgctgggattacaggcgtgagccaccatgcctagcccacctggttaatattttttattatttttgtagagatagggtctccctgtgttacccaggctggcctcaaactcctagagtaaagtaatcctcccatctcagcctcctaaagtgctggtattataagcatgcagttcttattctcttgttgatctgattataaggctctatttaagacagcataggcccaactggcagaagtaggtgatggctggatattgagaaataatgttttctttgcatgatccttaaggaagctgacctggttacaactcatgaattgggacataattttggagcagaacatgatccggatggtctagcagaatgtgccccgaatgaggaccagggagggaaatatgtcatgtatcccatagctgtgagtggcgatcacgagaacaataaggtatgtgtgtgtcgagaattttttatgtggtttggaaagaggctgtgtataatgatcataatgagagctcagaaacgtattccattcctaggcgtttccctagggatggatgtgcaaattacaaagtaccttgaaacgtggttgtgtgttttggggtgaagcacggttcatctaaatctggttaaaactatcatttggactttgttgtcaagcttaatggtgtagatttgagctctaggaaaaattactaataataatggctttttttggagttctggatttcagggtctggtgggctcaggctttatgttaaaaatttgtcatttcatttacaagttgtcattcattttaactctacaatttacatgtacagtttacacgtttttattaacttttgcagttaaacacatagtttgcctgactacaagcctcatgggagaaaggcccttccttgtctgtcttattcatagctctatcttattcatagctctatctccagtgcctagtaggagtatctggcatgtaacaaatatttgttgaataattaatggaatcatttactattgggggtttctgatagagaatactagttgatttgtgatactgtaaaacactttcagagactttaagagtgccgtgactaactcttagagtctgaactaaaagttgtgttaataaatatctggttctttcattttatttgaagttaaacagcataaagcagtgtgaggaaaacaatagttgcactgctgagttaaagagggtcggtggggagagcttaaaggagtctgattctaatcacaaaagattgtgaagtatttgtcctgactcctattttgagcttggctgtgggctaatgtgcaagccttccctggacacagagggcaagattacttctgcttttccctggctctgacaccctgctttctgaaatttctgcctcctgttctttttgtgatctttgattgttgcatctcatttttttttggctttttatgtatattttctgcatctcattttctttggctgttatgtgtaaacagttcctctgttactttgcatgttatgttttatttttcctctgcttgacaacttgtgccagagaaacatttttctacccctttttgtctactcttccaacctgtcaaactgttgaattttccttctcttttcatagtctctgcatttctaatcatgttcactatagttcagtgctgcccaatagaactttctgctgcggggcgggggatgttttgtgtctgctctgcccagtatagtagccactagcccagtggagcaattgaaatgtggctagaaactgaggaactgaattgtaaattctattttatttaaatttttaataatgtttgcctgtgatgggagacgggaatgggcattaactgtaaaaggacatgagtgagattactggaaggatggaaatgtcctaaaattgacttatagcaatggtttcaacacttggtaaagttattagaaatcactgagttatatacttgaaatggatcaattttgtgatatgtgaaatatgtcttaataaagttgttaataagccaacaaacaaaaacagcagtgtgggagcagaggaaaagtagcgcggatgtagaggagctgtgaagtcataagttgattattgttgaagctggtgaggggcacgggggcattcatgataccatcctgtctacttcatagatgcttgaatatttctgtaatagaaactgtaaaatatgtgactaggaacaaaatttaagtagccacatatggttggtggctaccatattgcatactgtttctctaagtaataggtcatatgcttcttggttatgaggatagtgtcagaacttgggagcaaaatgttttactttgcagactgcctgggtggacatgcatgctgctgactcttcctgctgccagttctggggctcttcaaaacagccctgtaagaacttgccagtgaggcatggtggctcacacctgtaatcccagcactttgagaggccgaggtgggcagatcacttgagcctaggagttcaggatcagcctggacaacatgtgaaactccatctctacagaaaatacaaaaattagctgggcatagaagcacatgcttgtagtcccagctactcaggaggctaaggtaggaggaacccggggagttcaaggcggcagtgagccaaggttgtgctactacactccagcctggatgacagagtgagactttatctcaaaaaaaggaaaaagaaaaaaaagaacttgctaatgagaatggggcctgggaagaactttttttttctggagctgccagtctgtatcaatgaagaacaatttatttattttgtcctgagcacatcatatttagtctgtgtttttctagtttggttgcccaagtaggagtccccttgtaagaagataatgtgcatcttctatgttttatttatttattattatttattatgattttttgagtggagtctcactctgtcgcccaggctggagtgcagtggtgtgatctctgctcactgcaacctccacctcccaggttcaagcgattctcctgccttagcctcctgagtagctggggttacaggtgcatgccaccacacctggccaatttttgtagttttagtaggatggggtttcaccatgttggccaggttggtcaactgactggtcaacaaactcctgacctcaggtgatccacctgcctcgacctctcaaagtgctgggattacaggcatgagctgctgtgcccagcctatgttttaaatgaattccttaataaaaatatttttaactgatgaaaagggcttacaggacaaaaataaagtagttccttgacctagaaagacagaacccatcaccctctactaggcaagcctatgaagagcagtttgccacaggtggacttctctgtggacagatgacattagtgaaaaggaatgtaggacctttgagattgtaacttcttaggaaggtttgctgaacggaagaggaagtcttatgacaaggatgcaaacagaagctgccagatcttcagggatgtgtaggcagaaagccagagttgcgggttggtccttttatcgttagtgctctccagctgcttgggagttgtaactctgacaaatcagtgaagaggtcttcttatctgttcactgtgaattttaactccattttaacctgataaaatggaacccagagatacatgatgttgatgaataaacccaccaaaatgacaactgcctgaggccccgattagaataaccagaccccttagacatctgtactgtaacgacagatttgggccgggcgcggtggctcacgcctgtaatcccagcactttggagaccgaggtgggcagatcatgaggtcaagagatcgagaccatcctggtcaacatggtgaaaccctgtttctacaaaaaatacaaaaattagctgggcgtggtggcatgcacctgtagtcctagctactcaggaggctgaggcagaagaatcacttgaacccgggaggcggaggttacaataagccaagattgtgcctctgtagtccagcctggtgacagagcaagactccatctaaaaaaaaaaaaaaaaaaaaaaaaaaacagatttgaagatgttttttaaaaagccagttagtatttctgtgtaagatgaggtctttgctatctttctgaaagtagctcctttggtgtctgatttggtggttacaggcacctttggagggtctcatacacttggctctcaggggcttcatgattgttgtctggggtgaaagtgaagccattttggcatctgcagagcactttggagaccccgacctaagaagtaactatgctcagttttccctaagcctcttctttttttgataacttcaggaggtctggaaaatgaccgcagttttagagctcctgataaaaccctcagccttaaaagggagttatcctagtggttctgtactccagggtgggaaggtagtgtagagactttttgagacactggtcttgctggttgatgaaaatgtttaggtaacaattggggatttaatttatataaaatgtactattatgcctattactaagctcaaatatttaaacaactttaaacttggatcatccatataagtagccaaagaaggagaagaaaccccttctcctgcatttctgaattgttttgtctgggacaacattaacctacagaggttcttaattcttgtcactgcatgagtggcatgcctgaggtgaggagatttcaagtctgatggagctacgagctctctgttgtgctattctgcttgtccttaagtgggctttgactgggatgtttggtctcagtatttgtatagcttgcttaccttcgtaagaagaattatagatccttaaccaagttcacatcagccatttagcattctatggagggaggttcccagttccatatcagtggcctttggaggagactgtggtggccttgccataactccagggtggctctgatggtggttttacattaagagtttgtctctagagaagacacaaacattgcatgggaatacatttttatgatattattttgggtccttattgccttttttctctcaagatgttttcaaactgcagtaaacaatcaatctataagaccattgaaagtaaggcccaggagtgttttcaagaacgcagcaataaagtttgtgggaactcgagggtggatgaaggagaagagtgtgatcctggcatcatgtatctgaacaacgacacctgctgcaacagcgactgcacgttgaaggaaggtgtccagtgcaggtgaggagtctctccacagggattttgggaagttggtataacaagatgtccaaaataagagaagactgaacttgcaggggctttagaatcaactgaaaggggtgtgagtgtgtttgtttacatctacctcttttgcccttcacagcaagaaattgctttctgggcctggcacggtggctcactcctgtcatcccagcactctgggaggctgaggtgggagaaatgcttgagaacagcctgggcaacatagtgagacactatctcttaaaaaacaaaaaacaaataagaaaagaagaagctttctggaaagcagtgtgacattatgtaacaaaatccttgaccttgcatgctccttggtttagcagtcctatagttaaaagaatcttttttttttttttttttcctgagacagagtcttgctctgtcgccaggctggagtgcagtggcgcgatcttggcttactgcaatctttgtctcccgggttcaagtgattcccctgccttagcctcctgagtagtgggactacaggcacgcaccaccatgcccggctaattttttgtattagtagagacgaggtttcactacggtggccaggatggtctccaactcctgaccttgtgatccatccaccttggcctcccaaagtgctgggattacaggtgtgaggcaccgtgcctggcaaaataatcttttttatttaatttaatttatttatttattttgagacggcgtctcgctctgttgccaggctggagtgcagtggcgcgatctcagcgcactgcaatctccgcctcccaggttcaagcgattcccctgcctcagcctccccaataactgggactacaggtacgcaccatcacgcctggctgattttttgtattttagtagagacggagttttagcatgttggccaggatggtctcgatctcctgacttcatgatctgcccaccttggcctcccaaagtgctgggattacagaggggagccaccgtgcctggcctttattttctttttgagacagggtctcagtctgttgcccaagatggagtgcagtggcatgatcatggctcactgcagcctcaacctcccaggctcaatcagtccttccacctcagcctcccggatagacaggactacaggtgtgtgccacctggctaattttttttgtattttttatagagatggggttttgccatgttgcccaagcttgttgtaaagtcctgggctcaagtgatccacccttctaagcctcctaaagtgtggagattctaggtatgaggcaccatgcctggcccaaataatcttttatttctttttttttttttttgagacggagtcttgctctgtcgcccaggctggagtgcagtggcgtgatcttggctcactgcaacctccgcctcctgggttcaagccattcccctgcctcagcctccccagtagctgggattacagtgtgcaccaccacgcccagctaatttttgtgtttttagtagagatggggtttcaccatgttggccaggctggtctcgaactcctgacttcgtgatctgcctgcctcagcctcccaaagtgttgggattacaggcgtgagccactgctcctggctgcccaaagaatcttttgggcaacagagataagatttaacaagggtataagatttaacaaggtttttttatggctacatcctaatagcaaaattttggaaacaatcaaaatgacagtcttgggatatgaatgttatcatgattctatatactggaatagtgtggaggaagtaggttacaagttagaaagttacccaggttttcattttttatatacactgatagaccagtgcctggcttagaagtaaaagggttaaacttcagttttctggtgaataattgagatttaactggatacagtgcatattaacgctgtaaatactgatggggagtagagttctggctgccgagtgtcttagctatggattgccttgtggccccaccttgtcttttttttttttccttgtctttttttttttttttgagagagtctcgccctgttgaccaggctggagtgcagtggcgcgatcttggctcaccgcaacctctgccttccaggttcaagctattctcctgccttagcctcccgagtagctgggattacaggcatgtagcaccatgcccggctaattttttgtatctttagtagagacggagtttcaccatgttggccaggctggtctcaaacccctaacctcgtggtccacctgcctcatcttttttttttttttttttttttttgagacagaatttctctcttgttgcctaggctggagtgcagtggtgcgatctcggctcactgcaacctctgtctccggggtccaggcgattctcctgcctcagccttctaagtagctgggattacaggagcgcaccaccacgcccagctaatttttgtatttttagtagagatggggtttcaccatgttggccaggctcatctcgaactctcctgacctcaggtgatccacccacctcggcctcccaaagtgttgggttgggattataggtgtgagccacctcgcccagcccatcttgtcttttttaaattaatgcgttaaatgaatgaaaaccaagggcaccaagatgtttcacaggtgattgctgtgttcccattcttttctcctatagtgtggcatttatgtgacctcacgcacattaggaagggacaaagtgtgtgcaggtagctctagcagcggagatgtctgatgatgtaggagtgggtgacggagccaggaggtcttccccggtgatcttcaggtcactgtaacgtaactgtagcgtttgatttgatatggggccataatttgaattgctctgttcctgtctgctgttcttctccagtgacaggaacagtccttgctgtaaaaactgtcagtttgagactgcccagaagaagtgccaggaggcgattaatgctacttgcaaaggcgtgtcctactgcacaggttcgtgttcttgttgcttccttggaatgctgtgggtcaagtgtgtgtgtgtctttgaaaaacaagattatgttttgttcagatgagagacaccttatttttaatctcatatgccgggttgagtttctggcactccttagtttgtgacacttggctttggtgggtttaagacctgtttctatttctctttcatttccatcactctcctctttctcctcacagacatccactctactgtggttaatatttgcctggatatgtgtatatccttgaaagatcatatagtgttattttgtgcatgtatgtgtttttaatgtgccaaaatgatattctaccttaaatttacttttaaaaaattcagtatcatgttttaaagaattacccatattgtgctacagataatataacaaggtttttaatggctacatcctaatagcaaaattttggaaacaatcaaaatgacaatcttgggataatgaatgttatcatgaatctatgcactggaatagtgtggaggaagcaggatacaagttagaagggtaaccagtttttctatatgtatctatatgtatttcactgttggggacacctacatattgtttagttatatgattggctgtgttttacttacaagtcaccaagtggtagctacttccattgccttcatccccttgatattccagataggacacagatcacatcctcctacgtcccttcaggaacctgtgtgtttctctgggtactgaggagtgtcattgtgtagtcacagaggcaggatgtgctggtctctagagcaccactgctaggttgcctgtgtctgaggactccttatcctgacgttctggccaacgcttggaattaccctgctgtcctattagcatgatgagtataaagtaatctcttgttcttacttttttttttaacagcccttgtcctaatgcacttacttacatttttcttgagcatctctttatatttttcagctattcagatttctcctgtgaatagccagttcatatatttggttcattttttaaaaattgggtttcatgttatttcactactgtgaatttggaggagttcttatgtaatcatccatttgggcatacgtctcctatctgttgccattctcagaacagaaatctttaacgtaatcaaatccatcattttgttgtgtgtgtgtattttttaaacacatggttcagaaaagccatggcggatggttaaaaagatattttccacagctgcttctattagcttcataagttgtccttttacattcaggacttgaatctttctggagctaacctttccaggtgtccagtatcttttgttcggtcaattgttgctttaaaaatttcaaagctatgttattactaggtatataaacggacatatctctacatctttatctgctgttccttaccagtatataatgttccttttttacccttgcgatgttttttgacttaaattgtcaaaaagcaatattcagtttgctattctagtttttttgttcctctgatatatctatctgtcccattcttatatttttcaaaatttgtctctcttggttggttggtttgattttgtaatagctttattgatacataattcacactcatgtagtttgcccatttaaagtgtacagtttaatgatttttagtatattcagatttatgcagtcatcacaattaattttagaacatttacattactccagaaagaaaccctgtatcctttagctatgatcctccaatccccccattccccacaactcagagcaaccactaaccaccctattctttatggagttgtctgttttgaacatttcatataaatggaattatacaatatggtttcgtgaccacatattgtatgactggcttctttcactgaacatagcatttttaaggttcatgtatgttgtagcatgtatcagtacttcatgtacttttattgctgggtaaattccattgcatggatatgccacattttgtttattcattcattggttgatagacatttgggttgcttccacttttttgctataacaaataatgctgctgtgaacatttatctatgagtttttgtgtggacagttcctttggatattattcaggaatagaatttctgggtcatgtggtaactatgcttaatcttttgaggagctgtcagactgttttccaaaatggctacaccattttacagtctcagcagcattgtatgagggtcccagcttctccatatcctcaccaacacttgttatcttttttattgtaactatcctaggttttgtgataaggatgcaaacagaaagctggaggtcttcagggacctagtgaatgaagttgtgtcctattttggcttgattttggttttccgtgtgcatagtatgacatgttgcccatgtttttatcttttgggatctgtcactatcacattactttgccaaatgttaggaacctgatggcccggcacagtggctcacacctgtaatcctagcactttgggaggccgaggtgggcagatcacgagatcaggagatcgagaccatcctggctaacacggtgaaaccctgtgtctactaaaagatacaaaaaattagctgggcgtggtggcgggcgcctgtagtcccagctacttgggaggctgaggcaggagaatggcgtgaacccggg

SEQ ID NO: 15384 - DNA, 37063 bp, Homo sapiens
acactgcctaatcgtcccgcccagtagtgagcaggcctgtcccattccatactgaccagattcccagtcaccaaggccccctctcactccgctccactcctcgggctggctctcctgaggatgcaccagcgtcacccccgggcaagatgccctcccctctgtgtggccggaatccttgcctgtggctttctcctgggctgctggggaccctcccatttccagcaggtgggctcatttgcaggagcgggggtattctgggagcctctgggtggggtattctgagctacctggggcgaggggagtgccaaatagctgactacatcagctttggggtttgcgctgggcaggggagtctgtacttggggctttgggggatgaagtgtgctcactgaagagggagttggtgtctcagtacgacctgctcattcggtgaagctgaacagacagatactagtttgtcccaaactgtgtaggttgctcttctctgcctctcccttcctctccctgtctctgatttccccctctccttcttggttggcctcacccacctcctgcctcctgtctccctcttcatccatctctttttgttcttttttctttctctctctctctttttttttttttttttttttttaagacatggggtcttgttatgttgccccagctggtctcaaactcctggactcaagtgatcctcccacctcggtctccccaagtgttaggattacaggccagagccactatgcccggccccatccatctctttttgtcttgcagagttgtcttcaggctttggagccacaggccgtgtcttcttacttgagccctggtgctcccttaaaaggtacttgtcctggtgtcttctctcccggggggagtttctcaggactttcaaggggtatctcaccactgagtcagtggtctgggatttttggtggatctggaaggagaaggtcagagaagctgctgtcaaccctgttaattaactctgttacttcctgccaagttgatataagctggtctgggtgttccagccaggccagggttctcaccctagcttctgttaaatatcacaagggaacggtcaccgattggctggcccctcctgccccatggcctctgctgagctggctgattttcaggagctcttgtggtttctgaccgtggatgtaaatatttattccttctgtgggaaacaagataggtactggctcaggctacctcctaaggccatggatttccttatgataaaggcctgtccccattgcccacaggcccatgtctgtgaccttctccggtgcgagcccccttcccagtagggccattggcaacttgactaatggctgatgggggccagaggcaggtgggctagtggtcaggggcaacaggagggcaaggcccactttgtgacctggttctttgtggtctaggccagaggcacactgaccagtgcctggggccacgctgggggctggatgcagccgacgctgtctgggtatcccatagcctgggtccttccagcgctgccgctcctgaaaggctgggagatcattgcccagggtccctgaccctctaagggctcccttgggagaggacagtgagggctggcctgggcccctgcttcccaagagaccactgggctccactcgtgttcagtttcctgtcggggtccatgatgttacttgtgaaacacctgtgcccagagcagggtccaggaggcagggcaggggctttcccctttgggcagagccaccagggcagtgggaatcttgtcttgatggggtgacccaaagcacacaatagcccaacagctcctcctgggccctgccctttgcgtgcctagtcactaatggggtctggctcttggggtgggggtgacacgcaatgtcttgacttcggaaggccatccttccaagacctgccagcccctttcctgttagctttccactgcttgctctctagaaccatcgccctctgctctccctctccccctccaggccgccctccttcccctggcttccagaggcagaggcagaggcagaggcgggctgcaggcggcatcctacacctggagctgctggtggccgtgggccccgatgtcttccaggctcaccaggaggacacagagcgctatgtgctcaccaacctcaacatcgtgagtgccccacgctggactgtgcaggtccccacggccagggctggtgaccaatgtctgtgggctggtgtatctggtagtctgaatacagtgggttaaactcaggtagaatggctcggggttcttcctcttctccctccctcccctgggtggaggtgggtgaggtcccacaccctctctaggctccatggcacatgcacaccctgcagcctctcactactcaagtcccttcacctggggccaccctcaagcctggcctcttccccagtatccatttgacccccacaaagctcagctaaagcaaccctggcaaatgggatacgggctgctcacactgccctctgcaccccgaccctgccctctctccattctcttgtcccccgctcagagtggcgaggacaggtcacccgtctgaagtctaaacagagactgctggcaaaggagatgcccaccttcatttcttgctagcacctgaatccctgcagccccccttcacttgaaagctggggaagggcgggcagggaagcactcccccactagccgccgtctcagaaagacaaacaaggccaggcgcggtggctcatgcctataatcccagcactttgggaggccaaggcgggtggatcacccgaagtcaggagttcaagaccagcctggccaacatggtgaaaccccgtagctactaaaaatacaaaacttagctgggcatggtggcaggcgcctgtaatctgagaggagcctgcgatctgagaggagcagcgtttgaccggaatatccgactcgtgaccatctgtgtgctctcatccccttgctttggagtttgttttccttgcgttagttggccttcctgagccatgagctgaggagcaacagaggcacggctgactgtgcagcacattttaggagccccccgccccgcccggttcccacacatgctggtggagtagcctctccagctcttcacactccgggggcccctgggagtcagcagctgcctggggctggcaatgcccacccgacgggttacctctctcatctgcccttgcacagggggcagaactgcttcgggacccgtccctgggggctcagtttcgggtgcacctggtgaagatggtcattctgacagagcctgaggtaggcatggagctggaactcagcacaccatacagagcgggaagcccaagtcatcgcatctccatcctctttaacctcttgtcccggatgccccaagcagcatggatcacagaatgcattcagccagacagaccagctgccctcccagctctacccagcactcagcacaggctgcctgactacttctctgagcctcagttgtctcatccctaacacgggctagtcatagggttgttaggaggactaactgggaaacaaaccgaccgcagtcagcaccgtgcctggttggggtgtcctaaatgcaggctttgctgtgggtccgcagggtgctccaaatatcacagccaacctcacctcgtccctgctgagcgtctgtgggtggagccagaccatcaaccctgaggacgacacggatcctggccatgctgacctggtcctctatatcactaggtagccgagctttctgatgggtgctggccagccagcctgggaaggctgctccctcagcctcctgccctctgcaaaggtgaccccagggcaggcacgtgccttggcaccacccaagtgactgttttctctcaccgaggtttgacctggagttgcctgatggtaaccggcaggtgcggggcgtcacccagctgggcggtgcctgctccccaacctggagctgcctcattaccgaggacactggcttcgacctgggagtcaccattgcccatgagattgggcacaggtatgtagccccaccagctgtccccaggatctggcaaggagctgacctgggtacccagggtggaggtggtcttggcaagcagtgggtccttgtagagtttctccagaggagcctgtacccctcaccccgacagactcaggtgtgaggacaggggaacctgatactgtttgattaaaagaactttttttccaaaagacgagcaagacacctttagcaggtagaaaataacttctgtagaaaattcaggtaaagaaagagcaggctgtaaaaattatctcaaatcccaccatttagagataatgtctcttcacattttgtatttaatttcagtcttttctttacatacacacacatatttcttatttgcaaaattgggatttagtttggatccctgaaaaaaaggaaaattgtgattatgctgtgcattgctttgttacctgctatttctttttcttttcttttcttttttttttttgagatgaagtttcgctcttgttgcccaggctggagggcaatgacgtgatctcagctcattgcaacctccacctcctgggtgcaagtgattctcccacctcagcctcccaagtagctgggattacaggcatgtgccaccacgcccagctaattttgtatttttagtagagacagggtttctccatgttggtcaggctggtctcgaactcccaacctcaggtgatccacctgcctcggtctcccacagtgctgggattacaggcgtgagccactgcatccagcctttcttttttcttcctagggtaagtgcaggatttacctgttctttatgtaataatatatcccaaacattatcccaggtatcttagaggtgtgcaccgtaatttatttaatcagtcccctcttcttggatgtctaggttgtctgaacacgtcttcctgttgtgaatgttatgcattcttgtgggcaaaccttcactcttacctataaccatttacctagagtgatgggtttcttttcatttctttagttttttaagtatgaaaataatacccaattgttgtaaaaattcaaacagtgcagagatttctaaagtaaaaagtgaatttccacattccttgcccaccaacccccacccgacccctttcaacccctctgagcctgggagggttgaggcagggttcctgggtgtgggacaaggcagggctccttctccctcagagggagcatagttcccttctgctcctgtgatgcagaagacgtgagcccccaaactggggcttagcctgggagggttcttggcttcaccgaggaaagaattcaagagggagcaggtggtgttagacagcaactttgattgatgtggcagtgggcagagtgtacagccctgtgactgtatacagcacagcatagccccttttgaagccaggctaccccatagacactgtgcccaaaagagcagctcaaaggcagggctgcagtcctagttaatacccacttctaattatatgcaaattaaggggccagattatgcagaaatttctagaaaaagggcagtaacttctaggttttcgtcatggaaaaggggcagtaacttctgggttttgccatggcaatggcaaactggtatggcacactggtgggcgtgtcttatggaaaggggcttcccacccctccctgttttagctagtcctctggtccagtgtccaagcggggcctccagagtggagtccacctcctacctcaccggtgcctggcctctcccaccccattaggagtcctccatcagttccgctttgggtaaagcaagctctgttgtgacagtttggaaacggttcaccttcctggcctaggaatgcaaacaatggccaagggcaagcacgttttaactgaactttaaaatcgtgctttcctcacagtaggtgaatttcacgctcaacacatccatgtaaacagtccccagagcagcccttcaaggccccggccagtccccacctccccacagactcctaacaccatgatttaatgtggcttgcacatttttaaaggcttttgatatttattagcaaaagatgcgagagccaccctgctgggctagcgctcccttctgggggaaactgaggcagggcgcacgcgaccctctccactgcgcccagttagcagatggcggcgtcaggggtcgacccgggtcggaaaactcgctggcgctgcggcactagggcgccgggccgctgactcgccgacccccgtcccgcccccacccccgcccccgcccctgccggccgccttagcgcaactccccgccccccgaccagcttcggcctggagcacgacggcgcgcccggcagcggctgcggccccagcggacacgtgatggcttcggacggcgccgcgccccgcgccggcctcgcctggtccccctgcagccgccggcagctgctgagcctgctcaggtagcggccgccccgtgggaggggcgcgcgagcctccagccagcccgctgggccgccagcgccacctctctctacgtccgtccccactccgcattcagccctccttcctgtcccacccctccgtccaacccacccctccgtccaaccccgcgcccaccgctccgtccgtggaggggcgggcgcgcgagcctccagccagcccgctgggccgcccgcgccacccctccctacgtccgtccccacctctccctacgtccgtccccactccgcattcagccctccttcctgtcctacctctccatcctgacccactcctccgtccaaccccgcgcccacagctccgtcccatcccgctgcgcccactcctgcgcccacccctccgtcccaacccctgcacccacccccccgtcccacccacctgccccaccccctgcacctccccccgtgctgtcccactctgcggccacccttctgtccaacccctgcgcccaccgctccgttccaccccctccctgcgcccacccctgcgtcctccctcgcccccttgcgcccacactttcgttccagccaatctgggcacgcacccctccgtccatccccatcccgccccttgactccacatacactccctggttctctcccacttgcctacacccacccctgcatcctaccctcctccatccacccctccatctcagccccctgcacccaccccgttcctgggcccaccctgttcctgcacccaccccctcacttcacccccttacccttcgtctgcctccacccgcccctacccctccgtccactctccacgctccatcagtcccacacccctatctcccccacccgcgtacatgtatccctgcgtccccttcccgccgaccgcaccgctcccgggcctaacctgcatctgctccatcccactcagacccgtccctccgtcgccgctccctctgctggccacccacctctgcgccggcaggagccttagtcttggtcccagccaagagccggctcctggtggggggcgcgggccgagaactcctgttcccactcacaaaaggccacgcttccaaacgcttccatcctcgtgcccactcctccgtcccgcctcctcccggtgtacaccccgggactgagccgggcctgagccgggccttgtcgcagcgcaggacgggcgcgctgcgtgtgggacccgccgcggcctcaacccgggtccgcggggcacccgccggatgcgcagcctggcctctactacagcgccaacgagcagtgccgcgtggccttcggccccaaggctgtcgcctgcaccttcgccagggagcacctggtgagtctgccggcggtggcctgggattggctgtgaggtccctccgcatcacccagctcacgtcccccaaaacgtgcatggtgagaacctgctgggtgccgtgctaggctgaggtactaagccagggcggcttagtttaatgctgtctgtgccctctagaaattatttaaaatgtttgaacaaaagctccaacatttttgtttgactgggccccacaaattatgtagctagtcctgggagggcccctgtgcccaaggactcctggctgagtgaggacaccaatcttaaacagttaccaaggacttccccatctattgtggctggagtcagactggagggcttcctggaggaagtggcctctaaactgaacccacagcagaagtggggctggtagggggaggggagatgaaggagagcaggcaccccaaaagacagacttcctcgcaggattgcataggacattcatgggctccaggcacttttgccttgatgggccccttcctccacaaaaaaattgagaattatgttttaatattcttatacaatgtataaagttttatgtgttactataaatacaagtctttttttttcctatttttttttttttttgagacagagtctccctctctgctcactgcaggctccgcctgccagattcacaccattctcctgcctcagcctcccgagtagctgggactacaggcgcccgccaccacgcctggctaattttttgtatttttagtagagacggggtttcactgtgttagccaggatggtctcgatctcctgacctcgtgatccgcccgccctggcctcacaaagtgctgggattacaggcatgagccacagcgccccgccaagtctttttttttaaattcttttgagacagggcctcgttctgttgcccagggtggagtgcagtagcacaatcatagctcactgttgcctcaacttcttgggcacaaacgatcctcccacctcggccttggagtagctgggactacaggcacatgccacaatgcccagctaatttttaaattttttgtagagatggggtctccctttgttacccaggcttgtctaggactcctggcttcaagccatcctcccaccttggcgtcccaaagcactgggattacagacatgagccaccacccacgcctgatcagcaaatctattaatattatatattacaacattaattttgacctggaagttcattttttcatttttttttttttttgagacagagtctcactctgtcacccaggctggagtgcagtggcacaatcttggcttactgcaacctccgcctcccaggttcaagtgattcccgggcctacgcctcccgagtagctgggactacaggcatgtgccaccatgcccagctaagttttgtattttttagtagagacagggtttcatcatgttggccgggctggtctcgaattctgacctcaggtgatccgcccgccttggcctcccaaagtgctgggattacaggataagccaccacacccagcctagttcatttttttcttctgattttattttatttatttatttattttgagacggagtctcgctctgtcacccaggctggaatgcagtggctcaatcttggctcactgcaagctctgccttcagggttcaagccattctcctgcatcagcctcccgaatagctgggactacaggtgcctgccaccacacccggctaattttttgtatttttagtagagatggggtttcactgtgttagccaggatggtctcgctctcctgacctcgtgatttgcccgcctcggccttccaaattgctgggattacaggcgtgagccacagtgcccggcctttttccttctgattttaaaagaaattaggccaggtgtggtggctcacgcctgtaatcccagcactttgggaagccaaggcaggcggatcacctgaggtcgggagtttgagaccagcctgaccaacatggagaaatgccatctgtgctaaaaatacaaaaaattagccgggcgtggtggcgcatgcctgtaatcccagctactcggaaggctgaggtaggagaattgcttgaacccaggaggcagaggttgaggtgagccaagatcgcgccattgccctccagcctgggcaacaagagcgaaactgtctcaaaaaaaaacaagaaagaaaaataaattaaaacatttgcctcttgagcttcaagtcagtgacaagttaagaaggaaaaaaagaaaaaagacacaaaaaacacatttccatgggcccccaaaagtgtgacaggacctggtcatggtcccggttccccatcgatgggtcagtcatgccttgtcctctgagggcaccagtgcccacggtgcagagtgttggctgtgtcagtgtgtcctgcagtctgggagggacagttaaggttggacactggcctggaaggccctggtggcccctgagctcgccacccacctgtccaccctcctaggatatgtgccaggccctctcctgccacacagacccgctggaccaaagcagctgcagccgcctcctcgttcctctcctggatgggacagaatgtggcgtggagaaggtcagagccaagagtgaatgagtgggctcctgtgagcacgtgcacgtgggtgcctccagccaggccgccctattcctaggtcaggaggcaggaccagtatggggcagagagtcttggagttggccttggggactgtcctttgggttggtggtctgacctctttcctttagcatttgctcccatgcagaatgggaatgtgggctgcctgttgtatggggggtgcccatgggtgtggggttcctttgggtggggtccctgtgtgaaggtccttgtggatatggggtgtctcgggggggatccctgtgtaaggggtccctgtgagtgtagagtccctgtgggtggggtccttatgtgtgtgttggaggatccctgtgtgttgaggggtccctggggggttctgtgtgtatgttggggggtctctgggtgttggaggatccctgtgggtctgggggatccatgtggctggggtacctgtgtgttggggggtctctgtgtgtgttggagatccctgtgtgttgggggatccctatgggtgagttccttgtgtgtgtttgggggtcgctgtgggtggggtccctgtgtgtgttggggatccctgaggatgttgggggactctctgtgtgtgttgggagtcctgtggtggggtcactgtgggatgggagatgaagccatccttgccttgcagtggtgctccaagggtcgctgccgctccctggtggagctgacccccatagcagcagtgcatgggcgctggtctagctggggtccccgaagtccttgctcccgctcctgcggaggaggtgtggtcaccaggaggcggcagtgcaacaaccccaggtaccgcagggagggtgcttttctgtcagggagtgtggccataccatagtccctagttgaaggcagtggtcaccctgctctctcaccctcctgtctgctgggcattttcagacctgcctttggggggcgtgcatgtgttggtgctgacctccaggccgagatgtgcaacactcaggtaggcctgcttcctggggtaggagggggcagctggtggcaccgggccctgggggagccaaagtgaccatctgtggttcacaccaggacacatttgagaaggacattggggccaggtgaggtggcttatgcctgtaatcccagcactttgggaggccaaggcaggtggatcacctgaggtcaggggttcaagaccagcctggccaacatggtgaaatctcgtctctacagaaaatacaaaaattagccgggcgtggtggtgggcgcctgtagtcccagctactcgggaagctgaggcaggagaatcacttgaacccaggaggtagagcttgcagtgagccgagattgggccattgcactccagcctgggcgacagagtgagactctgtctcaaaaaaaaaataaaaattaaaaaagagagagaaggacattgggaccccagttcataaaccaggccagtcctgctgatgcccacagagcccctgaagcgtcccgcctccctccctgagtgccactttgccctccagagcgcatctctgcagggagaacctccccactaggaatacagtgcgctgctgcatgcctgcaaaggaattttttaaatattatttttatttttttagacagagtctctccctgtcacccagactggagtgcagtggtgctatctcagctcactgcaacctctgcctcccaggttcaagcgattctcctgcctcagtctcctgagtagctgggactacaggtgcccgccaccacgcccggctaattttttgtatttttagtagaggaggggtttcaccgtgttagccaggatggccttgatctcctgacctcgtgatccgcctgcctcggcctcccaaagtgctgggattacaggtgtcactgcgcctggccgaaggagtcttttatttataaattgaggtgacattcatgtagcatgaaatcaagcattttaaagtggcaactcagtggcctttagtacactcacaaggttgggcaagtactgcctctgtctagtttcagaacgtttccagtactctggagtactctggagtgaaccccatatggtaggctgtcactccccatttctcctccgccactcagcggccattggtttcccttctgtctctgtggattgacctgttctagacatgccacgtacctgaggccagacaacaggtgtgcttcctgcctgccttcctcccccagcggcacgtccccaaggctcacctgtgttgtagcctgtgtcagcgcctcattcctctttctggctgaatcatattccactgcagggatagaccacattttcatccagtcgtctgctgatggacatctgaggtgttttcaccttttggctcctgtgaacagagccgctgcgaatgtgcttgtacatgtttgaatccctgttttcaattcttttggcagtatgctgaagagcggagttactggatcgtatgggaattgtatgtttgacttttttttttcttttttttttttttgagacagagtcttgctctgtcgccaggctggagtgcagtggtgcaatctcagctccctgcaaccttcgcctcctgggttcaagcgattcccctgcctcaccttccggagtagctgggattacaggcacgcgccaccatgcctggctaattttttgtatttttagtagagatggagtttccaccacgtcagccaggatggtctggatctcctgacctcaggtgatctgcccgccttggcctcccaaactgttgggattacaggcatgagccaccgctcccggcctatgtttgactttttttttttcttatttttttctttctttctttatttttttttttttagagatggagtctcgctctgtcgcccaagctggagtgcggtggcgcgatctcggctcactctaagctccgcctcccaggttcaccccattctcctgcctcagcttcccgaatagctgggactacagacgcccgccaccacgcccggctaatttttttttgtatttttagtagaggcggggtttcaccatgttagccgggatggtcttgatctcctgacctcgtgatctgcctgcctcggcctcccaaagggctgagatcacaggcgtgagccaccgcgcccagcatgtttggcttttaaagaaactgccaaaccgttttccacagtgcctgaactgtttcacattcccaccagcattgcgccagggttccagtttccccacatccgctgcagcacttgctgttttctgttgttgttttttcttttctcttcttttttttttttttttttttaatagagatggggttttgtcatgttggccaggctggtcttgaactccgaccccaggtgatccgcccaccttagcctcccaaagtgctgggattacacgcgtgagccatggcgcccggcctgttttctgttttttgattttggccatctcggtggtatgaaatggtagaaagattctttttacattgagttaaattctatctcctgcttcgatggccctgggtgtgggtttgtccctggctgtattacagttctgcatgtggtgagaccctccctttcctccttctccaaatggaccaccaagacctccccagaccgtgaggggagggtctttggctggagcacagggtggtgggatttcgtggaggcagtgtggtcagtgtggctgtccagggagtcaactccggttatcttctgtcagcccataaaagtccaagacgcctgcctgagtgcagaggcttcggtggtgaggtctttgctccatgctttggttacctgcctctaggtgcactacctaaagaatacacatccccgtccctgttttattgagttcaggccttggaagcagaggctctgagcgtaatgctctttcctggctttcttcttcgttgctgccctgtgttctttacggattccccggggttttcccatcaatagagagaggcaggcacttttgtcaccccagtttacagagcagggaaccgaggcacggcctggagctgaggccacacccacatcttgatcctgtactgtagggtgccatgtagtctcccagtgacaacacccgccccccgccccaccgccatccccctcctctgcctcctcctggccaggcctgcgagaagacccagctggagttcatgtcgcaacagtgcgccaggaccgacggccagccgctgcgctcctcccctggcggcgcctccttctaccactggggtgctgctgtaccacacagccaaggtggggcctgcggagtgtggggttgggggaggagccagccctggagaccctcggacagggcagagtcataggggggttggcctactatccctccagcactgggcaaagtggttcaggctctggcatcccacagaccatggatgacatagtggccaggcctcgctggtagatcaggcactgacatcccatctctgagtctcaatttcccatctgtgaaatggagataatagcagtaggtccctccctgggcgctacaaggattcagggagataatcggaaaatgccaagtgtgttccttggttcatgatactttttttgtgagacagagtcttgctctgtcgcccaggctggagtgcaggggcgtaatctcagctcactgtaacctccgcctctgggattcaagggattcttgcccctcagcctctcgaatagctgggactacaggcttgcactaccatgccggctaatttttttgtatttttagtagagatggggtttcgccatgttggctaggctggtttcaaactcctgacgtcaggtgatccgcctgcctcggcttcccaaagttctgggattacaggcatgaaccattgcgcccagccttggttcctaattcaataccattaattattagattagattaggatcgtgattaggattattgccttaggaggtgggatgtggggaagatagaaacccttgccccagatgcaaaggatgaagctgggtgggggctgggggacttgcccctcctgctcggttcaggacaccctttttcactctgccctcccaggggatgctctgtgcagacacatgtgccgggccattggcgagagcttcatcatgaagcgtggagacagcttcctcgatgggacccggtgtatgccaagtggcccccgggaggacgggaccctgagcctgtgtgtgtcgggcagctgcagggtaggcgtgtgtggacattggcgatggccctggggcctacctgtcctatcggaaggctcctgggggcaggttggtgggtgctggccctgatggagctgcagtgccctctgcaggggagtggtgctggggaaaaggatctggacttggagtcagcctgggttaagggctgcagtgtgaccttgggcaagtcactgagccctctaagcttgcttcctgtgtagatggtggggtgctatagaagtgttgctggttttgtggatcccagaatctcagagctggcagggctgcagagtcattgaggccagcaccctccagtgacacgggccctctgtccttccctttgcatagacatttggctgtgatggtaggatggactcccagcaggtatgggacaggtgccaggtgtgtggtggggacaacagcacgtgcagcccacggaagggctctttcacagctggcagagcgagaggtaggcggcctccctcggggcagaggctgggcttcccccagcctccaagatggccacagcccagagcgttggtgcaggggctgctcaggtcacagggcctgcacactcactcagccctggatgcctcctgtggtgtcagcgtctccctcttccacttcgccacccttctgtggcaggctcaggttttggccttgatgctgctgggactgtggtgcctcagtaatggtcactcactgtagccgtgctgcaaaaaaaacacagacattggccgggcgctgtgctcacgcctgtactcccggcactttgggaggctgaggcgggtggatcacctgtagtcgggagatcacctacagcctggccagtatggtgaaaccccatctctactaaaaatacaaaaattagctgggcatgatggcgggcgcctgtagtcctagctactcaggaggctgaggcaggagaattgcttgaacccaggaggcagaggttgcagtgagccgagatccctctgcactccagcccgggcaacagagtgagacactgtctcaaaaaaaaaaaaaaaaaagtatggacgttgtgcattctgtggcagctaccctcttctctcctgctcaagaaatcccactgagagggacacaagtgaatgagagggttggtagttacatttggaaaatctttgactttggtgtatatatgaggtcaaaaaccatttgcaaatgccagtgcttctatggagagcagagacttgagccctgcctccctctggcttgccccactgtgctggagaaccttggacccggtcccttctcccagccagggcagagccttggcaggtggtcctccagcctgcttttaattgcccccatgacaggggactcactgctgctggagccagccccatggcattgttcaatttttcccgaccagctaagatcagctccctttgtctgtggtgtggtggctgtgaggtccacgcatctctccttcttttcttctttctagaatatgtcacgtttctgacagttacccccaacctgaccagtgtctacattgccaaccacaggcctctcttcacacacttgggtgagttgactggaggactcccacccagttagctagactgcaaaggtgcagagcactgttgccaagatgccctcacttctgacatcacccgcaagttcagggggttccccaaaccaccctcaggcttgatagttgactaggaagactcccagagctcactgagagctgtggcacatggctgcggctccttccagaagaacacaggttagaattgtccaagggaagagatgtaggcagagtctgggagggtccaaccaggaggcctgatgtctcagggatgtgacacccttctagcattggagcgtggccatacgcatggagtattgcccacacagaaagcccactgagtgggagttgagagtttttcctggggtttgagtgcaaagacatgattgactaattggccaggtggatactctcagtctcttggtgacccagcccctatcctaaatcacatagttggtctttctggtacagccagcccctgccctaaaggaggacacttctgcctggtgtgacccgtgtttcctcttggaagccaacagcaaaagctggacttctctttgggcaaggcccgcttctttgctattgagggccacagtgggtctttctggagtgtgtctgcacctaacctttgaagccttggttgccggcacttgccatggggtccctgagccctgagcctgttgagttctgtgcgtgagtgcacttggtcatagcactcaccaggttgtggaaagaggcctagagcctccgctgtggggaagcctctagctcagatgcctgtggctccttagaggagggctggggaccccgggaaggagagtcactgacatgtgcctgtgaggaggatgggtgctcagctccacacagctaacagggctggttccccgacagcggtgaggatcggagggcgctatgtcgtggctgggaagatgagcatctcccctaacaccacctacccctccctcctggaggatggtcgtgtcgagtacagagtggccctcaccgaggaccggctgccccgcctggaggagatccgcatctggggacccctccaggaagatgctgacatccaggtcagcaggagagcctgggggaggccagtgggggcttcttcttgggggctatggctgcttgctcgtttgtctatccatccattccctgattcgttcatttattcattcagcggtcacttacaggggacccactatgtgttgggccctgtgctaggcaaaatgtagctagctcctccaggggcttagggtcccacaaatatccaaatgtgcctgtgcccagagcccgtgggagaaggccctgcagttctgggatcaggtaaggttggagggcccaatgcaggggtccagggctccctgggaaagagtgatggagctgaggtgtcagatgagcagatgttgctgggccaagcagggaaggaagcgtatggctgagggaacagtgtcagtgtgggagggatgaaggaaggtcctactgtgtgggtttgtggggagatgaaggcatggacgcaggtgcagtggcatctggggagtaggccttggtgctgaggaagctgagaacagatgctggctctcactgcttctttggtgcagtgtgtgtgggaaccggaaggccttgttcaggcgtgtcctcagtgacgtgtgctcgcccatgtatgtccccattggtgcttcgctgaggaaggcacgtggagggtggagagacataagcgcaggctgaaacagacctgagaaccttgggagaggggcccagtctcagcggccggagcagcgtcctctgcccctacagcagccagagacaggagggcctcccacagatcaggccaggccgggccaaagcaagcccctgtgagcggcttatcccttctcttcccctgatatggttcccttcctcccctccccttgcctgggacattgtatccagatgctagctgccgagtggctctcccatcatcctctgcagtgtgtaaaaaagcagattcccgggtcctctgcatattccctgaatcaggacttccctgtgttgggcctgagaaaccgcaccgtaaccaacacaggcttgcggcactggccagatgtgggcatcgagggggcaggtgcggaatgtcacctcgccctgggctctggcctccaggctggcctctttcttgggctggtcttgggcacaggacccagttaccctcctgaagagccttaggcccaggaacctgctgaagttcttcctagtgctctccgggccagtcccaagccagtagctggccacaggtccccagggatccagtttcttcctgccgaccctaccacaggtccccagggatccagtttcttcctgccgaccctacgggcctcagctctggctccagaagcactttctgtgctggccctgccctagcccttcttgggctccttagcccagcctaaggtgggcctgcctcctccactgcactttatcctctacccagccagcttagggaaccttctctgtgctgcccaaataccctatcatgtaacccaccaatgacttggtaattacctccccgagccctctatcccaacccactgagagctccttgcagctcagccagtgtcctgtgcactgtgctatccccagagcctggtacaggtcagtgttggtgattgcttcccgttatttttgtctttgttgtttttttagagagggtctcactgttggccaggctggagtgctatgttgcccaggctgctctgaaactcctgggctcaagtgatctgcctgcctcaggctcccaaagttttgggtttacaggcatgagctaccgtgcctggccagtgattgcttgctgaacgaaagattatagggatgcaagaagaagttggaaggcttcccaggggaggtggccatgacagtgaccctcagggaacccactggacaaggcctgaagctctttgtctgcaggtttacaggcggtatggcgaggagtatggcaacctcacccgcccagacatcaccttcacctacttccagcctaagccacggcaggcctgggtgtgggccgctgtgcgtgggccctgctcggtgagctgtggggcaggtgagacctggggaaggctcatccacagcacggcttgcccctgcagggaggcggcctagccctccctcttccctcccagggctgcgctgggtaaactacagctgcctggaccaggccaggaaggagttggtggagactgtccagtgccaagggagccagcagccaccagcgtggccagaggcctgcgtgctcgaaccctgccctccctagtgagtgtggtgctgtctgcgcagctccaagggggagagagggttccgctggggctgctgggctctgtccctggcctatggggcccatgtggcagggccgggctgagctgctcctgtgcaggctctcattacccctgcccacagccctgcaaggggggctctgtgagtgcccccattctgcaggtgaggacactgaggcttggggcagacatggtgacaatgtcagcccagtgggacccacacctgctgccaccttgtctgggccaccgaggcctctcttgagctcaggtactcatggtgagatggaggtgattgcctacctggagggttgtagggagacttgcggagctcctggtgcaaagcccctggctgtcaccacacctgacggggcacactgttagggacgaggccattcctgctgggtgcaggacagggcagctgctcaccagcctgtgattcggttgtcctcaggctcagccgtctggcagcctgggaacacctggagaggctaggctggccgtagtgcccattgcttgtcccagaccgggggagtacatcagcacctgccaccccatcaccccaggccagcctgggacctggccagggtcccgacgctctgtctccttcctcagctgggcggtgggagacttcggcccatgcagcgcctcctgtgggggtggcctgcgggagcggccagtgcgctgcgtggaggcccagggcagcctcctgaagacattgcccccagcccggtgcagagcaggggcccagcagccagctgtggcgctggaaacctgcaacccccagccctgccctgccaggtgagcccagggctaggtggggctgggagagggccttcctggcagagctcgtccctgcgctgagcccccatccttctgagaatcccctcctcctgaggcctccggcggggcctcaccatccagggtgatgggcagtgtcacctggcggttgtaagtgctgctgtcagagttccttactacccaggagagcctgggcccattgtttccctctctgagcttccgagcccctgctctgaaatggggatgccgacctgcctggggagggggggcttcgaggatgaggtcaaactgaacggagtgggagatgtcactttctcatcaccaccatctcccccgtgcccacgtggctgcatctcatcccctcagtgtccaagttgacagtggcttatcatcctgccctgccactaacgagctgagtgacagggcaagtcccctcctctgtgggcttcagttttgcgacctgtccggtgggaggggattggtctggattgttggtggcccactcatagctctggactcctttccccgcctcgtcatccgtggcagacaaaacagtcaccactcttccccgctgaggccagatagggcctcagaatccttctcacacagctctccaggcagccactttagcgcagggctgactcacagctgaaacccattggccacccttgaacctggtgatccaattccatgtggcacctgtttctctgcacctgctatggtgcatggagtcagtgattacctggctggaggtcggcctctgcctctggagagtaggagggatgggttctcttttttttttttattaaaagacagagtcttgttctctcacccaggctggtatgcagtggcatgatcttggctcactgcaacctcctgcctcagcaagtgtgcgccaccaagcccaactaatttttgtattttttgtagaaacagggttttgccatgttgcccaggctggtctccaactcccgggctcaagcagtctgctcacctcagcctcctaaagtgctgagctaccgtgcctggccagggataggttctgtctctgcaccctgggtgcaggtggggtgcctgactgttgagcagcgagtgcttgttgaatgggaacctgctggctgatgaatggggaacccggtgcttcagggagagaccctgagcttcacttctctgtggggctcctctttgggctcctggatgttggggagcaggtccccttcctccctgcccctagcagctgggctataccttcccctgggtggcagaggcagggcctgatgactgtctcatgccatcctcaggtgggaggtgtcagagcccagctcatgcacatcagctggtggagcaggcctggccttggagaacgagacctgtgtgccaggggcagatggcctggaggctccagtgactgaggggcctggctccgtagatgagaagctgcctgcccctgagccctgtgtcgggatgtcatgtcctccaggctggggccatgtgagtgccctgggcatgagggtggctggggctgttgagtcctttacctggctgggagaacgaggagcacccattgccaccgtcctccaggccagagcaagaacaccatccttctgtgggaatgctgtctgagggccacccctgctcagaaaagaagcttagaaagagggctcagggcccctgggaaggctcccattccccttgcaagccgggctgagggaagcatctgaggagagtgtaatgcagctgctgtgcagagaaatgctgccaggctcccgcctggcgtccaggggctggaggctgactggccttgctctctggcctgggtgctggcaaccctcgcccctcatggctggggggattgcagggccaggcatgctcccatgtcccactcttggtccccagctctcggccaggcccacagtgagcactcatgctgctgaggagcctgcaaaggtggggtgtgcagcaaggatacccgctgcgagaccggggagccgatctcgccaagggaggaggggagggagcccctggtgcacacacgccacttcctggtctctctgctgctgcctgagaagatcgagacggggatcgctgggtcctcagaggaggcccagacccaccagcttgttgctattccccacagctggatgccacctctgcaggggagaaggctccctccccatggggcagcatcaggacgggggctcaagctgcacacgtgtggacccctgcggcagggtcgtgctccgtctcctgcgggcgaggtgagggcccccgggatgctcctggggaccagcactcatggtaactctcctgtccacttgcatcttgcctcgttctgaaaagcatttgaggtggattgcagaaaatccagactatatgggaacacgtggtaatacacaaggagactaagcatagtagctgacagccacttcaaatgtgggtgttgattggctgaaaggtaggaaaagacaataacgcccggcagtgtggcacgagagccattccttatggtcctagcagagcggccggggggtccccaattgatgacccgagcagagaaaccttagctttaagatacacagcgttcttctattttcccaatcttgttttattgcagtataacacagatattataaaatttaccatccaaactgtttctccctgtgcaggtcagtggcataaaagcacagtcacattgttgtgcggccatcaccaccaacctctccagaacttttccagtttcgcaaactggagctctgtccctgtgaaacacgaactcccatttccccctccgcagcccctggcaacctccattctcctttctgtctccagattccacaattctagggaccttgtagaagtggaatcatatagcatttgcctttttgttactagttttcactcagcatgatgtcctcacagttcatccatgttgtagcatgtgtgagtgtttccttcttaaggctgaaaaagattccattgtgagtgtatcctttacaggtttatccatttattcatcagtggacacttggcttccttccacactttggctattgtgaataatgcttctgtgaacatgggtgtgcaaatatctgtttgagttcctgctttcagttcttttgggtgtatatctagaagtgtggtagctgggtaagatgagaattctatgtttaatttttgtggaactgctggactgttttccccagtggctgcaccattttacatttccactaatggtgcataagagttccaatgtcctcccatccttgccaacactttttatttctatggttttttttgtttttgtttttgtttttgagacagagtctcattctgttgccgaggctggagtgcagtggcatgatcttggctcattgtaaccttcgcctccggggctcaagtgattctcgtgcttcagcctcccgagtagctaggactataggcgtctgccaccatgcctggctaattttttgtttagtagagatggggtttcaccatgttggccaggctggtcccaaactcttgacctcaggtgatctgcctgccttggcctcccaacgtgctgggattacaggcgtgagcccccacacctggcctatttctgtgttttttttataatggccatcctaatgggcttgagaagacacaccatgttcttaaacgaaaaccctgaccacttgctcagtaaaatgtcagcctgtttaaaaccgagaccaaaaagagatttctttttctctcttttcttttttgagacaaaaaagaaaacctctgtcaccaggttggagtgtagtggcacaatcttagctcactacaacctccaccacctgggctgaagccatcctcccccctcagcctcctgaatagctactataccctgctaatttttgtagttttggcagagatgggatctccctatgttgcccagcctgatctcctgagctcaagcgatccttctgcctcggcctctcaaagtgctgggattataggcatgagccactgtgcccaaccaagagattttttttctttttcttttttttcttttttttgagactaagagttttcctctgtcgcccaggctgaagtgcagtggtgtgatcttggctcactgcaacctccgcctcccatgttcaaacgattctcatgcctcagcctcctgagcagctgggactccagctatgtgccaccacacctggctaattttttgtattttattttattagagagggggtttcgccatgatggccacgctggtctcaaactcctgacctcaggtgatccacccgccttggcctcccaaagtgctgggattacaggcatgagccactgagcctatttcttttgaggatattcctaaaagagagacttgagaaaactggccctaataacatctttatgatagacacaatcagagattttcatattgtgatttttttttcttttttttttttttgagatggagtctcgctctgtcacccaggctggagtccagtggcgcagtcttggctcactgcaacctctgcctcctgggttcaagtgattctccgtctcagcctcctgagtagctgggattacaggtgcgcaccaccacgctcagctaatttttgtatttttagtagagacggggtttcaccatgttggtcaggctcgtctcgaactcctgaccttgtgatccgccgcccaaagtgctgtgattacaggcgtgagccactgtgcctggcccatattgcaattcttataatgcctctcggtcaacaataacagctaccatttgtcaagtgtctactgtgtgccaggcacttgttatcttcccttttaaaaatctttataaatgattctgcaaggtagatgccattatctttttttctaaatctaagattcagagggttaagtcagttgtctgaggtcacacagctggtaagtggcagagccgggattgaaacccatgcgggccttatgtgctagaggtgtccagtgagcctgggctgcagtccttgctgagcctgtcccttggggctctgggtctctgctttgtccacgcaggtctgatggagctgcgtttcctgtgcatggactctgccctcagggtgcctgtccaggaagagctgtgtggcctggcaagcaagcctgggagccggcgggaggtctgccaggctgtcccgtgccctgctcggtgagtgaggggagcaagactgtgtgctggccttctccctgtaagtgggagacccgagccttggctccatgcccggtgacctgcggaggggggcaggtgctgctggctgtgcactgtgtgaggctggaccatggccgccccatccccctgcctcactccaagtgcaggccagagccccggcccagcccctttgaggactgcaacccagagccctgccctgccaggtgggccccttcccaaggagacagggggtgctaggtctgcatcctggctctttcctcacctccaagccagaccttttgaccctcagtgtcctcaccagtgggagcaggtcattttgtgcccccagaagactgggggagtttaatgaaaggattagatgcatgtaaagtacatgctaaatgcaatgagtgtaaaatgcatgctcgatgcaacgcgtgtaaagtacattgcacaggatctgggatgctgtgggtgcacatggttgctggtgcgtttcttcatcgcctgctctttatggagcacctaggccccggggccgtcctggagctaggggacacagcagagaacaaggcagacaaatgtccctgacctcctggagcaaatgcagggggaaagggggacagataataataggacaggcggggaatgcagtttgatggatggtgttcagtgcgatgcagccaaacacagcgggaggggaggaggggagggctggcggggtgggctccagggcggtggtgctgggatcactgttgaagacagacatgcagggcccttgggtgcccggacccctgcccccactgtctctgggatacgacatctgtcgtttgccctcacctttctcttctgtaaaatgggtttgtccaaatgttctgtccactctgccaagcctcttggtgaggacacaagggggcctccagaaagagaacctctccgggcccttcccagcttcctgtctcttcctagtctggggaaatgaaggggagacctggctcccctgggttcccaggccctggggctgtttggggtccctgactccagtttgctccaggtggcagtacaagctggcggcctgcagcgtgagctgtgggagaggggtcgtgcggaggatcctgtattgtgcccgggcccatggggaggacgatggtgaggagatcctgttggacacccagtgccaggggctgcctcgcccggaaccccaggaggcctgcagcctggagccctgcccacctaggtgagtcagccggtgatgggaggggcagctcctggtgtgtgcagatgccaggccaggcgctgtggtgtgtgcctgtaatcgcagctacttggaaagctgaatcaggagaaccacttgagtccaggagtgcaagtccaacctgggcaacacagtgagacctcatctctaaaaaaaaaacaagacggggccaggtgtggtggctcacgcctgtaatcccagcgctatggaaggctgaagcgggtggattacctgaggtcaggagcttgagaccagcctggccaacatggtgaaaccccatctttactaaaaatacaacaattaggctgggcgcggtggctcactcctgtaatcccagcactttgggaggctgaggcgggcagatcacctgaggttgggagttcgagaccagcctgtccaacatacagaaaccctgtctctactaaaaatacaaaattagccgggtgtggtggtacatgcctgtaatcccagttacttgggaggctgaggcagaatcgcttgaaccggggaggccaaggttgtggtgagccaagattacgccactggactccagcctggctaacagcagcaaaactccatctcaaaaaaaaaaaaaaaaaaagaaaacccacaaaaattagcctggcgtggtggtgtgcacctgtcatcccagctacttcagaggcggaggcaggagaatcgcttgaacccgggaggcggaggttgcagtgagccgagatggcgccgctggcactccagcctgggctacagagcgagactccgtctcaaaaacaaaacaacaaaacaaaacaagacggggtggggggctcagtggcccaagagccagtctgtaaggaatagggctacctggcaggctgtgctagttgtgggaggtgaagtttaagcaccatgcaggcagggtgcagtgtggggaggcctgggggacagaggaggcagcatttgagcagaacctaaagctgtgagcaccagcattctgatgtggaagacgggagggatggaggtctccacagggacacacacagccacactaggacacgggacagaatcatgttcaagtccgtggggtccggagcccagtggtaaagggcgaacatttgcctacctcatttacaattctttaatggtttctttttgtaggtttgcatttttagtaaagaaatacttttctatatcatacagaaacgtccagaaaagaatgtaacagacatgtatgttccagcactccagtttaatagatagcatcctactgccatgtttccttcctgtccacttacttttatttatttaatttatttattttgagacggagtctcgctttgttgcccaggcagtgatgcaatcttggctcactgcaacctccgcctcccgggttcaagccattctcctgtctcagcctcccaagtagctgggaatacaggcacccacaaccacacccagctaacttttgtatttttagtagagacagggtttcaccatattggtcaggccgatcttgaactcctgacctcaggagatctgcctacctcagcattccaaagtgctgggattacagatgtgagccatcacacctggccagcctccttagttttaaataaatccagttacagataagatttcacttaaatttaggctggtcatggctcacgcctgtaatctcagcacttcaggaggctgagatgggtggatcatttgagcccaggagtttgagaccagcctggacaacatgccaaaaccttgtctctactataaatacaaaaattagccgggcatggtggtgcatgccagtatccccagctactcgggaggctgaggcaggagaatcacctgaaccttgggaagtcaaggctgcagtgagcagagatcacaccaccactgcatgccagcctgggcaacagcatgagaccctgtctcaaaaaaaaaaaaaaaaaaaaaagattttacttaaatttaaaccctgtactaatctgtgatttatttggagtatgttgcaaagtagggaccaaaggatttttttttttttctaaattgttaactagcatctgttggacaagccctgatgcctccaggtggctccttggtggtattggtgtgtgttagaatctatgtctgggctttctactgggtttttttcttctccttttttttttttgagacagtttttctctgtcacccagggtggggtgcagtggcgcgatctcagctcactgcaacctccgcctcctgggttcaagtgattttcatgcctcagcttcccgagtagctgggattacaggtgcccgccaccacccccaactgattttgtgtttttaatagagacagggtttcactatgttggccaggctggtcttgaactcctgacctcaagtgatctgccaggttctgttttttgtgctttttttttctagctattctcttgcccatacaaaattgttttaaatgttgtagctttataaccatttaacatctgtgtcactagtgtgtcctgatttctttgcctatgctaaagtcccttggctgtgtgtcccatttatttttccacatcacatttagagatgatctgggattttatgggaattgcagggtttttcacactgcacgctgcctgcatggtgcttaaacttcacctcccacacctagcacagcctaccaggtagccctgttctctacagaccacctcttgggccactgagcctcccctcacttttttttagagatggggtctcactatgttgcccagtctggacttgaattcctgggctcaagtgatcctcctgcttcagcctcccgagtagctgggatgcaggcacacactacatgagctctggccatccctctgacgttgctgtagccacgctggcctcattgtcctggaacattccagggatactcccctgacttagggcttctgtgctagctctcgctgcctgatgtcttctgtggatatcctcgaggccctggatatccctcccccaggctcggctcagacaccacaactccaaagtggcccagtgccctccctgagcgtcggtccagaacggcactctcgtccctcctgtgacgctctgcttggcactttgggaggctgaggcgggaggattgcttgagcccaggagttctagaccagcctgggcaacatagtgagaccccgtctctacaaaaaatacaaaaattggctgtgcgcggtggcttatgcctgtaatcccagcactttgggaggcgaaggcgggcagatcacgaggtcaggagatcgagaccatcctggctaacacggtgaaaccctgtctctactaaaaatacaaaaaattagctgggtgtagtggtgggtgcctgtagtcccagctacttgggaggctgaggcaggagaatgacgtgaacccaggaggcggagcttgcagtgagctgagattgtgctactgcactccagcctgggtggttgcagtgagctgagattgtgccactgcactccagcctgggcgatgagtgagactccatctcaaaaacaaaaacaaacaaacaaaaattacaaaaattagccaggcatgatggcacatgcctgtagtctcagctacttgggaggctgaggtgagaggatggcttgaaccctggaggttgaggctgcagtgagccgtgatcacaccactgccctccagcctgggtgacagggcgagaccgtgtctcaaagaaaaccattaaaataaaataaaaaataaaatttctgcgatgcacacgacagcctccacagcaaatcagcatccagttgctcatgccagtgatgccccaatggagaacaatccacgctctgagaggaggtggggtctggtttggttcactgccacctcccagtgtcatgtagaacagtgccaagccgcggaaggcacgggtccaagaggcagcgctgcagggtcatgggggagcacagtattgcgatgaagatcccagctcccttgcaggctgcctgggtttgtgtctgggctctgaagaatgcgggccataattagttattgattgattacagatcaacatgggcagccttcccttgcccaagggaagggaactcggccttcccttgcagaacgtggggtgttgagatctgtctcctgttacccaggggctcgcttcctgttgctgttacttgggtccataggcaacccctggggtgctgacaggtgttctgtgataaaggcgactagagggggatgtgcaattagggaaacaggggcctcttccccctagggccttttggtagctctcctgtggccgtgagccctggccccagacaggaggggctcagtggctgcactttccatcttgcctggccacggaagctgtctaggcaactgtccgagtacacgtgggtggagaggggcctgcgtggggcagtactgtctctggggagacctagcctctctctggggtcttctcttcctgcaggtggaaagtcatgtcccttggcccatgttcggccagctgtggccttggcactgctagacgctcggtggcctgtgtgcagctcgaccaaggccaggacgtggaggtggacgaggcggcctgtgcggcgctggtgcggcccgaggccagtgtcccctgtctcattgccgactgcacctaccgctggcatgttggcacctggatggaggtgagcacagcgggcactcggaatccctatggggctggggtgggcatcagctgtggctcctcatgtgtgagggagtctaggaggcattggctcatcgtgtcccctgaaaggaaggagagagctgcgcccgttggtgagggggcacctagaggcagagagacagagggcctagagacctgcgggcagctaggacttaagaggcccttaggtttggggacgctggaagatgaatggcaggccactcagctctacacagatgagggaatgccagctgtgccacgcacctggcaaggcaggacagacaagggtaaatggggttcaggctgccccctggaggggctcgctcatggtgtggagggggcataggggcacagcagacagagatgagccgcagccccgcagacctgcttgctctaaggcttggagggacagagaggccgtgagggtgacagggacccagacttgaattatggctcctcccacctatatgacccatgcaaggtgccctctctgagcctcagttttctcatctgtggaatggagacacttaactgcctcccagcttgtacaaggattatattggatcactcctggcctgtggttaccactgtccttgtcaccttctggcagggtcagctgtgactcctcctcccctctcttggcagtgctctgtttcctgtggggatggcatccagcgccggcgtgacacctgcctcggaccccaggcccaggcgcctgtgccagctgatttctgccagcacttgcccaagccggtgactgtgcgtggctgctgggctgggccctgtgtgggacagggtacgcccagcctggtgccccacgaagaagccgctgctccaggacggaccacagccacccctgctggtgcctccctggagtggtcccaggcccggggcctgctcttctccccggctccccagcctcggcggctcctgcccgggccccaggaaaactcagtgcagtccagttatgtcctgtcctccttcctgtcaggcagctgctgcaggaggggtgggcaaaggcatcttcctctgggaaggactggcacaagcacttggtccctgggttgtgtgcctgggaggccgggatcagggctggccctctttctccctggcaaagcaaaacctcccttttactactatcaaggggaagtaacttgaaggtaggaacccagcttgtgagccccctagcctctgggctgctctgcatgtgccccctcttgctggatcatctggtagcagccctgtgccctgagggtgatgctctgacctatgcagcccccctccctgtcctgagaaggcttccagctgggccttggaggacagggtccacccctacctcctggtctccttcctcagcttggaagccccggagcctgccctgctgggaatcggggaagcactgcttacctgtctcctgctcccttttcaggtgcctgtggcaggcagcaccttgagccaacaggaaccattgacatgcgaggcccagggcaggcagactgtgcagtggccattgggcggcccctcggggaggtggtgaccctccgcgtccttgagagttctctcaactgcagtgcgggtatgtctagggccatgcaagcgatgctgccagttatgggccctgccaggagccagcacgacgctgcatgccccattcctggcaggagcccatgtgcattcccacctgtagtttgcatcccatctcatgactggggagtgatgatctgcattttacagatgaggaaactgaggctaggagagattaagtgatgtgcccagttacttagagtcacatagccagcagtgggagaggtgggacttgaactcggctcagtctaccctggagccactcctctgctgaccaggcgtgggagtgctggaccctcactgccctgccgcttcctaggggacatgttgctgctttggggccggctcacctggaggaagatgtgcaggaagctgttggacatgactttcagctccaagaccaacacgctggtggtgaggcagcgctgcgggcggccaggaggtggggtgctgctgcggtatgggagccagcttgctcctgaaaccttctacagaggtatggccaggccttctccacctcccttgggtgctccagtcctggcagggaggctgggtgggtgctgctggggatggggccagtcccagtggggcagtgggaagatacggagggaactgactgagatggaaggaactggggttggccagtgtcagtctgcacgtgccagggaggggtcacaggatgaatgctatatccctcctttttgggaccgtgcagcaagatggacggatgtgggacatggtccacatcctcagtcagtccctcaggcctctgccccacacccacctgccccgcccccacccctccagcctttcaagggcttttagggttttgtggaagccactgtccctcagccctgtttcagtgcactggtgtaagcagacatgcttgtacatgcatgtgcacccacaagcacacctcaggcagaggatgccacctcagggactccagccttgcccgtggccccctcgatatcctctgatagccctctcggttgtcctggggggcttgccctctcccaacagcccgagctggccgaagttggcttccctagctggttccagaggttcctcggctcccccaggtgtctggggcttagtggcaacaggggcttagcctctgcagagacctagtgcgccgcctccttgccccagacctgcccgggcagagagccgtgtatgtgtcccagtgcacaggcgctgctgggccctgccaaaaggccacaagcccactgtcaccgttcacattgcttctcgcttcccggcccagccccgcccacacaggcatctgccttgaaagaggtgcaggaggtacaggcaggtgggggctccagtgagctctgaggaacagcagtggccgccatgggtggagcctatctttgttgccagtttcagtgttaaacactcttgcacgtgtgacatcattgagtcctaaagaccactctgctcagtgcatgccattgtttccttcagttacagaggagggaaccagagcccagaacatttagcctttgcctaaagtcactgggccaggaagtggtagaggtggggttcagcaggatttgcctgggaaccccaatattgaccacagtgccatgctgccctgcacggctccctggctgtgagttgtcctggcctctggcaccaccggtctgtctgggttcctatgtccctatgtcccacctgcagaatgtgacatgcagctctttgggccctggggtgaaatcgtgagcccctcgctgagtccagccacgagtaatgcagggggctgccggctcttcattaatgtggctccgcacgcacggattgccatccatgccctggccaccaacatgggcgctgggaccgagggagccaatgccagctacatcttggtgaggcccagcatggggacttgtgctgtgattctggacagctttccctagggcgtgcagggctaggggacccccttcagtttatttcagactaaaaccctcaaaatcattagtgaaagaatgggagaagatagcttcctccacatattcaccaagaaatgttttttgagctacctacaagagtgaaatagtggctcacaactgtaatcccagcactttgggaggcccaggagggcagatcactcaaggtcaggagttcgagaccagcctggccaacatgatgaaaccttgtctctactaaaaatagaaaaagtagccaggcatggtggcgtgtgcctgtaatcccagctacttgggaggctgaggcacaagaatcacttgaacccgggaggtggaggttgcactaagcccagatcgcaccactgcactccagcctgggcaacagagtgagactctgtctcaaaaaaaaaaaaaaaaaaaaagcgaaatggtaaagaatggtaaagacctttctgatgtagactgacagctaacccaagactgaagcataattttacagtctgatataacttggacagaatagcaccctgcaccctccccgaggtttcaagtgtcctgggagaactgtgttctgcagggtatcagcttccccagaggaggcagcctggccccgctctggcaccctgactgtgtgtccttggggaagtgatgtaacgtccctggacctcggttttctgggtagagtaatggcgtattcctagtagggctttgtaagcattaaatgtgatccggaatctgtgagcccttgcacacgaaggcttccgtgagtgctaattattacttgtggccggtccttctgggctgccccttttctctcagatccgggacacccacagcttgaggaccacagcgttccatgggcagcaggtgctctactgggagtcagagagcagccaggctgagatggagttcagcgagggcttcctgaaggctcaggccagcctgcggggccagtactggaccctccaatcatgggtaccggagatgcaggaccctcagtcctggaagggaaaggaaggaacctgagggtcattgaacatttgttccgtgtctggccagccctggagggttgacccctggtctcagtgctttccaattcgaactttttccaatcttaggtatctactttagagtcttctccaatgtccaaaaggctagggggttggaggtggggactctggaaaagcagcccccatttcctcgggtaccaataaataaaacatgcaggctga

SEQ ID NO: 15385 - DNA, 37063 bp, Homo sapiens; identical to SEQ ID NO: 15384

SEQ ID NO: 15386 - DNA, 37403 bp, Homo sapiens
aaccacgatgtctttggcacagcctctcatctgtcagatgggagcggggaccccggagagggagtcagccgaggtcctggcattccttgtgaacccccgtctgtgggtttctggtccagtgtcccttctccagattagatggcttaggcctcctctaagggggtgggcgtgcacatccggagagctgtctggtgtgcaggactgggctgcaggttaccctgaactgcaaccatcttagagcaaggcccagcttgcagcaggaggagctgcaggccgcccaccctagccacggcccctgccctggcaggaagcttccaagagtaaacactgcctaatcgtcccgcccagtagtgagcaggcctgtcccattccatactgaccagattcccagtcaccaaggccccctctcactccgctccactcctcgggctggctctcctgaggatgcaccagcgtcacccccgggcaagatgccctcccctctgtgtggccggaatccttgcctgtggctttctcctgggctgctggggaccctcccatttccagcaggtgggctcatttgcaggagcgggggtattctgggagcctctgggtggggtattctgagctacctggggcgaggggagtgccaaatagctgactacatcagctttggggtttgcgctgggcaggggagtctgtacttggggctttgggggatgaagtgtgctcactgaagagggagttggtgtctcagtacgacctgctcattcggtgaagctgaacagacagatactagtttgtcccaaactgtgtaggttgctcttctctgcctctcccttcctctccctgtctctgatttccccctctccttcttggttggcctcacccacctcctgcctcctgtctccctcttcatccatctctttttgttcttttttctttctctctctctctttttttttttttttttttttttaagacatggggtcttgttatgttgccccagctggtctcaaactcctggactcaagtgatcctcccacctcggtctccccaagtgttaggattacaggccagagccactatgcccggccccatccatctctttttgtcttgcagagttgtcttcaggctttggagccacaggccgtgtcttcttacttgagccctggtgctcccttaaaaggtacttgtcctggtgtcttctctcccggggggagtttctcaggactttcaaggggtatctcaccactgagtcagtggtctgggatttttggtggatctggaaggagaaggtcagagaagctgctgtcaaccctgttaattaactctgttacttcctgccaagttgatataagctggtctgggtgttccagccaggccagggttctcaccctagcttctgttaaatatcacaagggaacggtcaccgattggctggcccctcctgccccatggcctctgctgagctggctgattttcaggagctcttgtggtttctgaccgtggatgtaaatatttattccttctgtgggaaacaagataggtactggctcaggctacctcctaaggccatggatttccttatgataaaggcctgtccccattgcccacaggcccatgtctgtgaccttctccggtgcgagcccccttcccagtagggccattggcaacttgactaatggctgatgggggccagaggcaggtgggctagtggtcaggggcaacaggagggcaaggcccactttgtgacctggttctttgtggtctaggccagaggcacactgaccagtgcctggggccacgctgggggctggatgcagccgacgctgtctgggtatcccatagcctgggtccttccagcgctgccgctcctgaaaggctgggagatcattgcccagggtccctgaccctctaagggctcccttgggagaggacagtgagggctggcctgggcccctgcttcccaagagaccactgggctccactcgtgttcagtttcctgtcggggtccatgatgttacttgtgaaacacctgtgcccagagcagggtccaggaggcagggcaggggctttcccctttgggcagagccaccagggcagtgggaatcttgtcttgatggggtgacccaaagcacacaatagcccaacagctcctcctgggccctgccctttgcgtgcctagtcactaatggggtctggctcttggggtgggggtgacacgcaatgtcttgacttcggaaggccatccttccaagacctgccagcccctttcctgttagctttccactgcttgctctctagaaccatcgccctctgctctccctctccccctccaggccgccctccttcccctggcttccagaggcagaggcagaggcagaggcgggctgcaggcggcatcctacacctggagctgctggtggccgtgggccccgatgtcttccaggctcaccaggaggacacagagcgctatgtgctcaccaacctcaacatcgtgagtgccccacgctggactgtgcaggtccccacggccagggctggtgaccaatgtctgtgggctggtgtatctggtagtctgaatacagtgggttaaactcaggtagaatggctcggggttcttcctcttctccctccctcccctgggtggaggtgggtgaggtcccacaccctctctaggctccatggcacatgcacaccctgcagcctctcactactcaagtcccttcacctggggccaccctcaagcctggcctcttccccagtatccatttgacccccacaaagctcagctaaagcaaccctggcaaatgggatacgggctgctcacactgccctctgcaccccgaccctgccctctctccattctcttgtcccccgctcagagtggcgaggacaggtcacccgtctgaagtctaaacagagactgctggcaaaggagatgcccaccttcatttcttgctagcacctgaatccctgcagccccccttcacttgaaagctggggaagggcgggcagggaagcactcccccactagccgccgtctcagaaagacaaacaaggccaggcgcggtggctcatgcctataatcccagcactttgggaggccaaggcgggtggatcacccgaagtcaggagttcaagaccagcctggccaacatggtgaaaccccgtagctactaaaaatacaaaacttagctgggcatggtggcaggcgcctgtaatctgagaggagcctgcgatctgagaggagcagcgtttgaccggaatatccgactcgtgaccatctgtgtgctctcatccccttgctttggagtttgttttccttgcgttagttggccttcctgagccatgagctgaggagcaacagaggcacggctgactgtgcagcacattttaggagccccccgccccgcccggttcccacacatgctggtggagtagcctctccagctcttcacactccgggggcccctgggagtcagcagctgcctggggctggcaatgcccacccgacgggttacctctctcatctgcccttgcacagggggcagaactgcttcgggacccgtccctgggggctcagtttcgggtgcacctggtgaagatggtcattctgacagagcctgaggtaggcatggagctggaactcagcacaccatacagagcgggaagcccaagtcatcgcatctccatcctctttaacctcttgtcccggatgccccaagcagcatggatcacagaatgcattcagccagacagaccagctgccctcccagctctacccagcactcagcacaggctgcctgactacttctctgagcctcagttgtctcatccctaacacgggctagtcatagggttgttaggaggactaactgggaaacaaaccgaccgcagtcagcaccgtgcctggttggggtgtcctaaatgcaggctttgctgtgggtccgcagggtgctccaaatatcacagccaacctcacctcgtccctgctgagcgtctgtgggtggagccagaccatcaaccctgaggacgacacggatcctggccatgctgacctggtcctctatatcactaggtagccgagctttctgatgggtgctggccagccagcctgggaaggctgctccctcagcctcctgccctctgcaaaggtgaccccagggcaggcacgtgccttggcaccacccaagtgactgttttctctcaccgaggtttgacctggagttgcctgatggtaaccggcaggtgcggggcgtcacccagctgggcggtgcctgctccccaacctggagctgcctcattaccgaggacactggcttcgacctgggagtcaccattgcccatgagattgggcacaggtatgtagccccaccagctgtccccaggatctggcaaggagctgacctgggtacccagggtggaggtggtcttggcaagcagtgggtccttgtagagtttctccagaggagcctgtacccctcaccccgacagactcaggtgtgaggacaggggaacctgatactgtttgattaaaagaactttttttccaaaagacgagcaagacacctttagcaggtagaaaataacttctgtagaaaattcaggtaaagaaagagcaggctgtaaaaattatctcaaatcccaccatttagagataatgtctcttcacattttgtatttaatttcagtcttttctttacatacacacacatatttcttatttgcaaaattgggatttagtttggatccctgaaaaaaaggaaaattgtgattatgctgtgcattgctttgttacctgctatttctttttcttttcttttcttttttttttttgagatgaagtttcgctcttgttgcccaggctggagggcaatgacgtgatctcagctcattgcaacctccacctcctgggtgcaagtgattctcccacctcagcctcccaagtagctgggattacaggcatgtgccaccacgcccagctaattttgtatttttagtagagacagggtttctccatgttggtcaggctggtctcgaactcccaacctcaggtgatccacctgcctcggtctcccacagtgctgggattacaggcgtgagccactgcatccagcctttcttttttcttcctagggtaagtgcaggatttacctgttctttatgtaataatatatcccaaacattatcccaggtatcttagaggtgtgcaccgtaatttatttaatcagtcccctcttcttggatgtctaggttgtctgaacacgtcttcctgttgtgaatgttatgcattcttgtgggcaaaccttcactcttacctataaccatttacctagagtgatgggtttcttttcatttctttagttttttaagtatgaaaataatacccaattgttgtaaaaattcaaacagtgcagagatttctaaagtaaaaagtgaatttccacattccttgcccaccaacccccacccgacccctttcaacccctctgagcctgggagggttgaggcagggttcctgggtgtgggacaaggcagggctccttctccctcagagggagcatagttcccttctgctcctgtgatgcagaagacgtgagcccccaaactggggcttagcctgggagggttcttggcttcaccgaggaaagaattcaagagggagcaggtggtgttagacagcaactttgattgatgtggcagtgggcagagtgtacagccctgtgactgtatacagcacagcatagccccttttgaagccaggctaccccatagacactgtgcccaaaagagcagctcaaaggcagggctgcagtcctagttaatacccacttctaattatatgcaaattaaggggccagattatgcagaaatttctagaaaaagggcagtaacttctaggttttcgtcatggaaaaggggcagtaacttctgggttttgccatggcaatggcaaactggtatggcacactggtgggcgtgtcttatggaaaggggcttcccacccctccctgttttagctagtcctctggtccagtgtccaagcggggcctccagagtggagtccacctcctacctcaccggtgcctggcctctcccaccccattaggagtcctccatcagttccgctttgggtaaagcaagctctgttgtgacagtttggaaacggttcaccttcctggcctaggaatgcaaacaatggccaagggcaagcacgttttaactgaactttaaaatcgtgctttcctcacagtaggtgaatttcacgctcaacacatccatgtaaacagtccccagagcagcccttcaaggccccggccagtccccacctccccacagactcctaacaccatgatttaatgtggcttgcacatttttaaaggcttttgatatttattagcaaaagatgcgagagccaccctgctgggctagcgctcccttctgggggaaactgaggcagggcgcacgcgaccctctccactgcgcccagttagcagatggcggcgtcaggggtcgacccgggtcggaaaactcgctggcgctgcggcactagggcgccgggccgctgactcgccgacccccgtcccgcccccacccccgcccccgcccctgccggccgccttagcgcaactccccgccccccgaccagcttcggcctggagcacgacggcgcgcccggcagcggctgcggccccagcggacacgtgatggcttcggacggcgccgcgccccgcgccggcctcgcctggtccccctgcagccgccggcagctgctgagcctgctcaggtagcggccgccccgtgggaggggcgcgcgagcctccagccagcccgctgggccgccagcgccacctctctctacgtccgtccccactccgcattcagccctccttcctgtcccacccctccgtccaacccacccctccgtccaaccccgcgcccaccgctccgtccgtggaggggcgggcgcgcgagcctccagccagcccgctgggccgcccgcgccacccctccctacgtccgtccccacctctccctacgtccgtccccactccgcattcagccctccttcctgtcctacctctccatcctgacccactcctccgtccaaccccgcgcccacagctccgtcccatcccgctgcgcccactcctgcgcccacccctccgtcccaacccctgcacccacccccccgtcccacccacctgccccaccccctgcacctccccccgtgctgtcccactctgcggccacccttctgtccaacccctgcgcccaccgctccgttccaccccctccctgcgcccacccctgcgtcctccctcgcccccttgcgcccacactttcgttccagccaatctgggcacgcacccctccgtccatccccatcccgccccttgactccacatacactccctggttctctcccacttgcctacacccacccctgcatcctaccctcctccatccacccctccatctcagccccctgcacccaccccgttcctgggcccaccctgttcctgcacccaccccctcacttcacccccttacccttcgtctgcctccacccgcccctacccctccgtccactctccacgctccatcagtcccacacccctatctcccccacccgcgtacatgtatccctgcgtccccttcccgccgaccgcaccgctcccgggcctaacctgcatctgctccatcccactcagacccgtccctccgtcgccgctccctctgctggccacccacctctgcgccggcaggagccttagtcttggtcccagccaagagccggctcctggtggggggcgcgggccgagaactcctgttcccactcacaaaaggccacgcttccaaacgcttccatcctcgtgcccactcctccgtcccgcctcctcccggtgtacaccccgggactgagccgggcctgagccgggccttgtcgcagcgcaggacgggcgcgctgcgtgtgggacccgccgcggcctcaacccgggtccgcggggcacccgccggatgcgcagcctggcctctactacagcgccaacgagcagtgccgcgtggccttcggccccaaggctgtcgcctgcaccttcgccagggagcacctggtgagtctgccggcggtggcctgggattggctgtgaggtccctccgcatcacccagctcacgtcccccaaaacgtgcatggtgagaacctgctgggtgccgtgctaggctgaggtactaagccagggcggcttagtttaatgctgtctgtgccctctagaaattatttaaaatgtttgaacaaaagctccaacatttttgtttgactgggccccacaaattatgtagctagtcctgggagggcccctgtgcccaaggactcctggctgagtgaggacaccaatcttaaacagttaccaaggacttccccatctattgtggctggagtcagactggagggcttcctggaggaagtggcctctaaactgaacccacagcagaagtggggctggtagggggaggggagatgaaggagagcaggcaccccaaaagacagacttcctcgcaggattgcataggacattcatgggctccaggcacttttgccttgatgggccccttcctccacaaaaaaattgagaattatgttttaatattcttatacaatgtataaagttttatgtgttactataaatacaagtctttttttttcctatttttttttttttttgagacagagtctccctctctgctcactgcaggctccgcctgccagattcacaccattctcctgcctcagcctcccgagtagctgggactacaggcgcccgccaccacgcctggctaattttttgtatttttagtagagacggggtttcactgtgttagccaggatggtctcgatctcctgacctcgtgatccgcccgccctggcctcacaaagtgctgggattacaggcatgagccacagcgccccgccaagtctttttttttaaattcttttgagacagggcctcgttctgttgcccagggtggagtgcagtagcacaatcatagctcactgttgcctcaacttcttgggcacaaacgatcctcccacctcggccttggagtagctgggactacaggcacatgccacaatgcccagctaatttttaaattttttgtagagatggggtctccctttgttacccaggcttgtctaggactcctggcttcaagccatcctcccaccttggcgtcccaaagcactgggattacagacatgagccaccacccacgcctgatcagcaaatctattaatattatatattacaacattaattttgacctggaagttcattttttcatttttttttttttttgagacagagtctcactctgtcacccaggctggagtgcagtggcacaatcttggcttactgcaacctccgcctcccaggttcaagtgattcccgggcctacgcctcccgagtagctgggactacaggcatgtgccaccatgcccagctaagttttgtattttttagtagagacagggtttcatcatgttggccgggctggtctcgaattctgacctcaggtgatccgcccgccttggcctcccaaagtgctgggattacaggataagccaccacacccagcctagttcatttttttcttctgattttattttatttatttatttattttgagacggagtctcgctctgtcacccaggctggaatgcagtggctcaatcttggctcactgcaagctctgccttcagggttcaagccattctcctgcatcagcctcccgaatagctgggactacaggtgcctgccaccacacccggctaattttttgtatttttagtagagatggggtttcactgtgttagccaggatggtctcgctctcctgacctcgtgatttgcccgcctcggccttccaaattgctgggattacaggcgtgagccacagtgcccggcctttttccttctgattttaaaagaaattaggccaggtgtggtggctcacgcctgtaatcccagcactttgggaagccaaggcaggcggatcacctgaggtcgggagtttgagaccagcctgaccaacatggagaaatgccatctgtgctaaaaatacaaaaaattagccgggcgtggtggcgcatgcctgtaatcccagctactcggaaggctgaggtaggagaattgcttgaacccaggaggcagaggttgaggtgagccaagatcgcgccattgccctccagcctgggcaacaagagcgaaactgtctcaaaaaaaaacaagaaagaaaaataaattaaaacatttgcctcttgagcttcaagtcagtgacaagttaagaaggaaaaaaagaaaaaagacacaaaaaacacatttccatgggcccccaaaagtgtgacaggacctggtcatggtcccggttccccatcgatgggtcagtcatgccttgtcctctgagggcaccagtgcccacggtgcagagtgttggctgtgtcagtgtgtcctgcagtctgggagggacagttaaggttggacactggcctggaaggccctggtggcccctgagctcgccacccacctgtccaccctcctaggatatgtgccaggccctctcctgccacacagacccgctggaccaaagcagctgcagccgcctcctcgttcctctcctggatgggacagaatgtggcgtggagaaggtcagagccaagagtgaatgagtgggctcctgtgagcacgtgcacgtgggtgcctccagccaggccgccctattcctaggtcaggaggcaggaccagtatggggcagagagtcttggagttggccttggggactgtcctttgggttggtggtctgacctctttcctttagcatttgctcccatgcagaatgggaatgtgggctgcctgttgtatggggggtgcccatgggtgtggggttcctttgggtggggtccctgtgtgaaggtccttgtggatatggggtgtctcgggggggatccctgtgtaaggggtccctgtgagtgtagagtccctgtgggtggggtccttatgtgtgtgttggaggatccctgtgtgttgaggggtccctggggggttctgtgtgtatgttggggggtctctgggtgttggaggatccctgtgggtctgggggatccatgtggctggggtacctgtgtgttggggggtctctgtgtgtgttggagatccctgtgtgttgggggatccctatgggtgagttccttgtgtgtgtttgggggtcgctgtgggtggggtccctgtgtgtgttggggatccctgaggatgttgggggactctctgtgtgtgttgggagtcctgtggtggggtcactgtgggatgggagatgaagccatccttgccttgcagtggtgctccaagggtcgctgccgctccctggtggagctgacccccatagcagcagtgcatgggcgctggtctagctggggtccccgaagtccttgctcccgctcctgcggaggaggtgtggtcaccaggaggcggcagtgcaacaaccccaggtaccgcagggagggtgcttttctgtcagggagtgtggccataccatagtccctagttgaaggcagtggtcaccctgctctctcaccctcctgtctgctgggcattttcagacctgcctttggggggcgtgcatgtgttggtgctgacctccaggccgagatgtgcaacactcaggtaggcctgcttcctggggtaggagggggcagctggtggcaccgggccctgggggagccaaagtgaccatctgtggttcacaccaggacacatttgagaaggacattggggccaggtgaggtggcttatgcctgtaatcccagcactttgggaggccaaggcaggtggatcacctgaggtcaggggttcaagaccagcctggccaacatggtgaaatctcgtctctacagaaaatacaaaaattagccgggcgtggtggtgggcgcctgtagtcccagctactcgggaagctgaggcaggagaatcacttgaacccaggaggtagagcttgcagtgagccgagattgggccattgcactccagcctgggcgacagagtgagactctgtctcaaaaaaaaaataaaaattaaaaaagagagagaaggacattgggaccccagttcataaaccaggccagtcctgctgatgcccacagagcccctgaagcgtcccgcctccctccctgagtgccactttgccctccagagcgcatctctgcagggagaacctccccactaggaatacagtgcgctgctgcatgcctgcaaaggaattttttaaatattatttttatttttttagacagagtctctccctgtcacccagactggagtgcagtggtgctatctcagctcactgcaacctctgcctcccaggttcaagcgattctcctgcctcagtctcctgagtagctgggactacaggtgcccgccaccacgcccggctaattttttgtatttttagtagaggaggggtttcaccgtgttagccaggatggccttgatctcctgacctcgtgatccgcctgcctcggcctcccaaagtgctgggattacaggtgtcactgcgcctggccgaaggagtcttttatttataaattgaggtgacattcatgtagcatgaaatcaagcattttaaagtggcaactcagtggcctttagtacactcacaaggttgggcaagtactgcctctgtctagtttcagaacgtttccagtactctggagtactctggagtgaaccccatatggtaggctgtcactccccatttctcctccgccactcagcggccattggtttcccttctgtctctgtggattgacctgttctagacatgccacgtacctgaggccagacaacaggtgtgcttcctgcctgccttcctcccccagcggcacgtccccaaggctcacctgtgttgtagcctgtgtcagcgcctcattcctctttctggctgaatcatattccactgcagggatagaccacattttcatccagtcgtctgctgatggacatctgaggtgttttcaccttttggctcctgtgaacagagccgctgcgaatgtgcttgtacatgtttgaatccctgttttcaattcttttggcagtatgctgaagagcggagttactggatcgtatgggaattgtatgtttgacttttttttttcttttttttttttttgagacagagtcttgctctgtcgccaggctggagtgcagtggtgcaatctcagctccctgcaaccttcgcctcctgggttcaagcgattcccctgcctcaccttccggagtagctgggattacaggcacgcgccaccatgcctggctaattttttgtatttttagtagagatggagtttccaccacgtcagccaggatggtctggatctcctgacctcaggtgatctgcccgccttggcctcccaaactgttgggattacaggcatgagccaccgctcccggcctatgtttgactttttttttttcttatttttttctttctttctttatttttttttttttagagatggagtctcgctctgtcgcccaagctggagtgcggtggcgcgatctcggctcactctaagctccgcctcccaggttcaccccattctcctgcctcagcttcccgaatagctgggactacagacgcccgccaccacgcccggctaatttttttttgtatttttagtagaggcggggtttcaccatgttagccgggatggtcttgatctcctgacctcgtgatctgcctgcctcggcctcccaaagggctgagatcacaggcgtgagccaccgcgcccagcatgtttggcttttaaagaaactgccaaaccgttttccacagtgcctgaactgtttcacattcccaccagcattgcgccagggttccagtttccccacatccgctgcagcacttgctgttttctgttgttgttttttcttttctcttcttttttttttttttttttttaatagagatggggttttgtcatgttggccaggctggtcttgaactccgaccccaggtgatccgcccaccttagcctcccaaagtgctgggattacacgcgtgagccatggcgcccggcctgttttctgttttttgattttggccatctcggtggtatgaaatggtagaaagattctttttacattgagttaaattctatctcctgcttcgatggccctgggtgtgggtttgtccctggctgtattacagttctgcatgtggtgagaccctccctttcctccttctccaaatggaccaccaagacctccccagaccgtgaggggagggtctttggctggagcacagggtggtgggatttcgtggaggcagtgtggtcagtgtggctgtccagggagtcaactccggttatcttctgtcagcccataaaagtccaagacgcctgcctgagtgcagaggcttcggtggtgaggtctttgctccatgctttggttacctgcctctaggtgcactacctaaagaatacacatccccgtccctgttttattgagttcaggccttggaagcagaggctctgagcgtaatgctctttcctggctttcttcttcgttgctgccctgtgttctttacggattccccggggttttcccatcaatagagagaggcaggcacttttgtcaccccagtttacagagcagggaaccgaggcacggcctggagctgaggccacacccacatcttgatcctgtactgtagggtgccatgtagtctcccagtgacaacacccgccccccgccccaccgccatccccctcctctgcctcctcctggccaggcctgcgagaagacccagctggagttcatgtcgcaacagtgcgccaggaccgacggccagccgctgcgctcctcccctggcggcgcctccttctaccactggggtgctgctgtaccacacagccaaggtggggcctgcggagtgtggggttgggggaggagccagccctggagaccctcggacagggcagagtcataggggggttggcctactatccctccagcactgggcaaagtggttcaggctctggcatcccacagaccatggatgacatagtggccaggcctcgctggtagatcaggcactgacatcccatctctgagtctcaatttcccatctgtgaaatggagataatagcagtaggtccctccctgggcgctacaaggattcagggagataatcggaaaatgccaagtgtgttccttggttcatgatactttttttgtgagacagagtcttgctctgtcgcccaggctggagtgcaggggcgtaatctcagctcactgtaacctccgcctctgggattcaagggattcttgcccctcagcctctcgaatagctgggactacaggcttgcactaccatgccggctaatttttttgtatttttagtagagatggggtttcgccatgttggctaggctggtttcaaactcctgacgtcaggtgatccgcctgcctcggcttcccaaagttctgggattacaggcatgaaccattgcgcccagccttggttcctaattcaataccattaattattagattagattaggatcgtgattaggattattgccttaggaggtgggatgtggggaagatagaaacccttgccccagatgcaaaggatgaagctgggtgggggctgggggacttgcccctcctgctcggttcaggacaccctttttcactctgccctcccaggggatgctctgtgcagacacatgtgccgggccattggcgagagcttcatcatgaagcgtggagacagcttcctcgatgggacccggtgtatgccaagtggcccccgggaggacgggaccctgagcctgtgtgtgtcgggcagctgcagggtaggcgtgtgtggacattggcgatggccctggggcctacctgtcctatcggaaggctcctgggggcaggttggtgggtgctggccctgatggagctgcagtgccctctgcaggggagtggtgctggggaaaaggatctggacttggagtcagcctgggttaagggctgcagtgtgaccttgggcaagtcactgagccctctaagcttgcttcctgtgtagatggtggggtgctatagaagtgttgctggttttgtggatcccagaatctcagagctggcagggctgcagagtcattgaggccagcaccctccagtgacacgggccctctgtccttccctttgcatagacatttggctgtgatggtaggatggactcccagcaggtatgggacaggtgccaggtgtgtggtggggacaacagcacgtgcagcccacggaagggctctttcacagctggcagagcgagaggtaggcggcctccctcggggcagaggctgggcttcccccagcctccaagatggccacagcccagagcgttggtgcaggggctgctcaggtcacagggcctgcacactcactcagccctggatgcctcctgtggtgtcagcgtctccctcttccacttcgccacccttctgtggcaggctcaggttttggccttgatgctgctgggactgtggtgcctcagtaatggtcactcactgtagccgtgctgcaaaaaaaacacagacattggccgggcgctgtgctcacgcctgtactcccggcactttgggaggctgaggcgggtggatcacctgtagtcgggagatcacctacagcctggccagtatggtgaaaccccatctctactaaaaatacaaaaattagctgggcatgatggcgggcgcctgtagtcctagctactcaggaggctgaggcaggagaattgcttgaacccaggaggcagaggttgcagtgagccgagatccctctgcactccagcccgggcaacagagtgagacactgtctcaaaaaaaaaaaaaaaaaagtatggacgttgtgcattctgtggcagctaccctcttctctcctgctcaagaaatcccactgagagggacacaagtgaatgagagggttggtagttacatttggaaaatctttgactttggtgtatatatgaggtcaaaaaccatttgcaaatgccagtgcttctatggagagcagagacttgagccctgcctccctctggcttgccccactgtgctggagaaccttggacccggtcccttctcccagccagggcagagccttggcaggtggtcctccagcctgcttttaattgcccccatgacaggggactcactgctgctggagccagccccatggcattgttcaatttttcccgaccagctaagatcagctccctttgtctgtggtgtggtggctgtgaggtccacgcatctctccttcttttcttctttctagaatatgtcacgtttctgacagttacccccaacctgaccagtgtctacattgccaaccacaggcctctcttcacacacttgggtgagttgactggaggactcccacccagttagctagactgcaaaggtgcagagcactgttgccaagatgccctcacttctgacatcacccgcaagttcagggggttccccaaaccaccctcaggcttgatagttgactaggaagactcccagagctcactgagagctgtggcacatggctgcggctccttccagaagaacacaggttagaattgtccaagggaagagatgtaggcagagtctgggagggtccaaccaggaggcctgatgtctcagggatgtgacacccttctagcattggagcgtggccatacgcatggagtattgcccacacagaaagcccactgagtgggagttgagagtttttcctggggtttgagtgcaaagacatgattgactaattggccaggtggatactctcagtctcttggtgacccagcccctatcctaaatcacatagttggtctttctggtacagccagcccctgccctaaaggaggacacttctgcctggtgtgacccgtgtttcctcttggaagccaacagcaaaagctggacttctctttgggcaaggcccgcttctttgctattgagggccacagtgggtctttctggagtgtgtctgcacctaacctttgaagccttggttgccggcacttgccatggggtccctgagccctgagcctgttgagttctgtgcgtgagtgcacttggtcatagcactcaccaggttgtggaaagaggcctagagcctccgctgtggggaagcctctagctcagatgcctgtggctccttagaggagggctggggaccccgggaaggagagtcactgacatgtgcctgtgaggaggatgggtgctcagctccacacagctaacagggctggttccccgacagcggtgaggatcggagggcgctatgtcgtggctgggaagatgagcatctcccctaacaccacctacccctccctcctggaggatggtcgtgtcgagtacagagtggccctcaccgaggaccggctgccccgcctggaggagatccgcatctggggacccctccaggaagatgctgacatccaggtcagcaggagagcctgggggaggccagtgggggcttcttcttgggggctatggctgcttgctcgtttgtctatccatccattccctgattcgttcatttattcattcagcggtcacttacaggggacccactatgtgttgggccctgtgctaggcaaaatgtagctagctcctccaggggcttagggtcccacaaatatccaaatgtgcctgtgcccagagcccgtgggagaaggccctgcagttctgggatcaggtaaggttggagggcccaatgcaggggtccagggctccctgggaaagagtgatggagctgaggtgtcagatgagcagatgttgctgggccaagcagggaaggaagcgtatggctgagggaacagtgtcagtgtgggagggatgaaggaaggtcctactgtgtgggtttgtggggagatgaaggcatggacgcaggtgcagtggcatctggggagtaggccttggtgctgaggaagctgagaacagatgctggctctcactgcttctttggtgcagtgtgtgtgggaaccggaaggccttgttcaggcgtgtcctcagtgacgtgtgctcgcccatgtatgtccccattggtgcttcgctgaggaaggcacgtggagggtggagagacataagcgcaggctgaaacagacctgagaaccttgggagaggggcccagtctcagcggccggagcagcgtcctctgcccctacagcagccagagacaggagggcctcccacagatcaggccaggccgggccaaagcaagcccctgtgagcggcttatcccttctcttcccctgatatggttcccttcctcccctccccttgcctgggacattgtatccagatgctagctgccgagtggctctcccatcatcctctgcagtgtgtaaaaaagcagattcccgggtcctctgcatattccctgaatcaggacttccctgtgttgggcctgagaaaccgcaccgtaaccaacacaggcttgcggcactggccagatgtgggcatcgagggggcaggtgcggaatgtcacctcgccctgggctctggcctccaggctggcctctttcttgggctggtcttgggcacaggacccagttaccctcctgaagagccttaggcccaggaacctgctgaagttcttcctagtgctctccgggccagtcccaagccagtagctggccacaggtccccagggatccagtttcttcctgccgaccctaccacaggtccccagggatccagtttcttcctgccgaccctacgggcctcagctctggctccagaagcactttctgtgctggccctgccctagcccttcttgggctccttagcccagcctaaggtgggcctgcctcctccactgcactttatcctctacccagccagcttagggaaccttctctgtgctgcccaaataccctatcatgtaacccaccaatgacttggtaattacctccccgagccctctatcccaacccactgagagctccttgcagctcagccagtgtcctgtgcactgtgctatccccagagcctggtacaggtcagtgttggtgattgcttcccgttatttttgtctttgttgtttttttagagagggtctcactgttggccaggctggagtgctatgttgcccaggctgctctgaaactcctgggctcaagtgatctgcctgcctcaggctcccaaagttttgggtttacaggcatgagctaccgtgcctggccagtgattgcttgctgaacgaaagattatagggatgcaagaagaagttggaaggcttcccaggggaggtggccatgacagtgaccctcagggaacccactggacaaggcctgaagctctttgtctgcaggtttacaggcggtatggcgaggagtatggcaacctcacccgcccagacatcaccttcacctacttccagcctaagccacggcaggcctgggtgtgggccgctgtgcgtgggccctgctcggtgagctgtggggcaggtgagacctggggaaggctcatccacagcacggcttgcccctgcagggaggcggcctagccctccctcttccctcccagggctgcgctgggtaaactacagctgcctggaccaggccaggaaggagttggtggagactgtccagtgccaagggagccagcagccaccagcgtggccagaggcctgcgtgctcgaaccctgccctccctagtgagtgtggtgctgtctgcgcagctccaagggggagagagggttccgctggggctgctgggctctgtccctggcctatggggcccatgtggcagggccgggctgagctgctcctgtgcaggctctcattacccctgcccacagccctgcaaggggggctctgtgagtgcccccattctgcaggtgaggacactgaggcttggggcagacatggtgacaatgtcagcccagtgggacccacacctgctgccaccttgtctgggccaccgaggcctctcttgagctcaggtactcatggtgagatggaggtgattgcctacctggagggttgtagggagacttgcggagctcctggtgcaaagcccctggctgtcaccacacctgacggggcacactgttagggacgaggccattcctgctgggtgcaggacagggcagctgctcaccagcctgtgattcggttgtcctcaggctcagccgtctggcagcctgggaacacctggagaggctaggctggccgtagtgcccattgcttgtcccagaccgggggagtacatcagcacctgccaccccatcaccccaggccagcctgggacctggccagggtcccgacgctctgtctccttcctcagctgggcggtgggagacttcggcccatgcagcgcctcctgtgggggtggcctgcgggagcggccagtgcgctgcgtggaggcccagggcagcctcctgaagacattgcccccagcccggtgcagagcaggggcccagcagccagctgtggcgctggaaacctgcaacccccagccctgccctgccaggtgagcccagggctaggtggggctgggagagggccttcctggcagagctcgtccctgcgctgagcccccatccttctgagaatcccctcctcctgaggcctccggcggggcctcaccatccagggtgatgggcagtgtcacctggcggttgtaagtgctgctgtcagagttccttactacccaggagagcctgggcccattgtttccctctctgagcttccgagcccctgctctgaaatggggatgccgacctgcctggggagggggggcttcgaggatgaggtcaaactgaacggagtgggagatgtcactttctcatcaccaccatctcccccgtgcccacgtggctgcatctcatcccctcagtgtccaagttgacagtggcttatcatcctgccctgccactaacgagctgagtgacagggcaagtcccctcctctgtgggcttcagttttgcgacctgtccggtgggaggggattggtctggattgttggtggcccactcatagctctggactcctttccccgcctcgtcatccgtggcagacaaaacagtcaccactcttccccgctgaggccagatagggcctcagaatccttctcacacagctctccaggcagccactttagcgcagggctgactcacagctgaaacccattggccacccttgaacctggtgatccaattccatgtggcacctgtttctctgcacctgctatggtgcatggagtcagtgattacctggctggaggtcggcctctgcctctggagagtaggagggatgggttctcttttttttttttattaaaagacagagtcttgttctctcacccaggctggtatgcagtggcatgatcttggctcactgcaacctcctgcctcagcaagtgtgcgccaccaagcccaactaatttttgtattttttgtagaaacagggttttgccatgttgcccaggctggtctccaactcccgggctcaagcagtctgctcacctcagcctcctaaagtgctgagctaccgtgcctggccagggataggttctgtctctgcaccctgggtgcaggtggggtgcctgactgttgagcagcgagtgcttgttgaatgggaacctgctggctgatgaatggggaacccggtgcttcagggagagaccctgagcttcacttctctgtggggctcctctttgggctcctggatgttggggagcaggtccccttcctccctgcccctagcagctgggctataccttcccctgggtggcagaggcagggcctgatgactgtctcatgccatcctcaggtgggaggtgtcagagcccagctcatgcacatcagctggtggagcaggcctggccttggagaacgagacctgtgtgccaggggcagatggcctggaggctccagtgactgaggggcctggctccgtagatgagaagctgcctgcccctgagccctgtgtcgggatgtcatgtcctccaggctggggccatgtgagtgccctgggcatgagggtggctggggctgttgagtcctttacctggctgggagaacgaggagcacccattgccaccgtcctccaggccagagcaagaacaccatccttctgtgggaatgctgtctgagggccacccctgctcagaaaagaagcttagaaagagggctcagggcccctgggaaggctcccattccccttgcaagccgggctgagggaagcatctgaggagagtgtaatgcagctgctgtgcagagaaatgctgccaggctcccgcctggcgtccaggggctggaggctgactggccttgctctctggcctgggtgctggcaaccctcgcccctcatggctggggggattgcagggccaggcatgctcccatgtcccactcttggtccccagctctcggccaggcccacagtgagcactcatgctgctgaggagcctgcaaaggtggggtgtgcagcaaggatacccgctgcgagaccggggagccgatctcgccaagggaggaggggagggagcccctggtgcacacacgccacttcctggtctctctgctgctgcctgagaagatcgagacggggatcgctgggtcctcagaggaggcccagacccaccagcttgttgctattccccacagctggatgccacctctgcaggggagaaggctccctccccatggggcagcatcaggacgggggctcaagctgcacacgtgtggacccctgcggcagggtcgtgctccgtctcctgcgggcgaggtgagggcccccgggatgctcctggggaccagcactcatggtaactctcctgtccacttgcatcttgcctcgttctgaaaagcatttgaggtggattgcagaaaatccagactatatgggaacacgtggtaatacacaaggagactaagcatagtagctgacagccacttcaaatgtgggtgttgattggctgaaaggtaggaaaagacaataacgcccggcagtgtggcacgagagccattccttatggtcctagcagagcggccggggggtccccaattgatgacccgagcagagaaaccttagctttaagatacacagcgttcttctattttcccaatcttgttttattgcagtataacacagatattataaaatttaccatccaaactgtttctccctgtgcaggtcagtggcataaaagcacagtcacattgttgtgcggccatcaccaccaacctctccagaacttttccagtttcgcaaactggagctctgtccctgtgaaacacgaactcccatttccccctccgcagcccctggcaacctccattctcctttctgtctccagattccacaattctagggaccttgtagaagtggaatcatatagcatttgcctttttgttactagttttcactcagcatgatgtcctcacagttcatccatgttgtagcatgtgtgagtgtttccttcttaaggctgaaaaagattccattgtgagtgtatcctttacaggtttatccatttattcatcagtggacacttggcttccttccacactttggctattgtgaataatgcttctgtgaacatgggtgtgcaaatatctgtttgagttcctgctttcagttcttttgggtgtatatctagaagtgtggtagctgggtaagatgagaattctatgtttaatttttgtggaactgctggactgttttccccagtggctgcaccattttacatttccactaatggtgcataagagttccaatgtcctcccatccttgccaacactttttatttctatggttttttttgtttttgtttttgtttttgagacagagtctcattctgttgccgaggctggagtgcagtggcatgatcttggctcattgtaaccttcgcctccggggctcaagtgattctcgtgcttcagcctcccgagtagctaggactataggcgtctgccaccatgcctggctaattttttgtttagtagagatggggtttcaccatgttggccaggctggtcccaaactcttgacctcaggtgatctgcctgccttggcctcccaacgtgctgggattacaggcgtgagcccccacacctggcctatttctgtgttttttttataatggccatcctaatgggcttgagaagacacaccatgttcttaaacgaaaaccctgaccacttgctcagtaaaatgtcagcctgtttaaaaccgagaccaaaaagagatttctttttctctcttttcttttttgagacaaaaaagaaaacctctgtcaccaggttggagtgtagtggcacaatcttagctcactacaacctccaccacctgggctgaagccatcctcccccctcagcctcctgaatagctactataccctgctaatttttgtagttttggcagagatgggatctccctatgttgcccagcctgatctcctgagctcaagcgatccttctgcctcggcctctcaaagtgctgggattataggcatgagccactgtgcccaaccaagagattttttttctttttcttttttttcttttttttgagactaagagttttcctctgtcgcccaggctgaagtgcagtggtgtgatcttggctcactgcaacctccgcctcccatgttcaaacgattctcatgcctcagcctcctgagcagctgggactccagctatgtgccaccacacctggctaattttttgtattttattttattagagagggggtttcgccatgatggccacgctggtctcaaactcctgacctcaggtgatccacccgccttggcctcccaaagtgctgggattacaggcatgagccactgagcctatttcttttgaggatattcctaaaagagagacttgagaaaactggccctaataacatctttatgatagacacaatcagagattttcatattgtgatttttttttcttttttttttttttgagatggagtctcgctctgtcacccaggctggagtccagtggcgcagtcttggctcactgcaacctctgcctcctgggttcaagtgattctccgtctcagcctcctgagtagctgggattacaggtgcgcaccaccacgctcagctaatttttgtatttttagtagagacggggtttcaccatgttggtcaggctcgtctcgaactcctgaccttgtgatccgccgcccaaagtgctgtgattacaggcgtgagccactgtgcctggcccatattgcaattcttataatgcctctcggtcaacaataacagctaccatttgtcaagtgtctactgtgtgccaggcacttgttatcttcccttttaaaaatctttataaatgattctgcaaggtagatgccattatctttttttctaaatctaagattcagagggttaagtcagttgtctgaggtcacacagctggtaagtggcagagccgggattgaaacccatgcgggccttatgtgctagaggtgtccagtgagcctgggctgcagtccttgctgagcctgtcccttggggctctgggtctctgctttgtccacgcaggtctgatggagctgcgtttcctgtgcatggactctgccctcagggtgcctgtccaggaagagctgtgtggcctggcaagcaagcctgggagccggcgggaggtctgccaggctgtcccgtgccctgctcggtgagtgaggggagcaagactgtgtgctggccttctccctgtaagtgggagacccgagccttggctccatgcccggtgacctgcggaggggggcaggtgctgctggctgtgcactgtgtgaggctggaccatggccgccccatccccctgcctcactccaagtgcaggccagagccccggcccagcccctttgaggactgcaacccagagccctgccctgccaggtgggccccttcccaaggagacagggggtgctaggtctgcatcctggctctttcctcacctccaagccagaccttttgaccctcagtgtcctcaccagtgggagcaggtcattttgtgcccccagaagactgggggagtttaatgaaaggattagatgcatgtaaagtacatgctaaatgcaatgagtgtaaaatgcatgctcgatgcaacgcgtgtaaagtacattgcacaggatctgggatgctgtgggtgcacatggttgctggtgcgtttcttcatcgcctgctctttatggagcacctaggccccggggccgtcctggagctaggggacacagcagagaacaaggcagacaaatgtccctgacctcctggagcaaatgcagggggaaagggggacagataataataggacaggcggggaatgcagtttgatggatggtgttcagtgcgatgcagccaaacacagcgggaggggaggaggggagggctggcggggtgggctccagggcggtggtgctgggatcactgttgaagacagacatgcagggcccttgggtgcccggacccctgcccccactgtctctgggatacgacatctgtcgtttgccctcacctttctcttctgtaaaatgggtttgtccaaatgttctgtccactctgccaagcctcttggtgaggacacaagggggcctccagaaagagaacctctccgggcccttcccagcttcctgtctcttcctagtctggggaaatgaaggggagacctggctcccctgggttcccaggccctggggctgtttggggtccctgactccagtttgctccaggtggcagtacaagctggcggcctgcagcgtgagctgtgggagaggggtcgtgcggaggatcctgtattgtgcccgggcccatggggaggacgatggtgaggagatcctgttggacacccagtgccaggggctgcctcgcccggaaccccaggaggcctgcagcctggagccctgcccacctaggtgagtcagccggtgatgggaggggcagctcctggtgtgtgcagatgccaggccaggcgctgtggtgtgtgcctgtaatcgcagctacttggaaagctgaatcaggagaaccacttgagtccaggagtgcaagtccaacctgggcaacacagtgagacctcatctctaaaaaaaaaacaagacggggccaggtgtggtggctcacgcctgtaatcccagcgctatggaaggctgaagcgggtggattacctgaggtcaggagcttgagaccagcctggccaacatggtgaaaccccatctttactaaaaatacaacaattaggctgggcgcggtggctcactcctgtaatcccagcactttgggaggctgaggcgggcagatcacctgaggttgggagttcgagaccagcctgtccaacatacagaaaccctgtctctactaaaaatacaaaattagccgggtgtggtggtacatgcctgtaatcccagttacttgggaggctgaggcagaatcgcttgaaccggggaggccaaggttgtggtgagccaagattacgccactggactccagcctggctaacagcagcaaaactccatctcaaaaaaaaaaaaaaaaaaagaaaacccacaaaaattagcctggcgtggtggtgtgcacctgtcatcccagctacttcagaggcggaggcaggagaatcgcttgaacccgggaggcggaggttgcagtgagccgagatggcgccgctggcactccagcctgggctacagagcgagactccgtctcaaaaacaaaacaacaaaacaaaacaagacggggtggggggctcagtggcccaagagccagtctgtaaggaatagggctacctggcaggctgtgctagttgtgggaggtgaagtttaagcaccatgcaggcagggtgcagtgtggggaggcctgggggacagaggaggcagcatttgagcagaacctaaagctgtgagcaccagcattctgatgtggaagacgggagggatggaggtctccacagggacacacacagccacactaggacacgggacagaatcatgttcaagtccgtggggtccggagcccagtggtaaagggcgaacatttgcctacctcatttacaattctttaatggtttctttttgtaggtttgcatttttagtaaagaaatacttttctatatcatacagaaacgtccagaaaagaatgtaacagacatgtatgttccagcactccagtttaatagatagcatcctactgccatgtttccttcctgtccacttacttttatttatttaatttatttattttgagacggagtctcgctttgttgcccaggcagtgatgcaatcttggctcactgcaacctccgcctcccgggttcaagccattctcctgtctcagcctcccaagtagctgggaatacaggcacccacaaccacacccagctaacttttgtatttttagtagagacagggtttcaccatattggtcaggccgatcttgaactcctgacctcaggagatctgcctacctcagcattccaaagtgctgggattacagatgtgagccatcacacctggccagcctccttagttttaaataaatccagttacagataagatttcacttaaatttaggctggtcatggctcacgcctgtaatctcagcacttcaggaggctgagatgggtggatcatttgagcccaggagtttgagaccagcctggacaacatgccaaaaccttgtctctactataaatacaaaaattagccgggcatggtggtgcatgccagtatccccagctactcgggaggctgaggcaggagaatcacctgaaccttgggaagtcaaggctgcagtgagcagagatcacaccaccactgcatgccagcctgggcaacagcatgagaccctgtctcaaaaaaaaaaaaaaaaaaaaaagattttacttaaatttaaaccctgtactaatctgtgatttatttggagtatgttgcaaagtagggaccaaaggatttttttttttttctaaattgttaactagcatctgttggacaagccctgatgcctccaggtggctccttggtggtattggtgtgtgttagaatctatgtctgggctttctactgggtttttttcttctccttttttttttttgagacagtttttctctgtcacccagggtggggtgcagtggcgcgatctcagctcactgcaacctccgcctcctgggttcaagtgattttcatgcctcagcttcccgagtagctgggattacaggtgcccgccaccacccccaactgattttgtgtttttaatagagacagggtttcactatgttggccaggctggtcttgaactcctgacctcaagtgatctgccaggttctgttttttgtgctttttttttctagctattctcttgcccatacaaaattgttttaaatgttgtagctttataaccatttaacatctgtgtcactagtgtgtcctgatttctttgcctatgctaaagtcccttggctgtgtgtcccatttatttttccacatcacatttagagatgatctgggattttatgggaattgcagggtttttcacactgcacgctgcctgcatggtgcttaaacttcacctcccacacctagcacagcctaccaggtagccctgttctctacagaccacctcttgggccactgagcctcccctcacttttttttagagatggggtctcactatgttgcccagtctggacttgaattcctgggctcaagtgatcctcctgcttcagcctcccgagtagctgggatgcaggcacacactacatgagctctggccatccctctgacgttgctgtagccacgctggcctcattgtcctggaacattccagggatactcccctgacttagggcttctgtgctagctctcgctgcctgatgtcttctgtggatatcctcgaggccctggatatccctcccccaggctcggctcagacaccacaactccaaagtggcccagtgccctccctgagcgtcggtccagaacggcactctcgtccctcctgtgacgctctgcttggcactttgggaggctgaggcgggaggattgcttgagcccaggagttctagaccagcctgggcaacatagtgagaccccgtctctacaaaaaatacaaaaattggctgtgcgcggtggcttatgcctgtaatcccagcactttgggaggcgaaggcgggcagatcacgaggtcaggagatcgagaccatcctggctaacacggtgaaaccctgtctctactaaaaatacaaaaaattagctgggtgtagtggtgggtgcctgtagtcccagctacttgggaggctgaggcaggagaatgacgtgaacccaggaggcggagcttgcagtgagctgagattgtgctactgcactccagcctgggtggttgcagtgagctgagattgtgccactgcactccagcctgggcgatgagtgagactccatctcaaaaacaaaaacaaacaaacaaaaattacaaaaattagccaggcatgatggcacatgcctgtagtctcagctacttgggaggctgaggtgagaggatggcttgaaccctggaggttgaggctgcagtgagccgtgatcacaccactgccctccagcctgggtgacagggcgagaccgtgtctcaaagaaaaccattaaaataaaataaaaaataaaatttctgcgatgcacacgacagcctccacagcaaatcagcatccagttgctcatgccagtgatgccccaatggagaacaatccacgctctgagaggaggtggggtctggtttggttcactgccacctcccagtgtcatgtagaacagtgccaagccgcggaaggcacgggtccaagaggcagcgctgcagggtcatgggggagcacagtattgcgatgaagatcccagctcccttgcaggctgcctgggtttgtgtctgggctctgaagaatgcgggccataattagttattgattgattacagatcaacatgggcagccttcccttgcccaagggaagggaactcggccttcccttgcagaacgtggggtgttgagatctgtctcctgttacccaggggctcgcttcctgttgctgttacttgggtccataggcaacccctggggtgctgacaggtgttctgtgataaaggcgactagagggggatgtgcaattagggaaacaggggcctcttccccctagggccttttggtagctctcctgtggccgtgagccctggccccagacaggaggggctcagtggctgcactttccatcttgcctggccacggaagctgtctaggcaactgtccgagtacacgtgggtggagaggggcctgcgtggggcagtactgtctctggggagacctagcctctctctggggtcttctcttcctgcaggtggaaagtcatgtcccttggcccatgttcggccagctgtggccttggcactgctagacgctcggtggcctgtgtgcagctcgaccaaggccaggacgtggaggtggacgaggcggcctgtgcggcgctggtgcggcccgaggccagtgtcccctgtctcattgccgactgcacctaccgctggcatgttggcacctggatggaggtgagcacagcgggcactcggaatccctatggggctggggtgggcatcagctgtggctcctcatgtgtgagggagtctaggaggcattggctcatcgtgtcccctgaaaggaaggagagagctgcgcccgttggtgagggggcacctagaggcagagagacagagggcctagagacctgcgggcagctaggacttaagaggcccttaggtttggggacgctggaagatgaatggcaggccactcagctctacacagatgagggaatgccagctgtgccacgcacctggcaaggcaggacagacaagggtaaatggggttcaggctgccccctggaggggctcgctcatggtgtggagggggcataggggcacagcagacagagatgagccgcagccccgcagacctgcttgctctaaggcttggagggacagagaggccgtgagggtgacagggacccagacttgaattatggctcctcccacctatatgacccatgcaaggtgccctctctgagcctcagttttctcatctgtggaatggagacacttaactgcctcccagcttgtacaaggattatattggatcactcctggcctgtggttaccactgtccttgtcaccttctggcagggtcagctgtgactcctcctcccctctcttggcagtgctctgtttcctgtggggatggcatccagcgccggcgtgacacctgcctcggaccccaggcccaggcgcctgtgccagctgatttctgccagcacttgcccaagccggtgactgtgcgtggctgctgggctgggccctgtgtgggacagggtacgcccagcctggtgccccacgaagaagccgctgctccaggacggaccacagccacccctgctggtgcctccctggagtggtcccaggcccggggcctgctcttctccccggctccccagcctcggcggctcctgcccgggccccaggaaaactcagtgcagtccagttatgtcctgtcctccttcctgtcaggcagctgctgcaggaggggtgggcaaaggcatcttcctctgggaaggactggcacaagcacttggtccctgggttgtgtgcctgggaggccgggatcagggctggccctctttctccctggcaaagcaaaacctcccttttactactatcaaggggaagtaacttgaaggtaggaacccagcttgtgagccccctagcctctgggctgctctgcatgtgccccctcttgctggatcatctggtagcagccctgtgccctgagggtgatgctctgacctatgcagcccccctccctgtcctgagaaggcttccagctgggccttggaggacagggtccacccctacctcctggtctccttcctcagcttggaagccccggagcctgccctgctgggaatcggggaagcactgcttacctgtctcctgctcccttttcaggtgcctgtggcaggcagcaccttgagccaacaggaaccattgacatgcgaggcccagggcaggcagactgtgcagtggccattgggcggcccctcggggaggtggtgaccctccgcgtccttgagagttctctcaactgcagtgcgggtatgtctagggccatgcaagcgatgctgccagttatgggccctgccaggagccagcacgacgctgcatgccccattcctggcaggagcccatgtgcattcccacctgtagtttgcatcccatctcatgactggggagtgatgatctgcattttacagatgaggaaactgaggctaggagagattaagtgatgtgcccagttacttagagtcacatagccagcagtgggagaggtgggacttgaactcggctcagtctaccctggagccactcctctgctgaccaggcgtgggagtgctggaccctcactgccctgccgcttcctaggggacatgttgctgctttggggccggctcacctggaggaagatgtgcaggaagctgttggacatgactttcagctccaagaccaacacgctggtggtgaggcagcgctgcgggcggccaggaggtggggtgctgctgcggtatgggagccagcttgctcctgaaaccttctacagaggtatggccaggccttctccacctcccttgggtgctccagtcctggcagggaggctgggtgggtgctgctggggatggggccagtcccagtggggcagtgggaagatacggagggaactgactgagatggaaggaactggggttggccagtgtcagtctgcacgtgccagggaggggtcacaggatgaatgctatatccctcctttttgggaccgtgcagcaagatggacggatgtgggacatggtccacatcctcagtcagtccctcaggcctctgccccacacccacctgccccgcccccacccctccagcctttcaagggcttttagggttttgtggaagccactgtccctcagccctgtttcagtgcactggtgtaagcagacatgcttgtacatgcatgtgcacccacaagcacacctcaggcagaggatgccacctcagggactccagccttgcccgtggccccctcgatatcctctgatagccctctcggttgtcctggggggcttgccctctcccaacagcccgagctggccgaagttggcttccctagctggttccagaggttcctcggctcccccaggtgtctggggcttagtggcaacaggggcttagcctctgcagagacctagtgcgccgcctccttgccccagacctgcccgggcagagagccgtgtatgtgtcccagtgcacaggcgctgctgggccctgccaaaaggccacaagcccactgtcaccgttcacattgcttctcgcttcccggcccagccccgcccacacaggcatctgccttgaaagaggtgcaggaggtacaggcaggtgggggctccagtgagctctgaggaacagcagtggccgccatgggtggagcctatctttgttgccagtttcagtgttaaacactcttgcacgtgtgacatcattgagtcctaaagaccactctgctcagtgcatgccattgtttccttcagttacagaggagggaaccagagcccagaacatttagcctttgcctaaagtcactgggccaggaagtggtagaggtggggttcagcaggatttgcctgggaaccccaatattgaccacagtgccatgctgccctgcacggctccctggctgtgagttgtcctggcctctggcaccaccggtctgtctgggttcctatgtccctatgtcccacctgcagaatgtgacatgcagctctttgggccctggggtgaaatcgtgagcccctcgctgagtccagccacgagtaatgcagggggctgccggctcttcattaatgtggctccgcacgcacggattgccatccatgccctggccaccaacatgggcgctgggaccgagggagccaatgccagctacatcttggtgaggcccagcatggggacttgtgctgtgattctggacagctttccctagggcgtgcagggctaggggacccccttcagtttatttcagactaaaaccctcaaaatcattagtgaaagaatgggagaagatagcttcctccacatattcaccaagaaatgttttttgagctacctacaagagtgaaatagtggctcacaactgtaatcccagcactttgggaggcccaggagggcagatcactcaaggtcaggagttcgagaccagcctggccaacatgatgaaaccttgtctctactaaaaatagaaaaagtagccaggcatggtggcgtgtgcctgtaatcccagctacttgggaggctgaggcacaagaatcacttgaacccgggaggtggaggttgcactaagcccagatcgcaccactgcactccagcctgggcaacagagtgagactctgtctcaaaaaaaaaaaaaaaaaaaaagcgaaatggtaaagaatggtaaagacctttctgatgtagactgacagctaacccaagactgaagcataattttacagtctgatataacttggacagaatagcaccctgcaccctccccgaggtttcaagtgtcctgggagaactgtgttctgcagggtatcagcttccccagaggaggcagcctggccccgctctggcaccctgactgtgtgtccttggggaagtgatgtaacgtccctggacctcggttttctgggtagagtaatggcgtattcctagtagggctttgtaagcattaaatgtgatccggaatctgtgagcccttgcacacgaaggcttccgtgagtgctaattattacttgtggccggtccttctgggctgccccttttctctcagatccgggacacccacagcttgaggaccacagcgttccatgggcagcaggtgctctactgggagtcagagagcagccaggctgagatggagttcagcgagggcttcctgaaggctcaggccagcctgcggggccagtactggaccctccaatcatgggtaccggagatgcaggaccctcagtcctggaagggaaaggaaggaacctgagggtcattgaacatttgttccgtgtctggccagccctggagggttgacccctggtctcagtgctttccaattcgaactttttccaatcttaggtatctactttagagtcttctccaatgtccaaaaggctagggggttggaggtggggactctggaaaagcagcccccatttcctcgggtaccaataaataaaacatgcaggctgaccggcgtttttttctt

SEQ ID NO: 15387 - DNA, 37387 bp, Homo sapiens
aaccacgatgtctttggcacagcctctcatctgtcagatgggagcggggaccccggagagggagtcagccgaggtcctggcattccttgtgaacccccgtctgtgggtttctggtccagtgtcccttctccagattagatggcttaggcctcctctaagggggtgggcgtgcacatccggagagctgtctggtgtgcaggactgggctgcaggttaccctgaactgcaaccatcttagagcaaggcccagcttgcagcaggaggagctgcaggccgcccaccctagccacggcccctgccctggcaggaagcttccaagagtaaacactgcctaatcgtcccgcccagtagtgagcaggcctgtcccattccatactgaccagattcccagtcaccaaggccccctctcactccgctccactcctcgggctggctctcctgaggatgcaccagcgtcacccccgggcaagatgccctcccctctgtgtggccggaatccttgcctgtggctttctcctgggctgctggggaccctcccatttccagcaggtgggctcatttgcaggagcgggggtattctgggagcctctgggtggggtattctgagctacctggggcgaggggagtgccaaatagctgactacatcagctttggggtttgcgctgggcaggggagtctgtacttggggctttgggggatgaagtgtgctcactgaagagggagttggtgtctcagtacgacctgctcattcggtgaagctgaacagacagatactagtttgtcccaaactgtgtaggttgctcttctctgcctctcccttcctctccctgtctctgatttccccctctccttcttggttggcctcacccacctcctgcctcctgtctccctcttcatccatctctttttgttcttttttctttctctctctctctttttttttttttttttttttttaagacatggggtcttgttatgttgccccagctggtctcaaactcctggactcaagtgatcctcccacctcggtctccccaagtgttaggattacaggccagagccactatgcccggccccatccatctctttttgtcttgcagagttgtcttcaggctttggagccacaggccgtgtcttcttacttgagccctggtgctcccttaaaaggtacttgtcctggtgtcttctctcccggggggagtttctcaggactttcaaggggtatctcaccactgagtcagtggtctgggatttttggtggatctggaaggagaaggtcagagaagctgctgtcaaccctgttaattaactctgttacttcctgccaagttgatataagctggtctgggtgttccagccaggccagggttctcaccctagcttctgttaaatatcacaagggaacggtcaccgattggctggcccctcctgccccatggcctctgctgagctggctgattttcaggagctcttgtggtttctgaccgtggatgtaaatatttattccttctgtgggaaacaagataggtactggctcaggctacctcctaaggccatggatttccttatgataaaggcctgtccccattgcccacaggcccatgtctgtgaccttctccggtgcgagcccccttcccagtagggccattggcaacttgactaatggctgatgggggccagaggcaggtgggctagtggtcaggggcaacaggagggcaaggcccactttgtgacctggttctttgtggtctaggccagaggcacactgaccagtgcctggggccacgctgggggctggatgcagccgacgctgtctgggtatcccatagcctgggtccttccagcgctgccgctcctgaaaggctgggagatcattgcccagggtccctgaccctctaagggctcccttgggagaggacagtgagggctggcctgggcccctgcttcccaagagaccactgggctccactcgtgttcagtttcctgtcggggtccatgatgttacttgtgaaacacctgtgcccagagcagggtccaggaggcagggcaggggctttcccctttgggcagagccaccagggcagtgggaatcttgtcttgatggggtgacccaaagcacacaatagcccaacagctcctcctgggccctgccctttgcgtgcctagtcactaatggggtctggctcttggggtgggggtgacacgcaatgtcttgacttcggaaggccatccttccaagacctgccagcccctttcctgttagctttccactgcttgctctctagaaccatcgccctctgctctccctctccccctccaggccgccctccttcccctggcttccagaggcagaggcagaggcagaggcgggctgcaggcggcatcctacacctggagctgctggtggccgtgggccccgatgtcttccaggctcaccaggaggacacagagcgctatgtgctcaccaacctcaacatcgtgagtgccccacgctggactgtgcaggtccccacggccagggctggtgaccaatgtctgtgggctggtgtatctggtagtctgaatacagtgggttaaactcaggtagaatggctcggggttcttcctcttctccctccctcccctgggtggaggtgggtgaggtcccacaccctctctaggctccatggcacatgcacaccctgcagcctctcactactcaagtcccttcacctggggccaccctcaagcctggcctcttccccagtatccatttgacccccacaaagctcagctaaagcaaccctggcaaatgggatacgggctgctcacactgccctctgcaccccgaccctgccctctctccattctcttgtcccccgctcagagtggcgaggacaggtcacccgtctgaagtctaaacagagactgctggcaaaggagatgcccaccttcatttcttgctagcacctgaatccctgcagccccccttcacttgaaagctggggaagggcgggcagggaagcactcccccactagccgccgtctcagaaagacaaacaaggccaggcgcggtggctcatgcctataatcccagcactttgggaggccaaggcgggtggatcacccgaagtcaggagttcaagaccagcctggccaacatggtgaaaccccgtagctactaaaaatacaaaacttagctgggcatggtggcaggcgcctgtaatctgagaggagcctgcgatctgagaggagcagcgtttgaccggaatatccgactcgtgaccatctgtgtgctctcatccccttgctttggagtttgttttccttgcgttagttggccttcctgagccatgagctgaggagcaacagaggcacggctgactgtgcagcacattttaggagccccccgccccgcccggttcccacacatgctggtggagtagcctctccagctcttcacactccgggggcccctgggagtcagcagctgcctggggctggcaatgcccacccgacgggttacctctctcatctgcccttgcacagggggcagaactgcttcgggacccgtccctgggggctcagtttcgggtgcacctggtgaagatggtcattctgacagagcctgaggtaggcatggagctggaactcagcacaccatacagagcgggaagcccaagtcatcgcatctccatcctctttaacctcttgtcccggatgccccaagcagcatggatcacagaatgcattcagccagacagaccagctgccctcccagctctacccagcactcagcacaggctgcctgactacttctctgagcctcagttgtctcatccctaacacgggctagtcatagggttgttaggaggactaactgggaaacaaaccgaccgcagtcagcaccgtgcctggttggggtgtcctaaatgcaggctttgctgtgggtccgcagggtgctccaaatatcacagccaacctcacctcgtccctgctgagcgtctgtgggtggagccagaccatcaaccctgaggacgacacggatcctggccatgctgacctggtcctctatatcactaggtagccgagctttctgatgggtgctggccagccagcctgggaaggctgctccctcagcctcctgccctctgcaaaggtgaccccagggcaggcacgtgccttggcaccacccaagtgactgttttctctcaccgaggtttgacctggagttgcctgatggtaaccggcaggtgcggggcgtcacccagctgggcggtgcctgctccccaacctggagctgcctcattaccgaggacactggcttcgacctgggagtcaccattgcccatgagattgggcacaggtatgtagccccaccagctgtccccaggatctggcaaggagctgacctgggtacccagggtggaggtggtcttggcaagcagtgggtccttgtagagtttctccagaggagcctgtacccctcaccccgacagactcaggtgtgaggacaggggaacctgatactgtttgattaaaagaactttttttccaaaagacgagcaagacacctttagcaggtagaaaataacttctgtagaaaattcaggtaaagaaagagcaggctgtaaaaattatctcaaatcccaccatttagagataatgtctcttcacattttgtatttaatttcagtcttttctttacatacacacacatatttcttatttgcaaaattgggatttagtttggatccctgaaaaaaaggaaaattgtgattatgctgtgcattgctttgttacctgctatttctttttcttttcttttcttttttttttttgagatgaagtttcgctcttgttgcccaggctggagggcaatgacgtgatctcagctcattgcaacctccacctcctgggtgcaagtgattctcccacctcagcctcccaagtagctgggattacaggcatgtgccaccacgcccagctaattttgtatttttagtagagacagggtttctccatgttggtcaggctggtctcgaactcccaacctcaggtgatccacctgcctcggtctcccacagtgctgggattacaggcgtgagccactgcatccagcctttcttttttcttcctagggtaagtgcaggatttacctgttctttatgtaataatatatcccaaacattatcccaggtatcttagaggtgtgcaccgtaatttatttaatcagtcccctcttcttggatgtctaggttgtctgaacacgtcttcctgttgtgaatgttatgcattcttgtgggcaaaccttcactcttacctataaccatttacctagagtgatgggtttcttttcatttctttagttttttaagtatgaaaataatacccaattgttgtaaaaattcaaacagtgcagagatttctaaagtaaaaagtgaatttccacattccttgcccaccaacccccacccgacccctttcaacccctctgagcctgggagggttgaggcagggttcctgggtgtgggacaaggcagggctccttctccctcagagggagcatagttcccttctgctcctgtgatgcagaagacgtgagcccccaaactggggcttagcctgggagggttcttggcttcaccgaggaaagaattcaagagggagcaggtggtgttagacagcaactttgattgatgtggcagtgggcagagtgtacagccctgtgactgtatacagcacagcatagccccttttgaagccaggctaccccatagacactgtgcccaaaagagcagctcaaaggcagggctgcagtcctagttaatacccacttctaattatatgcaaattaaggggccagattatgcagaaatttctagaaaaagggcagtaacttctaggttttcgtcatggaaaaggggcagtaacttctgggttttgccatggcaatggcaaactggtatggcacactggtgggcgtgtcttatggaaaggggcttcccacccctccctgttttagctagtcctctggtccagtgtccaagcggggcctccagagtggagtccacctcctacctcaccggtgcctggcctctcccaccccattaggagtcctccatcagttccgctttgggtaaagcaagctctgttgtgacagtttggaaacggttcaccttcctggcctaggaatgcaaacaatggccaagggcaagcacgttttaactgaactttaaaatcgtgctttcctcacagtaggtgaatttcacgctcaacacatccatgtaaacagtccccagagcagcccttcaaggccccggccagtccccacctccccacagactcctaacaccatgatttaatgtggcttgcacatttttaaaggcttttgatatttattagcaaaagatgcgagagccaccctgctgggctagcgctcccttctgggggaaactgaggcagggcgcacgcgaccctctccactgcgcccagttagcagatggcggcgtcaggggtcgacccgggtcggaaaactcgctggcgctgcggcactagggcgccgggccgctgactcgccgacccccgtcccgcccccacccccgcccccgcccctgccggccgccttagcgcaactccccgccccccgaccagcttcggcctggagcacgacggcgcgcccggcagcggctgcggccccagcggacacgtgatggcttcggacggcgccgcgccccgcgccggcctcgcctggtccccctgcagccgccggcagctgctgagcctgctcaggtagcggccgccccgtgggaggggcgcgcgagcctccagccagcccgctgggccgccagcgccacctctctctacgtccgtccccactccgcattcagccctccttcctgtcccacccctccgtccaacccacccctccgtccaaccccgcgcccaccgctccgtccgtggaggggcgggcgcgcgagcctccagccagcccgctgggccgcccgcgccacccctccctacgtccgtccccacctctccctacgtccgtccccactccgcattcagccctccttcctgtcctacctctccatcctgacccactcctccgtccaaccccgcgcccacagctccgtcccatcccgctgcgcccactcctgcgcccacccctccgtcccaacccctgcacccacccccccgtcccacccacctgccccaccccctgcacctccccccgtgctgtcccactctgcggccacccttctgtccaacccctgcgcccaccgctccgttccaccccctccctgcgcccacccctgcgtcctccctcgcccccttgcgcccacactttcgttccagccaatctgggcacgcacccctccgtccatccccatcccgccccttgactccacatacactccctggttctctcccacttgcctacacccacccctgcatcctaccctcctccatccacccctccatctcagccccctgcacccaccccgttcctgggcccaccctgttcctgcacccaccccctcacttcacccccttacccttcgtctgcctccacccgcccctacccctccgtccactctccacgctccatcagtcccacacccctatctcccccacccgcgtacatgtatccctgcgtccccttcccgccgaccgcaccgctcccgggcctaacctgcatctgctccatcccactcagacccgtccctccgtcgccgctccctctgctggccacccacctctgcgccggcaggagccttagtcttggtcccagccaagagccggctcctggtggggggcgcgggccgagaactcctgttcccactcacaaaaggccacgcttccaaacgcttccatcctcgtgcccactcctccgtcccgcctcctcccggtgtacaccccgggactgagccgggcctgagccgggccttgtcgcagcgcaggacgggcgcgctgcgtgtgggacccgccgcggcctcaacccgggtccgcggggcacccgccggatgcgcagcctggcctctactacagcgccaacgagcagtgccgcgtggccttcggccccaaggctgtcgcctgcaccttcgccagggagcacctggtgagtctgccggcggtggcctgggattggctgtgaggtccctccgcatcacccagctcacgtcccccaaaacgtgcatggtgagaacctgctgggtgccgtgctaggctgaggtactaagccagggcggcttagtttaatgctgtctgtgccctctagaaattatttaaaatgtttgaacaaaagctccaacatttttgtttgactgggccccacaaattatgtagctagtcctgggagggcccctgtgcccaaggactcctggctgagtgaggacaccaatcttaaacagttaccaaggacttccccatctattgtggctggagtcagactggagggcttcctggaggaagtggcctctaaactgaacccacagcagaagtggggctggtagggggaggggagatgaaggagagcaggcaccccaaaagacagacttcctcgcaggattgcataggacattcatgggctccaggcacttttgccttgatgggccccttcctccacaaaaaaattgagaattatgttttaatattcttatacaatgtataaagttttatgtgttactataaatacaagtctttttttttcctatttttttttttttttgagacagagtctccctctctgctcactgcaggctccgcctgccagattcacaccattctcctgcctcagcctcccgagtagctgggactacaggcgcccgccaccacgcctggctaattttttgtatttttagtagagacggggtttcactgtgttagccaggatggtctcgatctcctgacctcgtgatccgcccgccctggcctcacaaagtgctgggattacaggcatgagccacagcgccccgccaagtctttttttttaaattcttttgagacagggcctcgttctgttgcccagggtggagtgcagtagcacaatcatagctcactgttgcctcaacttcttgggcacaaacgatcctcccacctcggccttggagtagctgggactacaggcacatgccacaatgcccagctaatttttaaattttttgtagagatggggtctccctttgttacccaggcttgtctaggactcctggcttcaagccatcctcccaccttggcgtcccaaagcactgggattacagacatgagccaccacccacgcctgatcagcaaatctattaatattatatattacaacattaattttgacctggaagttcattttttcatttttttttttttttgagacagagtctcactctgtcacccaggctggagtgcagtggcacaatcttggcttactgcaacctccgcctcccaggttcaagtgattcccgggcctacgcctcccgagtagctgggactacaggcatgtgccaccatgcccagctaagttttgtattttttagtagagacagggtttcatcatgttggccgggctggtctcgaattctgacctcaggtgatccgcccgccttggcctcccaaagtgctgggattacaggataagccaccacacccagcctagttcatttttttcttctgattttattttatttatttatttattttgagacggagtctcgctctgtcacccaggctggaatgcagtggctcaatcttggctcactgcaagctctgccttcagggttcaagccattctcctgcatcagcctcccgaatagctgggactacaggtgcctgccaccacacccggctaattttttgtatttttagtagagatggggtttcactgtgttagccaggatggtctcgctctcctgacctcgtgatttgcccgcctcggccttccaaattgctgggattacaggcgtgagccacagtgcccggcctttttccttctgattttaaaagaaattaggccaggtgtggtggctcacgcctgtaatcccagcactttgggaagccaaggcaggcggatcacctgaggtcgggagtttgagaccagcctgaccaacatggagaaatgccatctgtgctaaaaatacaaaaaattagccgggcgtggtggcgcatgcctgtaatcccagctactcggaaggctgaggtaggagaattgcttgaacccaggaggcagaggttgaggtgagccaagatcgcgccattgccctccagcctgggcaacaagagcgaaactgtctcaaaaaaaaacaagaaagaaaaataaattaaaacatttgcctcttgagcttcaagtcagtgacaagttaagaaggaaaaaaagaaaaaagacacaaaaaacacatttccatgggcccccaaaagtgtgacaggacctggtcatggtcccggttccccatcgatgggtcagtcatgccttgtcctctgagggcaccagtgcccacggtgcagagtgttggctgtgtcagtgtgtcctgcagtctgggagggacagttaaggttggacactggcctggaaggccctggtggcccctgagctcgccacccacctgtccaccctcctaggatatgtgccaggccctctcctgccacacagacccgctggaccaaagcagctgcagccgcctcctcgttcctctcctggatgggacagaatgtggcgtggagaaggtcagagccaagagtgaatgagtgggctcctgtgagcacgtgcacgtgggtgcctccagccaggccgccctattcctaggtcaggaggcaggaccagtatggggcagagagtcttggagttggccttggggactgtcctttgggttggtggtctgacctctttcctttagcatttgctcccatgcagaatgggaatgtgggctgcctgttgtatggggggtgcccatgggtgtggggttcctttgggtggggtccctgtgtgaaggtccttgtggatatggggtgtctcgggggggatccctgtgtaaggggtccctgtgagtgtagagtccctgtgggtggggtccttatgtgtgtgttggaggatccctgtgtgttgaggggtccctggggggttctgtgtgtatgttggggggtctctgggtgttggaggatccctgtgggtctgggggatccatgtggctggggtacctgtgtgttggggggtctctgtgtgtgttggagatccctgtgtgttgggggatccctatgggtgagttccttgtgtgtgtttgggggtcgctgtgggtggggtccctgtgtgtgttggggatccctgaggatgttgggggactctctgtgtgtgttgggagtcctgtggtggggtcactgtgggatgggagatgaagccatccttgccttgcagtggtgctccaagggtcgctgccgctccctggtggagctgacccccatagcagcagtgcatgggcgctggtctagctggggtccccgaagtccttgctcccgctcctgcggaggaggtgtggtcaccaggaggcggcagtgcaacaaccccaggtaccgcagggagggtgcttttctgtcagggagtgtggccataccatagtccctagttgaaggcagtggtcaccctgctctctcaccctcctgtctgctgggcattttcagacctgcctttggggggcgtgcatgtgttggtgctgacctccaggccgagatgtgcaacactcaggtaggcctgcttcctggggtaggagggggcagctggtggcaccgggccctgggggagccaaagtgaccatctgtggttcacaccaggacacatttgagaaggacattggggccaggtgaggtggcttatgcctgtaatcccagcactttgggaggccaaggcaggtggatcacctgaggtcaggggttcaagaccagcctggccaacatggtgaaatctcgtctctacagaaaatacaaaaattagccgggcgtggtggtgggcgcctgtagtcccagctactcgggaagctgaggcaggagaatcacttgaacccaggaggtagagcttgcagtgagccgagattgggccattgcactccagcctgggcgacagagtgagactctgtctcaaaaaaaaaataaaaattaaaaaagagagagaaggacattgggaccccagttcataaaccaggccagtcctgctgatgcccacagagcccctgaagcgtcccgcctccctccctgagtgccactttgccctccagagcgcatctctgcagggagaacctccccactaggaatacagtgcgctgctgcatgcctgcaaaggaattttttaaatattatttttatttttttagacagagtctctccctgtcacccagactggagtgcagtggtgctatctcagctcactgcaacctctgcctcccaggttcaagcgattctcctgcctcagtctcctgagtagctgggactacaggtgcccgccaccacgcccggctaattttttgtatttttagtagaggaggggtttcaccgtgttagccaggatggccttgatctcctgacctcgtgatccgcctgcctcggcctcccaaagtgctgggattacaggtgtcactgcgcctggccgaaggagtcttttatttataaattgaggtgacattcatgtagcatgaaatcaagcattttaaagtggcaactcagtggcctttagtacactcacaaggttgggcaagtactgcctctgtctagtttcagaacgtttccagtactctggagtactctggagtgaaccccatatggtaggctgtcactccccatttctcctccgccactcagcggccattggtttcccttctgtctctgtggattgacctgttctagacatgccacgtacctgaggccagacaacaggtgtgcttcctgcctgccttcctcccccagcggcacgtccccaaggctcacctgtgttgtagcctgtgtcagcgcctcattcctctttctggctgaatcatattccactgcagggatagaccacattttcatccagtcgtctgctgatggacatctgaggtgttttcaccttttggctcctgtgaacagagccgctgcgaatgtgcttgtacatgtttgaatccctgttttcaattcttttggcagtatgctgaagagcggagttactggatcgtatgggaattgtatgtttgacttttttttttcttttttttttttttgagacagagtcttgctctgtcgccaggctggagtgcagtggtgcaatctcagctccctgcaaccttcgcctcctgggttcaagcgattcccctgcctcaccttccggagtagctgggattacaggcacgcgccaccatgcctggctaattttttgtatttttagtagagatggagtttccaccacgtcagccaggatggtctggatctcctgacctcaggtgatctgcccgccttggcctcccaaactgttgggattacaggcatgagccaccgctcccggcctatgtttgactttttttttttcttatttttttctttctttctttatttttttttttttagagatggagtctcgctctgtcgcccaagctggagtgcggtggcgcgatctcggctcactctaagctccgcctcccaggttcaccccattctcctgcctcagcttcccgaatagctgggactacagacgcccgccaccacgcccggctaatttttttttgtatttttagtagaggcggggtttcaccatgttagccgggatggtcttgatctcctgacctcgtgatctgcctgcctcggcctcccaaagggctgagatcacaggcgtgagccaccgcgcccagcatgtttggcttttaaagaaactgccaaaccgttttccacagtgcctgaactgtttcacattcccaccagcattgcgccagggttccagtttccccacatccgctgcagcacttgctgttttctgttgttgttttttcttttctcttcttttttttttttttttttttaatagagatggggttttgtcatgttggccaggctggtcttgaactccgaccccaggtgatccgcccaccttagcctcccaaagtgctgggattacacgcgtgagccatggcgcccggcctgttttctgttttttgattttggccatctcggtggtatgaaatggtagaaagattctttttacattgagttaaattctatctcctgcttcgatggccctgggtgtgggtttgtccctggctgtattacagttctgcatgtggtgagaccctccctttcctccttctccaaatggaccaccaagacctccccagaccgtgaggggagggtctttggctggagcacagggtggtgggatttcgtggaggcagtgtggtcagtgtggctgtccagggagtcaactccggttatcttctgtcagcccataaaagtccaagacgcctgcctgagtgcagaggcttcggtggtgaggtctttgctccatgctttggttacctgcctctaggtgcactacctaaagaatacacatccccgtccctgttttattgagttcaggccttggaagcagaggctctgagcgtaatgctctttcctggctttcttcttcgttgctgccctgtgttctttacggattccccggggttttcccatcaatagagagaggcaggcacttttgtcaccccagtttacagagcagggaaccgaggcacggcctggagctgaggccacacccacatcttgatcctgtactgtagggtgccatgtagtctcccagtgacaacacccgccccccgccccaccgccatccccctcctctgcctcctcctggccaggcctgcgagaagacccagctggagttcatgtcgcaacagtgcgccaggaccgacggccagccgctgcgctcctcccctggcggcgcctccttctaccactggggtgctgctgtaccacacagccaaggtggggcctgcggagtgtggggttgggggaggagccagccctggagaccctcggacagggcagagtcataggggggttggcctactatccctccagcactgggcaaagtggttcaggctctggcatcccacagaccatggatgacatagtggccaggcctcgctggtagatcaggcactgacatcccatctctgagtctcaatttcccatctgtgaaatggagataatagcagtaggtccctccctgggcgctacaaggattcagggagataatcggaaaatgccaagtgtgttccttggttcatgatactttttttgtgagacagagtcttgctctgtcgcccaggctggagtgcaggggcgtaatctcagctcactgtaacctccgcctctgggattcaagggattcttgcccctcagcctctcgaatagctgggactacaggcttgcactaccatgccggctaatttttttgtatttttagtagagatggggtttcgccatgttggctaggctggtttcaaactcctgacgtcaggtgatccgcctgcctcggcttcccaaagttctgggattacaggcatgaaccattgcgcccagccttggttcctaattcaataccattaattattagattagattaggatcgtgattaggattattgccttaggaggtgggatgtggggaagatagaaacccttgccccagatgcaaaggatgaagctgggtgggggctgggggacttgcccctcctgctcggttcaggacaccctttttcactctgccctcccaggggatgctctgtgcagacacatgtgccgggccattggcgagagcttcatcatgaagcgtggagacagcttcctcgatgggacccggtgtatgccaagtggcccccgggaggacgggaccctgagcctgtgtgtgtcgggcagctgcagggtaggcgtgtgtggacattggcgatggccctggggcctacctgtcctatcggaaggctcctgggggcaggttggtgggtgctggccctgatggagctgcagtgccctctgcaggggagtggtgctggggaaaaggatctggacttggagtcagcctgggttaagggctgcagtgtgaccttgggcaagtcactgagccctctaagcttgcttcctgtgtagatggtggggtgctatagaagtgttgctggttttgtggatcccagaatctcagagctggcagggctgcagagtcattgaggccagcaccctccagtgacacgggccctctgtccttccctttgcatagacatttggctgtgatggtaggatggactcccagcaggtatgggacaggtgccaggtgtgtggtggggacaacagcacgtgcagcccacggaagggctctttcacagctggcagagcgagaggtaggcggcctccctcggggcagaggctgggcttcccccagcctccaagatggccacagcccagagcgttggtgcaggggctgctcaggtcacagggcctgcacactcactcagccctggatgcctcctgtggtgtcagcgtctccctcttccacttcgccacccttctgtggcaggctcaggttttggccttgatgctgctgggactgtggtgcctcagtaatggtcactcactgtagccgtgctgcaaaaaaaacacagacattggccgggcgctgtgctcacgcctgtactcccggcactttgggaggctgaggcgggtggatcacctgtagtcgggagatcacctacagcctggccagtatggtgaaaccccatctctactaaaaatacaaaaattagctgggcatgatggcgggcgcctgtagtcctagctactcaggaggctgaggcaggagaattgcttgaacccaggaggcagaggttgcagtgagccgagatccctctgcactccagcccgggcaacagagtgagacactgtctcaaaaaaaaaaaaaaaaaagtatggacgttgtgcattctgtggcagctaccctcttctctcctgctcaagaaatcccactgagagggacacaagtgaatgagagggttggtagttacatttggaaaatctttgactttggtgtatatatgaggtcaaaaaccatttgcaaatgccagtgcttctatggagagcagagacttgagccctgcctccctctggcttgccccactgtgctggagaaccttggacccggtcccttctcccagccagggcagagccttggcaggtggtcctccagcctgcttttaattgcccccatgacaggggactcactgctgctggagccagccccatggcattgttcaatttttcccgaccagctaagatcagctccctttgtctgtggtgtggtggctgtgaggtccacgcatctctccttcttttcttctttctagaatatgtcacgtttctgacagttacccccaacctgaccagtgtctacattgccaaccacaggcctctcttcacacacttgggtgagttgactggaggactcccacccagttagctagactgcaaaggtgcagagcactgttgccaagatgccctcacttctgacatcacccgcaagttcagggggttccccaaaccaccctcaggcttgatagttgactaggaagactcccagagctcactgagagctgtggcacatggctgcggctccttccagaagaacacaggttagaattgtccaagggaagagatgtaggcagagtctgggagggtccaaccaggaggcctgatgtctcagggatgtgacacccttctagcattggagcgtggccatacgcatggagtattgcccacacagaaagcccactgagtgggagttgagagtttttcctggggtttgagtgcaaagacatgattgactaattggccaggtggatactctcagtctcttggtgacccagcccctatcctaaatcacatagttggtctttctggtacagccagcccctgccctaaaggaggacacttctgcctggtgtgacccgtgtttcctcttggaagccaacagcaaaagctggacttctctttgggcaaggcccgcttctttgctattgagggccacagtgggtctttctggagtgtgtctgcacctaacctttgaagccttggttgccggcacttgccatggggtccctgagccctgagcctgttgagttctgtgcgtgagtgcacttggtcatagcactcaccaggttgtggaaagaggcctagagcctccgctgtggggaagcctctagctcagatgcctgtggctccttagaggagggctggggaccccgggaaggagagtcactgacatgtgcctgtgaggaggatgggtgctcagctccacacagctaacagggctggttccccgacagcggtgaggatcggagggcgctatgtcgtggctgggaagatgagcatctcccctaacaccacctacccctccctcctggaggatggtcgtgtcgagtacagagtggccctcaccgaggaccggctgccccgcctggaggagatccgcatctggggacccctccaggaagatgctgacatccaggtcagcaggagagcctgggggaggccagtgggggcttcttcttgggggctatggctgcttgctcgtttgtctatccatccattccctgattcgttcatttattcattcagcggtcacttacaggggacccactatgtgttgggccctgtgctaggcaaaatgtagctagctcctccaggggcttagggtcccacaaatatccaaatgtgcctgtgcccagagcccgtgggagaaggccctgcagttctgggatcaggtaaggttggagggcccaatgcaggggtccagggctccctgggaaagagtgatggagctgaggtgtcagatgagcagatgttgctgggccaagcagggaaggaagcgtatggctgagggaacagtgtcagtgtgggagggatgaaggaaggtcctactgtgtgggtttgtggggagatgaaggcatggacgcaggtgcagtggcatctggggagtaggccttggtgctgaggaagctgagaacagatgctggctctcactgcttctttggtgcagtgtgtgtgggaaccggaaggccttgttcaggcgtgtcctcagtgacgtgtgctcgcccatgtatgtccccattggtgcttcgctgaggaaggcacgtggagggtggagagacataagcgcaggctgaaacagacctgagaaccttgggagaggggcccagtctcagcggccggagcagcgtcctctgcccctacagcagccagagacaggagggcctcccacagatcaggccaggccgggccaaagcaagcccctgtgagcggcttatcccttctcttcccctgatatggttcccttcctcccctccccttgcctgggacattgtatccagatgctagctgccgagtggctctcccatcatcctctgcagtgtgtaaaaaagcagattcccgggtcctctgcatattccctgaatcaggacttccctgtgttgggcctgagaaaccgcaccgtaaccaacacaggcttgcggcactggccagatgtgggcatcgagggggcaggtgcggaatgtcacctcgccctgggctctggcctccaggctggcctctttcttgggctggtcttgggcacaggacccagttaccctcctgaagagccttaggcccaggaacctgctgaagttcttcctagtgctctccgggccagtcccaagccagtagctggccacaggtccccagggatccagtttcttcctgccgaccctaccacaggtccccagggatccagtttcttcctgccgaccctacgggcctcagctctggctccagaagcactttctgtgctggccctgccctagcccttcttgggctccttagcccagcctaaggtgggcctgcctcctccactgcactttatcctctacccagccagcttagggaaccttctctgtgctgcccaaataccctatcatgtaacccaccaatgacttggtaattacctccccgagccctctatcccaacccactgagagctccttgcagctcagccagtgtcctgtgcactgtgctatccccagagcctggtacaggtcagtgttggtgattgcttcccgttatttttgtctttgttgtttttttagagagggtctcactgttggccaggctggagtgctatgttgcccaggctgctctgaaactcctgggctcaagtgatctgcctgcctcaggctcccaaagttttgggtttacaggcatgagctaccgtgcctggccagtgattgcttgctgaacgaaagattatagggatgcaagaagaagttggaaggcttcccaggggaggtggccatgacagtgaccctcagggaacccactggacaaggcctgaagctctttgtctgcaggtttacaggcggtatggcgaggagtatggcaacctcacccgcccagacatcaccttcacctacttccagcctaagccacggcaggcctgggtgtgggccgctgtgcgtgggccctgctcggtgagctgtggggcaggtgagacctggggaaggctcatccacagcacggcttgcccctgcagggaggcggcctagccctccctcttccctcccagggctgcgctgggtaaactacagctgcctggaccaggccaggaaggagttggtggagactgtccagtgccaagggagccagcagccaccagcgtggccagaggcctgcgtgctcgaaccctgccctccctagtgagtgtggtgctgtctgcgcagctccaagggggagagagggttccgctggggctgctgggctctgtccctggcctatggggcccatgtggcagggccgggctgagctgctcctgtgcaggctctcattacccctgcccacagccctgcaaggggggctctgtgagtgcccccattctgcaggtgaggacactgaggcttggggcagacatggtgacaatgtcagcccagtgggacccacacctgctgccaccttgtctgggccaccgaggcctctcttgagctcaggtactcatggtgagatggaggtgattgcctacctggagggttgtagggagacttgcggagctcctggtgcaaagcccctggctgtcaccacacctgacggggcacactgttagggacgaggccattcctgctgggtgcaggacagggcagctgctcaccagcctgtgattcggttgtcctcaggctcagccgtctggcagcctgggaacacctggagaggctaggctggccgtagtgcccattgcttgtcccagaccgggggagtacatcagcacctgccaccccatcaccccaggccagcctgggacctggccagggtcccgacgctctgtctccttcctcagctgggcggtgggagacttcggcccatgcagcgcctcctgtgggggtggcctgcgggagcggccagtgcgctgcgtggaggcccagggcagcctcctgaagacattgcccccagcccggtgcagagcaggggcccagcagccagctgtggcgctggaaacctgcaacccccagccctgccctgccaggtgagcccagggctaggtggggctgggagagggccttcctggcagagctcgtccctgcgctgagcccccatccttctgagaatcccctcctcctgaggcctccggcggggcctcaccatccagggtgatgggcagtgtcacctggcggttgtaagtgctgctgtcagagttccttactacccaggagagcctgggcccattgtttccctctctgagcttccgagcccctgctctgaaatggggatgccgacctgcctggggagggggggcttcgaggatgaggtcaaactgaacggagtgggagatgtcactttctcatcaccaccatctcccccgtgcccacgtggctgcatctcatcccctcagtgtccaagttgacagtggcttatcatcctgccctgccactaacgagctgagtgacagggcaagtcccctcctctgtgggcttcagttttgcgacctgtccggtgggaggggattggtctggattgttggtggcccactcatagctctggactcctttccccgcctcgtcatccgtggcagacaaaacagtcaccactcttccccgctgaggccagatagggcctcagaatccttctcacacagctctccaggcagccactttagcgcagggctgactcacagctgaaacccattggccacccttgaacctggtgatccaattccatgtggcacctgtttctctgcacctgctatggtgcatggagtcagtgattacctggctggaggtcggcctctgcctctggagagtaggagggatgggttctcttttttttttttattaaaagacagagtcttgttctctcacccaggctggtatgcagtggcatgatcttggctcactgcaacctcctgcctcagcaagtgtgcgccaccaagcccaactaatttttgtattttttgtagaaacagggttttgccatgttgcccaggctggtctccaactcccgggctcaagcagtctgctcacctcagcctcctaaagtgctgagctaccgtgcctggccagggataggttctgtctctgcaccctgggtgcaggtggggtgcctgactgttgagcagcgagtgcttgttgaatgggaacctgctggctgatgaatggggaacccggtgcttcagggagagaccctgagcttcacttctctgtggggctcctctttgggctcctggatgttggggagcaggtccccttcctccctgcccctagcagctgggctataccttcccctgggtggcagaggcagggcctgatgactgtctcatgccatcctcaggtgggaggtgtcagagcccagctcatgcacatcagctggtggagcaggcctggccttggagaacgagacctgtgtgccaggggcagatggcctggaggctccagtgactgaggggcctggctccgtagatgagaagctgcctgcccctgagccctgtgtcgggatgtcatgtcctccaggctggggccatgtgagtgccctgggcatgagggtggctggggctgttgagtcctttacctggctgggagaacgaggagcacccattgccaccgtcctccaggccagagcaagaacaccatccttctgtgggaatgctgtctgagggccacccctgctcagaaaagaagcttagaaagagggctcagggcccctgggaaggctcccattccccttgcaagccgggctgagggaagcatctgaggagagtgtaatgcagctgctgtgcagagaaatgctgccaggctcccgcctggcgtccaggggctggaggctgactggccttgctctctggcctgggtgctggcaaccctcgcccctcatggctggggggattgcagggccaggcatgctcccatgtcccactcttggtccccagctctcggccaggcccacagtgagcactcatgctgctgaggagcctgcaaaggtggggtgtgcagcaaggatacccgctgcgagaccggggagccgatctcgccaagggaggaggggagggagcccctggtgcacacacgccacttcctggtctctctgctgctgcctgagaagatcgagacggggatcgctgggtcctcagaggaggcccagacccaccagcttgttgctattccccacagctggatgccacctctgcaggggagaaggctccctccccatggggcagcatcaggacgggggctcaagctgcacacgtgtggacccctgcggcagggtcgtgctccgtctcctgcgggcgaggtgagggcccccgggatgctcctggggaccagcactcatggtaactctcctgtccacttgcatcttgcctcgttctgaaaagcatttgaggtggattgcagaaaatccagactatatgggaacacgtggtaatacacaaggagactaagcatagtagctgacagccacttcaaatgtgggtgttgattggctgaaaggtaggaaaagacaataacgcccggcagtgtggcacgagagccattccttatggtcctagcagagcggccggggggtccccaattgatgacccgagcagagaaaccttagctttaagatacacagcgttcttctattttcccaatcttgttttattgcagtataacacagatattataaaatttaccatccaaactgtttctccctgtgcaggtcagtggcataaaagcacagtcacattgttgtgcggccatcaccaccaacctctccagaacttttccagtttcgcaaactggagctctgtccctgtgaaacacgaactcccatttccccctccgcagcccctggcaacctccattctcctttctgtctccagattccacaattctagggaccttgtagaagtggaatcatatagcatttgcctttttgttactagttttcactcagcatgatgtcctcacagttcatccatgttgtagcatgtgtgagtgtttccttcttaaggctgaaaaagattccattgtgagtgtatcctttacaggtttatccatttattcatcagtggacacttggcttccttccacactttggctattgtgaataatgcttctgtgaacatgggtgtgcaaatatctgtttgagttcctgctttcagttcttttgggtgtatatctagaagtgtggtagctgggtaagatgagaattctatgtttaatttttgtggaactgctggactgttttccccagtggctgcaccattttacatttccactaatggtgcataagagttccaatgtcctcccatccttgccaacactttttatttctatggttttttttgtttttgtttttgtttttgagacagagtctcattctgttgccgaggctggagtgcagtggcatgatcttggctcattgtaaccttcgcctccggggctcaagtgattctcgtgcttcagcctcccgagtagctaggactataggcgtctgccaccatgcctggctaattttttgtttagtagagatggggtttcaccatgttggccaggctggtcccaaactcttgacctcaggtgatctgcctgccttggcctcccaacgtgctgggattacaggcgtgagcccccacacctggcctatttctgtgttttttttataatggccatcctaatgggcttgagaagacacaccatgttcttaaacgaaaaccctgaccacttgctcagtaaaatgtcagcctgtttaaaaccgagaccaaaaagagatttctttttctctcttttcttttttgagacaaaaaagaaaacctctgtcaccaggttggagtgtagtggcacaatcttagctcactacaacctccaccacctgggctgaagccatcctcccccctcagcctcctgaatagctactataccctgctaatttttgtagttttggcagagatgggatctccctatgttgcccagcctgatctcctgagctcaagcgatccttctgcctcggcctctcaaagtgctgggattataggcatgagccactgtgcccaaccaagagattttttttctttttcttttttttcttttttttgagactaagagttttcctctgtcgcccaggctgaagtgcagtggtgtgatcttggctcactgcaacctccgcctcccatgttcaaacgattctcatgcctcagcctcctgagcagctgggactccagctatgtgccaccacacctggctaattttttgtattttattttattagagagggggtttcgccatgatggccacgctggtctcaaactcctgacctcaggtgatccacccgccttggcctcccaaagtgctgggattacaggcatgagccactgagcctatttcttttgaggatattcctaaaagagagacttgagaaaactggccctaataacatctttatgatagacacaatcagagattttcatattgtgatttttttttcttttttttttttttgagatggagtctcgctctgtcacccaggctggagtccagtggcgcagtcttggctcactgcaacctctgcctcctgggttcaagtgattctccgtctcagcctcctgagtagctgggattacaggtgcgcaccaccacgctcagctaatttttgtatttttagtagagacggggtttcaccatgttggtcaggctcgtctcgaactcctgaccttgtgatccgccgcccaaagtgctgtgattacaggcgtgagccactgtgcctggcccatattgcaattcttataatgcctctcggtcaacaataacagctaccatttgtcaagtgtctactgtgtgccaggcacttgttatcttcccttttaaaaatctttataaatgattctgcaaggtagatgccattatctttttttctaaatctaagattcagagggttaagtcagttgtctgaggtcacacagctggtaagtggcagagccgggattgaaacccatgcgggccttatgtgctagaggtgtccagtgagcctgggctgcagtccttgctgagcctgtcccttggggctctgggtctctgctttgtccacgcaggtctgatggagctgcgtttcctgtgcatggactctgccctcagggtgcctgtccaggaagagctgtgtggcctggcaagcaagcctgggagccggcgggaggtctgccaggctgtcccgtgccctgctcggtgagtgaggggagcaagactgtgtgctggccttctccctgtaagtgggagacccgagccttggctccatgcccggtgacctgcggaggggggcaggtgctgctggctgtgcactgtgtgaggctggaccatggccgccccatccccctgcctcactccaagtgcaggccagagccccggcccagcccctttgaggactgcaacccagagccctgccctgccaggtgggccccttcccaaggagacagggggtgctaggtctgcatcctggctctttcctcacctccaagccagaccttttgaccctcagtgtcctcaccagtgggagcaggtcattttgtgcccccagaagactgggggagtttaatgaaaggattagatgcatgtaaagtacatgctaaatgcaatgagtgtaaaatgcatgctcgatgcaacgcgtgtaaagtacattgcacaggatctgggatgctgtgggtgcacatggttgctggtgcgtttcttcatcgcctgctctttatggagcacctaggccccggggccgtcctggagctaggggacacagcagagaacaaggcagacaaatgtccctgacctcctggagcaaatgcagggggaaagggggacagataataataggacaggcggggaatgcagtttgatggatggtgttcagtgcgatgcagccaaacacagcgggaggggaggaggggagggctggcggggtgggctccagggcggtggtgctgggatcactgttgaagacagacatgcagggcccttgggtgcccggacccctgcccccactgtctctgggatacgacatctgtcgtttgccctcacctttctcttctgtaaaatgggtttgtccaaatgttctgtccactctgccaagcctcttggtgaggacacaagggggcctccagaaagagaacctctccgggcccttcccagcttcctgtctcttcctagtctggggaaatgaaggggagacctggctcccctgggttcccaggccctggggctgtttggggtccctgactccagtttgctccaggtggcagtacaagctggcggcctgcagcgtgagctgtgggagaggggtcgtgcggaggatcctgtattgtgcccgggcccatggggaggacgatggtgaggagatcctgttggacacccagtgccaggggctgcctcgcccggaaccccaggaggcctgcagcctggagccctgcccacctaggtgagtcagccggtgatgggaggggcagctcctggtgtgtgcagatgccaggccaggcgctgtggtgtgtgcctgtaatcgcagctacttggaaagctgaatcaggagaaccacttgagtccaggagtgcaagtccaacctgggcaacacagtgagacctcatctctaaaaaaaaaacaagacggggccaggtgtggtggctcacgcctgtaatcccagcgctatggaaggctgaagcgggtggattacctgaggtcaggagcttgagaccagcctggccaacatggtgaaaccccatctttactaaaaatacaacaattaggctgggcgcggtggctcactcctgtaatcccagcactttgggaggctgaggcgggcagatcacctgaggttgggagttcgagaccagcctgtccaacatacagaaaccctgtctctactaaaaatacaaaattagccgggtgtggtggtacatgcctgtaatcccagttacttgggaggctgaggcagaatcgcttgaaccggggaggccaaggttgtggtgagccaagattacgccactggactccagcctggctaacagcagcaaaactccatctcaaaaaaaaaaaaaaaaaaagaaaacccacaaaaattagcctggcgtggtggtgtgcacctgtcatcccagctacttcagaggcggaggcaggagaatcgcttgaacccgggaggcggaggttgcagtgagccgagatggcgccgctggcactccagcctgggctacagagcgagactccgtctcaaaaacaaaacaacaaaacaaaacaagacggggtggggggctcagtggcccaagagccagtctgtaaggaatagggctacctggcaggctgtgctagttgtgggaggtgaagtttaagcaccatgcaggcagggtgcagtgtggggaggcctgggggacagaggaggcagcatttgagcagaacctaaagctgtgagcaccagcattctgatgtggaagacgggagggatggaggtctccacagggacacacacagccacactaggacacgggacagaatcatgttcaagtccgtggggtccggagcccagtggtaaagggcgaacatttgcctacctcatttacaattctttaatggtttctttttgtaggtttgcatttttagtaaagaaatacttttctatatcatacagaaacgtccagaaaagaatgtaacagacatgtatgttccagcactccagtttaatagatagcatcctactgccatgtttccttcctgtccacttacttttatttatttaatttatttattttgagacggagtctcgctttgttgcccaggcagtgatgcaatcttggctcactgcaacctccgcctcccgggttcaagccattctcctgtctcagcctcccaagtagctgggaatacaggcacccacaaccacacccagctaacttttgtatttttagtagagacagggtttcaccatattggtcaggccgatcttgaactcctgacctcaggagatctgcctacctcagcattccaaagtgctgggattacagatgtgagccatcacacctggccagcctccttagttttaaataaatccagttacagataagatttcacttaaatttaggctggtcatggctcacgcctgtaatctcagcacttcaggaggctgagatgggtggatcatttgagcccaggagtttgagaccagcctggacaacatgccaaaaccttgtctctactataaatacaaaaattagccgggcatggtggtgcatgccagtatccccagctactcgggaggctgaggcaggagaatcacctgaaccttgggaagtcaaggctgcagtgagcagagatcacaccaccactgcatgccagcctgggcaacagcatgagaccctgtctcaaaaaaaaaaaaaaaaaaaaaagattttacttaaatttaaaccctgtactaatctgtgatttatttggagtatgttgcaaagtagggaccaaaggatttttttttttttctaaattgttaactagcatctgttggacaagccctgatgcctccaggtggctccttggtggtattggtgtgtgttagaatctatgtctgggctttctactgggtttttttcttctccttttttttttttgagacagtttttctctgtcacccagggtggggtgcagtggcgcgatctcagctcactgcaacctccgcctcctgggttcaagtgattttcatgcctcagcttcccgagtagctgggattacaggtgcccgccaccacccccaactgattttgtgtttttaatagagacagggtttcactatgttggccaggctggtcttgaactcctgacctcaagtgatctgccaggttctgttttttgtgctttttttttctagctattctcttgcccatacaaaattgttttaaatgttgtagctttataaccatttaacatctgtgtcactagtgtgtcctgatttctttgcctatgctaaagtcccttggctgtgtgtcccatttatttttccacatcacatttagagatgatctgggattttatgggaattgcagggtttttcacactgcacgctgcctgcatggtgcttaaacttcacctcccacacctagcacagcctaccaggtagccctgttctctacagaccacctcttgggccactgagcctcccctcacttttttttagagatggggtctcactatgttgcccagtctggacttgaattcctgggctcaagtgatcctcctgcttcagcctcccgagtagctgggatgcaggcacacactacatgagctctggccatccctctgacgttgctgtagccacgctggcctcattgtcctggaacattccagggatactcccctgacttagggcttctgtgctagctctcgctgcctgatgtcttctgtggatatcctcgaggccctggatatccctcccccaggctcggctcagacaccacaactccaaagtggcccagtgccctccctgagcgtcggtccagaacggcactctcgtccctcctgtgacgctctgcttggcactttgggaggctgaggcgggaggattgcttgagcccaggagttctagaccagcctgggcaacatagtgagaccccgtctctacaaaaaatacaaaaattggctgtgcgcggtggcttatgcctgtaatcccagcactttgggaggcgaaggcgggcagatcacgaggtcaggagatcgagaccatcctggctaacacggtgaaaccctgtctctactaaaaatacaaaaaattagctgggtgtagtggtgggtgcctgtagtcccagctacttgggaggctgaggcaggagaatgacgtgaacccaggaggcggagcttgcagtgagctgagattgtgctactgcactccagcctgggtggttgcagtgagctgagattgtgccactgcactccagcctgggcgatgagtgagactccatctcaaaaacaaaaacaaacaaacaaaaattacaaaaattagccaggcatgatggcacatgcctgtagtctcagctacttgggaggctgaggtgagaggatggcttgaaccctggaggttgaggctgcagtgagccgtgatcacaccactgccctccagcctgggtgacagggcgagaccgtgtctcaaagaaaaccattaaaataaaataaaaaataaaatttctgcgatgcacacgacagcctccacagcaaatcagcatccagttgctcatgccagtgatgccccaatggagaacaatccacgctctgagaggaggtggggtctggtttggttcactgccacctcccagtgtcatgtagaacagtgccaagccgcggaaggcacgggtccaagaggcagcgctgcagggtcatgggggagcacagtattgcgatgaagatcccagctcccttgcaggctgcctgggtttgtgtctgggctctgaagaatgcgggccataattagttattgattgattacagatcaacatgggcagccttcccttgcccaagggaagggaactcggccttcccttgcagaacgtggggtgttgagatctgtctcctgttacccaggggctcgcttcctgttgctgttacttgggtccataggcaacccctggggtgctgacaggtgttctgtgataaaggcgactagagggggatgtgcaattagggaaacaggggcctcttccccctagggccttttggtagctctcctgtggccgtgagccctggccccagacaggaggggctcagtggctgcactttccatcttgcctggccacggaagctgtctaggcaactgtccgagtacacgtgggtggagaggggcctgcgtggggcagtactgtctctggggagacctagcctctctctggggtcttctcttcctgcaggtggaaagtcatgtcccttggcccatgttcggccagctgtggccttggcactgctagacgctcggtggcctgtgtgcagctcgaccaaggccaggacgtggaggtggacgaggcggcctgtgcggcgctggtgcggcccgaggccagtgtcccctgtctcattgccgactgcacctaccgctggcatgttggcacctggatggaggtgagcacagcgggcactcggaatccctatggggctggggtgggcatcagctgtggctcctcatgtgtgagggagtctaggaggcattggctcatcgtgtcccctgaaaggaaggagagagctgcgcccgttggtgagggggcacctagaggcagagagacagagggcctagagacctgcgggcagctaggacttaagaggcccttaggtttggggacgctggaagatgaatggcaggccactcagctctacacagatgagggaatgccagctgtgccacgcacctggcaaggcaggacagacaagggtaaatggggttcaggctgccccctggaggggctcgctcatggtgtggagggggcataggggcacagcagacagagatgagccgcagccccgcagacctgcttgctctaaggcttggagggacagagaggccgtgagggtgacagggacccagacttgaattatggctcctcccacctatatgacccatgcaaggtgccctctctgagcctcagttttctcatctgtggaatggagacacttaactgcctcccagcttgtacaaggattatattggatcactcctggcctgtggttaccactgtccttgtcaccttctggcagggtcagctgtgactcctcctcccctctcttggcagtgctctgtttcctgtggggatggcatccagcgccggcgtgacacctgcctcggaccccaggcccaggcgcctgtgccagctgatttctgccagcacttgcccaagccggtgactgtgcgtggctgctgggctgggccctgtgtgggacagggtacgcccagcctggtgccccacgaagaagccgctgctccaggacggaccacagccacccctgctggtgcctccctggagtggtcccaggcccggggcctgctcttctccccggctccccagcctcggcggctcctgcccgggccccaggaaaactcagtgcagtccagttatgtcctgtcctccttcctgtcaggcagctgctgcaggaggggtgggcaaaggcatcttcctctgggaaggactggcacaagcacttggtccctgggttgtgtgcctgggaggccgggatcagggctggccctctttctccctggcaaagcaaaacctcccttttactactatcaaggggaagtaacttgaaggtaggaacccagcttgtgagccccctagcctctgggctgctctgcatgtgccccctcttgctggatcatctggtagcagccctgtgccctgagggtgatgctctgacctatgcagcccccctccctgtcctgagaaggcttccagctgggccttggaggacagggtccacccctacctcctggtctccttcctcagcttggaagccccggagcctgccctgctgggaatcggggaagcactgcttacctgtctcctgctcccttttcaggtgcctgtggcaggcagcaccttgagccaacaggaaccattgacatgcgaggcccagggcaggcagactgtgcagtggccattgggcggcccctcggggaggtggtgaccctccgcgtccttgagagttctctcaactgcagtgcgggtatgtctagggccatgcaagcgatgctgccagttatgggccctgccaggagccagcacgacgctgcatgccccattcctggcaggagcccatgtgcattcccacctgtagtttgcatcccatctcatgactggggagtgatgatctgcattttacagatgaggaaactgaggctaggagagattaagtgatgtgcccagttacttagagtcacatagccagcagtgggagaggtgggacttgaactcggctcagtctaccctggagccactcctctgctgaccaggcgtgggagtgctggaccctcactgccctgccgcttcctaggggacatgttgctgctttggggccggctcacctggaggaagatgtgcaggaagctgttggacatgactttcagctccaagaccaacacgctggtggtgaggcagcgctgcgggcggccaggaggtggggtgctgctgcggtatgggagccagcttgctcctgaaaccttctacagaggtatggccaggccttctccacctcccttgggtgctccagtcctggcagggaggctgggtgggtgctgctggggatggggccagtcccagtggggcagtgggaagatacggagggaactgactgagatggaaggaactggggttggccagtgtcagtctgcacgtgccagggaggggtcacaggatgaatgctatatccctcctttttgggaccgtgcagcaagatggacggatgtgggacatggtccacatcctcagtcagtccctcaggcctctgccccacacccacctgccccgcccccacccctccagcctttcaagggcttttagggttttgtggaagccactgtccctcagccctgtttcagtgcactggtgtaagcagacatgcttgtacatgcatgtgcacccacaagcacacctcaggcagaggatgccacctcagggactccagccttgcccgtggccccctcgatatcctctgatagccctctcggttgtcctggggggcttgccctctcccaacagcccgagctggccgaagttggcttccctagctggttccagaggttcctcggctcccccaggtgtctggggcttagtggcaacaggggcttagcctctgcagagacctagtgcgccgcctccttgccccagacctgcccgggcagagagccgtgtatgtgtcccagtgcacaggcgctgctgggccctgccaaaaggccacaagcccactgtcaccgttcacattgcttctcgcttcccggcccagccccgcccacacaggcatctgccttgaaagaggtgcaggaggtacaggcaggtgggggctccagtgagctctgaggaacagcagtggccgccatgggtggagcctatctttgttgccagtttcagtgttaaacactcttgcacgtgtgacatcattgagtcctaaagaccactctgctcagtgcatgccattgtttccttcagttacagaggagggaaccagagcccagaacatttagcctttgcctaaagtcactgggccaggaagtggtagaggtggggttcagcaggatttgcctgggaaccccaatattgaccacagtgccatgctgccctgcacggctccctggctgtgagttgtcctggcctctggcaccaccggtctgtctgggttcctatgtccctatgtcccacctgcagaatgtgacatgcagctctttgggccctggggtgaaatcgtgagcccctcgctgagtccagccacgagtaatgcagggggctgccggctcttcattaatgtggctccgcacgcacggattgccatccatgccctggccaccaacatgggcgctgggaccgagggagccaatgccagctacatcttggtgaggcccagcatggggacttgtgctgtgattctggacagctttccctagggcgtgcagggctaggggacccccttcagtttatttcagactaaaaccctcaaaatcattagtgaaagaatgggagaagatagcttcctccacatattcaccaagaaatgttttttgagctacctacaagagtgaaatagtggctcacaactgtaatcccagcactttgggaggcccaggagggcagatcactcaaggtcaggagttcgagaccagcctggccaacatgatgaaaccttgtctctactaaaaatagaaaaagtagccaggcatggtggcgtgtgcctgtaatcccagctacttgggaggctgaggcacaagaatcacttgaacccgggaggtggaggttgcactaagcccagatcgcaccactgcactccagcctgggcaacagagtgagactctgtctcaaaaaaaaaaaaaaaaaaaaagcgaaatggtaaagaatggtaaagacctttctgatgtagactgacagctaacccaagactgaagcataattttacagtctgatataacttggacagaatagcaccctgcaccctccccgaggtttcaagtgtcctgggagaactgtgttctgcagggtatcagcttccccagaggaggcagcctggccccgctctggcaccctgactgtgtgtccttggggaagtgatgtaacgtccctggacctcggttttctgggtagagtaatggcgtattcctagtagggctttgtaagcattaaatgtgatccggaatctgtgagcccttgcacacgaaggcttccgtgagtgctaattattacttgtggccggtccttctgggctgccccttttctctcagatccgggacacccacagcttgaggaccacagcgttccatgggcagcaggtgctctactgggagtcagagagcagccaggctgagatggagttcagcgagggcttcctgaaggctcaggccagcctgcggggccagtactggaccctccaatcatgggtaccggagatgcaggaccctcagtcctggaagggaaaggaaggaacctgagggtcattgaacatttgttccgtgtctggccagccctggagggttgacccctggtctcagtgctttccaattcgaactttttccaatcttaggtatctactttagagtcttctccaatgtccaaaaggctagggggttggaggtggggactctggaaaagcagcccccatttcctcgggtaccaataaataaaacatgcaggctga

SEQ ID NO: 15388 - DNA, 45029 bp, Homo sapiens
caactggcgagaagcagggacaggcctcatacttgggtctttctggcttcagcacgctttccttccacacacgtgtactggcacccactaaatgctgagctctgctcaacgctcggaagaagcaggccctgccttatcatgcgcacactctaggggaaaacaagtaacagcgagtaaacaaaggaacagacgacatcagggtaaagtgatggagagactgcggtgaggccaccagcctccataaggagacaggccttggtgaagtcgctgtgcctcggttctcagtggtgaggtggcccatacttactcggtgggtggggctggggctgcctccttagctttccgcttcttatgctcgatgtcccctcgttctggaacaatatcaccatttgtcctttccttggttcctttcttattgtgctctgttccactggccttggtgcgaggtactggcgccctcctgtccatcttggaacctgaaggaacagagcccctgctggcctcctggtcttttcctgccggcatctcctctcccttcacttgaggcgaggtctcttttttgttttgctggataattttgggcttctttttggaacccatctgagagatgacaagaggcttttctggggcctgagatttttgtttcagcagccactgggacccaaaataaaatacatgctgcatttgaatttggaaattacacacagcagattgaaaaaacttacgtgtgtatgtatatacacacatatacaccaaacacatctatacaattcccatccgcatcactgaaattcattttcaaacggtttggaaaaagctctttttcattctcatgggtcacttgtggtgaaatgctgtttctttgcttatcttattataatgcattttgcacctgctccttcatgcatacaaaatgtcaaactcattctacaccttgggtacctgttgagtggctggacaccacagaccacttcccttttcagcttatctagaaagaattttggagttaacttccctcacagcttgggccaacatcctgctacacagaaatcgctttttttttttttacaagattccctggtttgctactgctgtgaagatctcaggaaggtggggggtgtcataaatgaaaagaaaagcttctgtcaaactggagtggctgaagaactgctagcagccacacaccttggctgtcacccaagcagaggctcctgtagtcttagagcccagcttcctccctgtgttcaaatccccagtgggagtgggcgccaccacagtgcgatgatgaggcgggtgctacttacctgttctgtgataggtaaagaactgaagggctgactttcttggatgaattagaaaacactccaaagtttccctatagcacacatcccttccattcacttattttgcttttctttcttgggagaaggaagaagagttggtgttcaagaaatcccacagaaccctggggctgcccacgggaatttgactggtcctgtgtgttaagacaggaatgtctgcactgagatactgtgcagagtattaggaggttcaagaagcgctcggggaggctgaggtgggaggattgcttgaggtcaggagttgaagaccagcctgggcaacaaagtgaaaccccatctgtattagttcattgtgcactgctataaaggaatacctgtgtttggtaatttataaagaaaaaacgtttatgtagctcatggttttgcaggttgtacaagaagcatggtgccagcatctgcttctggtgaggccgaaggaagcttcccatcatggtgtaaggtgaagggggagcaggtgtgttgcgtggtgagagagcaagcaaaaaaggtgctaggctctttttaaacaaccagctctcaaatgaaccagcagagtgagaacttactcgttactgaggggagggcaccaagtcattcatgagggatctacccccatgacccaatacctcctatgggccccatctccaccactggggatcacatttcttttttaaaaaaactactttttacttttatttagagatggaatctcaccatgttgcccaggctggacttgaactcctgagctcaagtgatcctcctgcctgggcctcccaaagtgctgggattacacgtgtgggctactcgggaggctgaggcaggagaatcactggagcccaggcagcagtgagctatgatcctaacaggaggtagctccaagggagctccaagggatgtggtaagaatgtatgagtgacgcacgtggaagagtgtctaggagagagcaggcaacctctacagaagtgcaggtcactagggagacagcaggtacaacacagccttaaaagcatggactccagagtcagccacctggttcccagccgcaatcttagatgatctatttaaacttttccagcctatttcctcatctgtacaatagcgatgatggaagtgtccacctcacagtcttattgtggggattgcaacacgcatggcatagagcacatggcagagtgcacatttttaggagctcaattagtatttacttcaagaccgtaagtgtcgctagaaccccatcacatgtctgctatctgcttttcacttctacacaggaatcttctttctccctgtcttgctacacagaccagtgtgttctttcgttgttgttgtttgagatggagtctcgctctgtcgcccaggctggagtgcagtggcgcgatttcggcttactactgcctctgcctcccgggttcaagcgattcttctgcctcaggctccccgagtagctgcgactaccggcgcgcgccatcacgcccggctaatattttttgtacttttttagtagacacggggtttcaccatgttggccgggctggtcttgaactcttgacctcaggggatctgcccgcctcggcctcccaaagtgctgggatcacaggcgtgaggccccgcgcccggcctggtttcgggattttaagctaaatttctctttgtaaaatccattctagttagttcattatgcaaaaggtacaagggtttatctttgcttttttgtacttgaaataattctttcatcaatttctttcaagcaaacaagttcgagacctccctcaacaggccacctttcttgtgaaaagctgtttacaagatttcgattcaaatctgcctttacaggtcttttggggctacccaagtctttccctccgtcgcgttctgcgggaatgagctgcgcagcgctccgcccgggccccctcaagcctcacctcttgcagcgccttccagttttgagaaaagtcttctggtgcctttggaggtcgcaccacagcaccggggccgcttgctggcttcttgcttacttcccgcgccttgcttttccaaaacctttttttcttcttgtttttcttccgagtgagcgtcttgacaggacccggcttagccacggggctgctcggggcgcgcttggaggcggggaccttcgccttccccatcctgctgccgtccagcgcctgggccggcggccacccgagaccccggcctccccgggcccggcgccctggcagcacaagcgcctgcccaggccaggccgaaacacacccaccgcagggaccccgtccaggaaaagactccggaagagaccccgcacgcgttgcgcatacctcagcacgcacgctccagtccccggaagcgctcgtctctccacaaccggctggaaaccggatccctgcctctggttccgcgcagcctgggcggttcacccgcacgggacttgggccgccgccttagccagcggcatccggggtcatcgacctcgagtttgactggggcaagccgaggacctccccaagatccgggatggggatgagagatgcgaacgccggaagggaactggggggccgctgtgtgtgtagcacctggtagggcagctgagctgggggcactgggcggtggggctagtgagagccgggctaggtcgctcgcctgcgtcctggactctcgagcctttcccgccttgggctgctccttgctcagcctcacagcggctcatcttccacgtacagtggggaaactgaggcccaggcaccgggaggagttcctgccagttcactctgtagcaggacgagccgcagacaagaacccctcagacaccgaattgtagaaggaaagggctttatttagtggggagcatcggcagactcacgtctccaaaaaccgagctctctgagtgagcaattcctgtcccttttaagggcttacaaccctaagggggtctgtgtgagagggtcgtgatcgattgagcaagcagggggtacgtgactgggggctgcatgcaccggtaatcagaacgcaacagaacaggacagggattttcacaatgcttttccatacaatgtctgaaatctatagataacataaccggttaggtcaaggattgatctttaaccaggcccagggcgcggcgccgggctgtctgcctgtggattttatttctgccttttagtttttacttctttatttggaagcagaaattgggcataagacaatatgaggggtggtctcctcccttacttctgccgcctgggttcaagcgattctcctgcctcagcctcctgagtagctgggactataggtgcacgccaccactctctgccaatttttgtatttttagtagacctggggtttcgccacgttggccaggctgtcttgaactcctgacctccagtgatccatccgcctcggcctcccaaagcgctgggattacaggtgtgagccaccgtgcccggccgggagtgggtagatttgatgtgcgtgtgtaacaggcagaggttgatggagtaacagggaagtgaggctcctaggattttggtctgagcaattgggtgtggccatttatcatctcaataaatgtctgcggggagcagggtgaagtatgggggtggagccatgagctccttttcacacttgctgagtttgaacgggccgtcagtcaccaaggagagacgtctaatcagcagcaggatataagattcctaagcttagggaagggtcagtgctggagatgtaatttggaaatcgtcagcacataattagtgttgaaacatgaacctgggttagttcatccaaagagagagtaccaatatagggagtgaagggttaagaccagatagcaggtgctgggggctctccaggggcgaagcagcagaggaggctgagggggagcagtcagtgcagtgggaggagaagcggatgtgagtggcatcagagaatccagggggagaataaaccacatcagatgctgctgagaggctgagaaggacgaggacagagagatgggaaccagatatggcactgagattgtcagcaagtccaccgaaaagggttttctttttttttgtttgttttgagacggagtcttgctctgctgcccaggctggagtgcagtggcgtgatatcggctcaccacaatctccacctcccgggttcaagcgattctcctgcctcagcctcctgggtagctggaactacaggtgcacgccaccatgcccagctaattttttttttttttttgagacgaagttatgctcttgtcgcccaggctggagtgcaatggcgcaatctcggctcaccgcaacctccacctcccgggttcaagtgattcttctgcctcagcctcccgagtagctgggattacaggcatgtgccaccacgcccggctaattttgtacttttagtagagatggggtttctccatgttggccaggctggtatggatctccagacatcaggtgatcctctcgcctcagcctcccaaagtgttgggattacaggcgtgagccaccgcacctagcctaatttttgtatttttgaaaagagacggggtttcactatgctggccaggctgatctcgaactcctgacctcatgatccgcgtgcctcgtgatccacctgcctcggcctcccaaagtgctgggattaaaggcgtgagccaccacacctggcccaggttttctttttaaaaaaggaaaaaaactttgttccagcagtttgtaaaccagggcaatgcagccttctgtacaaaggtgcattccagggaacaaagagaacaaagaaagaggtcgtcttttgtagagaacttcctgcccaggttcccactttggtccacttatgcaaatgaggaaggcacacttgcttagttctgattggttaatacttgctgagttcagattggtcgatgcaggtcacagtcgatgggttgattctggcggcataaacaggaacagatagctgtgaaaccatcccagagttaagtgagagtgggggctttccaggaacgcagaatgtgtgtgtgaccctagtcagcaaatggctgctaggtcctactttgaatttaggcccagttagtaacttgggatccatcaagaaggattggctctttcagggttcacaaagttattggtgaccttttaaagatcaatttcaatggtatgtgggaattgaaggcaaggaagtggagatagccactgaaaataatgtttctaagttcttaaagacagccagaaacagggctatggcaggaggacagtgtgggtcaagggaaggttgttgattgtaatcaagagacaccagagtgtctgggcttggtggctcatgcctgtaatcccagcactttgggaggccgaggcagtcagctcacctgaggtcaggagtttgagaccagcttggccaacatggcgaaaccccacctctactaaaaatacaaaaactagccaggcgtgatggcgggtgcctgtaatcccagccacaagggaggctgaggcaggagaatcacttgaacctgggtggcggaggttgcagtgagccgagatcgtgccactgcactccagcctgggtgacacagcaagactctgtctcaaaaaacaaacaaaaaccaaaaagagacaggagagtcattcatgctgatggagtgagccaggtaccaggatctcgatatctaagcatgcccccttctccaacagcctccttaccttcctgcatgaaagcacacccttccctccagtcccccattcctttattctgctgtatttttctccataacacttaccacctttgaacatactacatatacaacatgtgtctgtctagcaactttgctgtctggctctcttccctagaatttaagctgtgagaggccgaggctgctgtctgcctggcttggggctgctttcctggtgtctagcacagagcctggcctgtttcaggggctcagtgaaacatttgttggctgaaggaatgaatgaatggctctagcagaggggcagaaactaacgatgcaggaggagagagctgggaagggatccagagccagggcctggcaggaagtgtaggtgtgtcctccctgatcgcagaggaggagagaggctgcactttgaggggtggaaagacaaggtgaatccccctgctggtcatcagcttgtgcggctctgtgggtgtaaaagagtggtttggagcatgtgaagtgagtcttccaggagatgaaggggattgccaggccgtttgtgatgatgctgagatctggtgccgtgcagcctgcttctgcgactctcctcatcaggcgcaggcacagagtaggtggagagttgagccagaaccacgatgtctttggcacagcctctcatctgtcagatgggagcggggaccccggagagggagtcagccgaggtcctggcattccttgtgaacccccgtctgtgggtttctggtccagtgtcccttctccagattagatggcttaggcctcctctaagggggtgggcgtgcacatccggagagctgtctggtgtgcaggactgggctgcaggttaccctgaactgcaaccatcttagagcaaggcccagcttgcagcaggaggagctgcaggccgcccaccctagccacggcccctgccctggcaggaagcttccaagagtaaacactgcctaatcgtcccgcccagtagtgagcaggcctgtcccattccatactgaccagattcccagtcaccaaggccccctctcactccgctccactcctcgggctggctctcctgaggatgcaccagcgtcacccccgggcaagatgccctcccctctgtgtggccggaatccttgcctgtggctttctcctgggctgctggggaccctcccatttccagcaggtgggctcatttgcaggagcgggggtattctgggagcctctgggtggggtattctgagctacctggggcgaggggagtgccaaatagctgactacatcagctttggggtttgcgctgggcaggggagtctgtacttggggctttgggggatgaagtgtgctcactgaagagggagttggtgtctcagtacgacctgctcattcggtgaagctgaacagacagatactagtttgtcccaaactgtgtaggttgctcttctctgcctctcccttcctctccctgtctctgatttccccctctccttcttggttggcctcacccacctcctgcctcctgtctccctcttcatccatctctttttgttcttttttctttctctctctctctttttttttttttttttttttttaagacatggggtcttgttatgttgccccagctggtctcaaactcctggactcaagtgatcctcccacctcggtctccccaagtgttaggattacaggccagagccactatgcccggccccatccatctctttttgtcttgcagagttgtcttcaggctttggagccacaggccgtgtcttcttacttgagccctggtgctcccttaaaaggtacttgtcctggtgtcttctctcccggggggagtttctcaggactttcaaggggtatctcaccactgagtcagtggtctgggatttttggtggatctggaaggagaaggtcagagaagctgctgtcaaccctgttaattaactctgttacttcctgccaagttgatataagctggtctgggtgttccagccaggccagggttctcaccctagcttctgttaaatatcacaagggaacggtcaccgattggctggcccctcctgccccatggcctctgctgagctggctgattttcaggagctcttgtggtttctgaccgtggatgtaaatatttattccttctgtgggaaacaagataggtactggctcaggctacctcctaaggccatggatttccttatgataaaggcctgtccccattgcccacaggcccatgtctgtgaccttctccggtgcgagcccccttcccagtagggccattggcaacttgactaatggctgatgggggccagaggcaggtgggctagtggtcaggggcaacaggagggcaaggcccactttgtgacctggttctttgtggtctaggccagaggcacactgaccagtgcctggggccacgctgggggctggatgcagccgacgctgtctgggtatcccatagcctgggtccttccagcgctgccgctcctgaaaggctgggagatcattgcccagggtccctgaccctctaagggctcccttgggagaggacagtgagggctggcctgggcccctgcttcccaagagaccactgggctccactcgtgttcagtttcctgtcggggtccatgatgttacttgtgaaacacctgtgcccagagcagggtccaggaggcagggcaggggctttcccctttgggcagagccaccagggcagtgggaatcttgtcttgatggggtgacccaaagcacacaatagcccaacagctcctcctgggccctgccctttgcgtgcctagtcactaatggggtctggctcttggggtgggggtgacacgcaatgtcttgacttcggaaggccatccttccaagacctgccagcccctttcctgttagctttccactgcttgctctctagaaccatcgccctctgctctccctctccccctccaggccgccctccttcccctggcttccagaggcagaggcagaggcagaggcgggctgcaggcggcatcctacacctggagctgctggtggccgtgggccccgatgtcttccaggctcaccaggaggacacagagcgctatgtgctcaccaacctcaacatcgtgagtgccccacgctggactgtgcaggtccccacggccagggctggtgaccaatgtctgtgggctggtgtatctggtagtctgaatacagtgggttaaactcaggtagaatggctcggggttcttcctcttctccctccctcccctgggtggaggtgggtgaggtcccacaccctctctaggctccatggcacatgcacaccctgcagcctctcactactcaagtcccttcacctggggccaccctcaagcctggcctcttccccagtatccatttgacccccacaaagctcagctaaagcaaccctggcaaatgggatacgggctgctcacactgccctctgcaccccgaccctgccctctctccattctcttgtcccccgctcagagtggcgaggacaggtcacccgtctgaagtctaaacagagactgctggcaaaggagatgcccaccttcatttcttgctagcacctgaatccctgcagccccccttcacttgaaagctggggaagggcgggcagggaagcactcccccactagccgccgtctcagaaagacaaacaaggccaggcgcggtggctcatgcctataatcccagcactttgggaggccaaggcgggtggatcacccgaagtcaggagttcaagaccagcctggccaacatggtgaaaccccgtagctactaaaaatacaaaacttagctgggcatggtggcaggcgcctgtaatctgagaggagcctgcgatctgagaggagcagcgtttgaccggaatatccgactcgtgaccatctgtgtgctctcatccccttgctttggagtttgttttccttgcgttagttggccttcctgagccatgagctgaggagcaacagaggcacggctgactgtgcagcacattttaggagccccccgccccgcccggttcccacacatgctggtggagtagcctctccagctcttcacactccgggggcccctgggagtcagcagctgcctggggctggcaatgcccacccgacgggttacctctctcatctgcccttgcacagggggcagaactgcttcgggacccgtccctgggggctcagtttcgggtgcacctggtgaagatggtcattctgacagagcctgaggtaggcatggagctggaactcagcacaccatacagagcgggaagcccaagtcatcgcatctccatcctctttaacctcttgtcccggatgccccaagcagcatggatcacagaatgcattcagccagacagaccagctgccctcccagctctacccagcactcagcacaggctgcctgactacttctctgagcctcagttgtctcatccctaacacgggctagtcatagggttgttaggaggactaactgggaaacaaaccgaccgcagtcagcaccgtgcctggttggggtgtcctaaatgcaggctttgctgtgggtccgcagggtgctccaaatatcacagccaacctcacctcgtccctgctgagcgtctgtgggtggagccagaccatcaaccctgaggacgacacggatcctggccatgctgacctggtcctctatatcactaggtagccgagctttctgatgggtgctggccagccagcctgggaaggctgctccctcagcctcctgccctctgcaaaggtgaccccagggcaggcacgtgccttggcaccacccaagtgactgttttctctcaccgaggtttgacctggagttgcctgatggtaaccggcaggtgcggggcgtcacccagctgggcggtgcctgctccccaacctggagctgcctcattaccgaggacactggcttcgacctgggagtcaccattgcccatgagattgggcacaggtatgtagccccaccagctgtccccaggatctggcaaggagctgacctgggtacccagggtggaggtggtcttggcaagcagtgggtccttgtagagtttctccagaggagcctgtacccctcaccccgacagactcaggtgtgaggacaggggaacctgatactgtttgattaaaagaactttttttccaaaagacgagcaagacacctttagcaggtagaaaataacttctgtagaaaattcaggtaaagaaagagcaggctgtaaaaattatctcaaatcccaccatttagagataatgtctcttcacattttgtatttaatttcagtcttttctttacatacacacacatatttcttatttgcaaaattgggatttagtttggatccctgaaaaaaaggaaaattgtgattatgctgtgcattgctttgttacctgctatttctttttcttttcttttcttttttttttttgagatgaagtttcgctcttgttgcccaggctggagggcaatgacgtgatctcagctcattgcaacctccacctcctgggtgcaagtgattctcccacctcagcctcccaagtagctgggattacaggcatgtgccaccacgcccagctaattttgtatttttagtagagacagggtttctccatgttggtcaggctggtctcgaactcccaacctcaggtgatccacctgcctcggtctcccacagtgctgggattacaggcgtgagccactgcatccagcctttcttttttcttcctagggtaagtgcaggatttacctgttctttatgtaataatatatcccaaacattatcccaggtatcttagaggtgtgcaccgtaatttatttaatcagtcccctcttcttggatgtctaggttgtctgaacacgtcttcctgttgtgaatgttatgcattcttgtgggcaaaccttcactcttacctataaccatttacctagagtgatgggtttcttttcatttctttagttttttaagtatgaaaataatacccaattgttgtaaaaattcaaacagtgcagagatttctaaagtaaaaagtgaatttccacattccttgcccaccaacccccacccgacccctttcaacccctctgagcctgggagggttgaggcagggttcctgggtgtgggacaaggcagggctccttctccctcagagggagcatagttcccttctgctcctgtgatgcagaagacgtgagcccccaaactggggcttagcctgggagggttcttggcttcaccgaggaaagaattcaagagggagcaggtggtgttagacagcaactttgattgatgtggcagtgggcagagtgtacagccctgtgactgtatacagcacagcatagccccttttgaagccaggctaccccatagacactgtgcccaaaagagcagctcaaaggcagggctgcagtcctagttaatacccacttctaattatatgcaaattaaggggccagattatgcagaaatttctagaaaaagggcagtaacttctaggttttcgtcatggaaaaggggcagtaacttctgggttttgccatggcaatggcaaactggtatggcacactggtgggcgtgtcttatggaaaggggcttcccacccctccctgttttagctagtcctctggtccagtgtccaagcggggcctccagagtggagtccacctcctacctcaccggtgcctggcctctcccaccccattaggagtcctccatcagttccgctttgggtaaagcaagctctgttgtgacagtttggaaacggttcaccttcctggcctaggaatgcaaacaatggccaagggcaagcacgttttaactgaactttaaaatcgtgctttcctcacagtaggtgaatttcacgctcaacacatccatgtaaacagtccccagagcagcccttcaaggccccggccagtccccacctccccacagactcctaacaccatgatttaatgtggcttgcacatttttaaaggcttttgatatttattagcaaaagatgcgagagccaccctgctgggctagcgctcccttctgggggaaactgaggcagggcgcacgcgaccctctccactgcgcccagttagcagatggcggcgtcaggggtcgacccgggtcggaaaactcgctggcgctgcggcactagggcgccgggccgctgactcgccgacccccgtcccgcccccacccccgcccccgcccctgccggccgccttagcgcaactccccgccccccgaccagcttcggcctggagcacgacggcgcgcccggcagcggctgcggccccagcggacacgtgatggcttcggacggcgccgcgccccgcgccggcctcgcctggtccccctgcagccgccggcagctgctgagcctgctcaggtagcggccgccccgtgggaggggcgcgcgagcctccagccagcccgctgggccgccagcgccacctctctctacgtccgtccccactccgcattcagccctccttcctgtcccacccctccgtccaacccacccctccgtccaaccccgcgcccaccgctccgtccgtggaggggcgggcgcgcgagcctccagccagcccgctgggccgcccgcgccacccctccctacgtccgtccccacctctccctacgtccgtccccactccgcattcagccctccttcctgtcctacctctccatcctgacccactcctccgtccaaccccgcgcccacagctccgtcccatcccgctgcgcccactcctgcgcccacccctccgtcccaacccctgcacccacccccccgtcccacccacctgccccaccccctgcacctccccccgtgctgtcccactctgcggccacccttctgtccaacccctgcgcccaccgctccgttccaccccctccctgcgcccacccctgcgtcctccctcgcccccttgcgcccacactttcgttccagccaatctgggcacgcacccctccgtccatccccatcccgccccttgactccacatacactccctggttctctcccacttgcctacacccacccctgcatcctaccctcctccatccacccctccatctcagccccctgcacccaccccgttcctgggcccaccctgttcctgcacccaccccctcacttcacccccttacccttcgtctgcctccacccgcccctacccctccgtccactctccacgctccatcagtcccacacccctatctcccccacccgcgtacatgtatccctgcgtccccttcccgccgaccgcaccgctcccgggcctaacctgcatctgctccatcccactcagacccgtccctccgtcgccgctccctctgctggccacccacctctgcgccggcaggagccttagtcttggtcccagccaagagccggctcctggtggggggcgcgggccgagaactcctgttcccactcacaaaaggccacgcttccaaacgcttccatcctcgtgcccactcctccgtcccgcctcctcccggtgtacaccccgggactgagccgggcctgagccgggccttgtcgcagcgcaggacgggcgcgctgcgtgtgggacccgccgcggcctcaacccgggtccgcggggcacccgccggatgcgcagcctggcctctactacagcgccaacgagcagtgccgcgtggccttcggccccaaggctgtcgcctgcaccttcgccagggagcacctggtgagtctgccggcggtggcctgggattggctgtgaggtccctccgcatcacccagctcacgtcccccaaaacgtgcatggtgagaacctgctgggtgccgtgctaggctgaggtactaagccagggcggcttagtttaatgctgtctgtgccctctagaaattatttaaaatgtttgaacaaaagctccaacatttttgtttgactgggccccacaaattatgtagctagtcctgggagggcccctgtgcccaaggactcctggctgagtgaggacaccaatcttaaacagttaccaaggacttccccatctattgtggctggagtcagactggagggcttcctggaggaagtggcctctaaactgaacccacagcagaagtggggctggtagggggaggggagatgaaggagagcaggcaccccaaaagacagacttcctcgcaggattgcataggacattcatgggctccaggcacttttgccttgatgggccccttcctccacaaaaaaattgagaattatgttttaatattcttatacaatgtataaagttttatgtgttactataaatacaagtctttttttttcctatttttttttttttttgagacagagtctccctctctgctcactgcaggctccgcctgccagattcacaccattctcctgcctcagcctcccgagtagctgggactacaggcgcccgccaccacgcctggctaattttttgtatttttagtagagacggggtttcactgtgttagccaggatggtctcgatctcctgacctcgtgatccgcccgccctggcctcacaaagtgctgggattacaggcatgagccacagcgccccgccaagtctttttttttaaattcttttgagacagggcctcgttctgttgcccagggtggagtgcagtagcacaatcatagctcactgttgcctcaacttcttgggcacaaacgatcctcccacctcggccttggagtagctgggactacaggcacatgccacaatgcccagctaatttttaaattttttgtagagatggggtctccctttgttacccaggcttgtctaggactcctggcttcaagccatcctcccaccttggcgtcccaaagcactgggattacagacatgagccaccacccacgcctgatcagcaaatctattaatattatatattacaacattaattttgacctggaagttcattttttcatttttttttttttttgagacagagtctcactctgtcacccaggctggagtgcagtggcacaatcttggcttactgcaacctccgcctcccaggttcaagtgattcccgggcctacgcctcccgagtagctgggactacaggcatgtgccaccatgcccagctaagttttgtattttttagtagagacagggtttcatcatgttggccgggctggtctcgaattctgacctcaggtgatccgcccgccttggcctcccaaagtgctgggattacaggataagccaccacacccagcctagttcatttttttcttctgattttattttatttatttatttattttgagacggagtctcgctctgtcacccaggctggaatgcagtggctcaatcttggctcactgcaagctctgccttcagggttcaagccattctcctgcatcagcctcccgaatagctgggactacaggtgcctgccaccacacccggctaattttttgtatttttagtagagatggggtttcactgtgttagccaggatggtctcgctctcctgacctcgtgatttgcccgcctcggccttccaaattgctgggattacaggcgtgagccacagtgcccggcctttttccttctgattttaaaagaaattaggccaggtgtggtggctcacgcctgtaatcccagcactttgggaagccaaggcaggcggatcacctgaggtcgggagtttgagaccagcctgaccaacatggagaaatgccatctgtgctaaaaatacaaaaaattagccgggcgtggtggcgcatgcctgtaatcccagctactcggaaggctgaggtaggagaattgcttgaacccaggaggcagaggttgaggtgagccaagatcgcgccattgccctccagcctgggcaacaagagcgaaactgtctcaaaaaaaaacaagaaagaaaaataaattaaaacatttgcctcttgagcttcaagtcagtgacaagttaagaaggaaaaaaagaaaaaagacacaaaaaacacatttccatgggcccccaaaagtgtgacaggacctggtcatggtcccggttccccatcgatgggtcagtcatgccttgtcctctgagggcaccagtgcccacggtgcagagtgttggctgtgtcagtgtgtcctgcagtctgggagggacagttaaggttggacactggcctggaaggccctggtggcccctgagctcgccacccacctgtccaccctcctaggatatgtgccaggccctctcctgccacacagacccgctggaccaaagcagctgcagccgcctcctcgttcctctcctggatgggacagaatgtggcgtggagaaggtcagagccaagagtgaatgagtgggctcctgtgagcacgtgcacgtgggtgcctccagccaggccgccctattcctaggtcaggaggcaggaccagtatggggcagagagtcttggagttggccttggggactgtcctttgggttggtggtctgacctctttcctttagcatttgctcccatgcagaatgggaatgtgggctgcctgttgtatggggggtgcccatgggtgtggggttcctttgggtggggtccctgtgtgaaggtccttgtggatatggggtgtctcgggggggatccctgtgtaaggggtccctgtgagtgtagagtccctgtgggtggggtccttatgtgtgtgttggaggatccctgtgtgttgaggggtccctggggggttctgtgtgtatgttggggggtctctgggtgttggaggatccctgtgggtctgggggatccatgtggctggggtacctgtgtgttggggggtctctgtgtgtgttggagatccctgtgtgttgggggatccctatgggtgagttccttgtgtgtgtttgggggtcgctgtgggtggggtccctgtgtgtgttggggatccctgaggatgttgggggactctctgtgtgtgttgggagtcctgtggtggggtcactgtgggatgggagatgaagccatccttgccttgcagtggtgctccaagggtcgctgccgctccctggtggagctgacccccatagcagcagtgcatgggcgctggtctagctggggtccccgaagtccttgctcccgctcctgcggaggaggtgtggtcaccaggaggcggcagtgcaacaaccccaggtaccgcagggagggtgcttttctgtcagggagtgtggccataccatagtccctagttgaaggcagtggtcaccctgctctctcaccctcctgtctgctgggcattttcagacctgcctttggggggcgtgcatgtgttggtgctgacctccaggccgagatgtgcaacactcaggtaggcctgcttcctggggtaggagggggcagctggtggcaccgggccctgggggagccaaagtgaccatctgtggttcacaccaggacacatttgagaaggacattggggccaggtgaggtggcttatgcctgtaatcccagcactttgggaggccaaggcaggtggatcacctgaggtcaggggttcaagaccagcctggccaacatggtgaaatctcgtctctacagaaaatacaaaaattagccgggcgtggtggtgggcgcctgtagtcccagctactcgggaagctgaggcaggagaatcacttgaacccaggaggtagagcttgcagtgagccgagattgggccattgcactccagcctgggcgacagagtgagactctgtctcaaaaaaaaaataaaaattaaaaaagagagagaaggacattgggaccccagttcataaaccaggccagtcctgctgatgcccacagagcccctgaagcgtcccgcctccctccctgagtgccactttgccctccagagcgcatctctgcagggagaacctccccactaggaatacagtgcgctgctgcatgcctgcaaaggaattttttaaatattatttttatttttttagacagagtctctccctgtcacccagactggagtgcagtggtgctatctcagctcactgcaacctctgcctcccaggttcaagcgattctcctgcctcagtctcctgagtagctgggactacaggtgcccgccaccacgcccggctaattttttgtatttttagtagaggaggggtttcaccgtgttagccaggatggccttgatctcctgacctcgtgatccgcctgcctcggcctcccaaagtgctgggattacaggtgtcactgcgcctggccgaaggagtcttttatttataaattgaggtgacattcatgtagcatgaaatcaagcattttaaagtggcaactcagtggcctttagtacactcacaaggttgggcaagtactgcctctgtctagtttcagaacgtttccagtactctggagtactctggagtgaaccccatatggtaggctgtcactccccatttctcctccgccactcagcggccattggtttcccttctgtctctgtggattgacctgttctagacatgccacgtacctgaggccagacaacaggtgtgcttcctgcctgccttcctcccccagcggcacgtccccaaggctcacctgtgttgtagcctgtgtcagcgcctcattcctctttctggctgaatcatattccactgcagggatagaccacattttcatccagtcgtctgctgatggacatctgaggtgttttcaccttttggctcctgtgaacagagccgctgcgaatgtgcttgtacatgtttgaatccctgttttcaattcttttggcagtatgctgaagagcggagttactggatcgtatgggaattgtatgtttgacttttttttttcttttttttttttttgagacagagtcttgctctgtcgccaggctggagtgcagtggtgcaatctcagctccctgcaaccttcgcctcctgggttcaagcgattcccctgcctcaccttccggagtagctgggattacaggcacgcgccaccatgcctggctaattttttgtatttttagtagagatggagtttccaccacgtcagccaggatggtctggatctcctgacctcaggtgatctgcccgccttggcctcccaaactgttgggattacaggcatgagccaccgctcccggcctatgtttgactttttttttttcttatttttttctttctttctttatttttttttttttagagatggagtctcgctctgtcgcccaagctggagtgcggtggcgcgatctcggctcactctaagctccgcctcccaggttcaccccattctcctgcctcagcttcccgaatagctgggactacagacgcccgccaccacgcccggctaatttttttttgtatttttagtagaggcggggtttcaccatgttagccgggatggtcttgatctcctgacctcgtgatctgcctgcctcggcctcccaaagggctgagatcacaggcgtgagccaccgcgcccagcatgtttggcttttaaagaaactgccaaaccgttttccacagtgcctgaactgtttcacattcccaccagcattgcgccagggttccagtttccccacatccgctgcagcacttgctgttttctgttgttgttttttcttttctcttcttttttttttttttttttttaatagagatggggttttgtcatgttggccaggctggtcttgaactccgaccccaggtgatccgcccaccttagcctcccaaagtgctgggattacacgcgtgagccatggcgcccggcctgttttctgttttttgattttggccatctcggtggtatgaaatggtagaaagattctttttacattgagttaaattctatctcctgcttcgatggccctgggtgtgggtttgtccctggctgtattacagttctgcatgtggtgagaccctccctttcctccttctccaaatggaccaccaagacctccccagaccgtgaggggagggtctttggctggagcacagggtggtgggatttcgtggaggcagtgtggtcagtgtggctgtccagggagtcaactccggttatcttctgtcagcccataaaagtccaagacgcctgcctgagtgcagaggcttcggtggtgaggtctttgctccatgctttggttacctgcctctaggtgcactacctaaagaatacacatccccgtccctgttttattgagttcaggccttggaagcagaggctctgagcgtaatgctctttcctggctttcttcttcgttgctgccctgtgttctttacggattccccggggttttcccatcaatagagagaggcaggcacttttgtcaccccagtttacagagcagggaaccgaggcacggcctggagctgaggccacacccacatcttgatcctgtactgtagggtgccatgtagtctcccagtgacaacacccgccccccgccccaccgccatccccctcctctgcctcctcctggccaggcctgcgagaagacccagctggagttcatgtcgcaacagtgcgccaggaccgacggccagccgctgcgctcctcccctggcggcgcctccttctaccactggggtgctgctgtaccacacagccaaggtggggcctgcggagtgtggggttgggggaggagccagccctggagaccctcggacagggcagagtcataggggggttggcctactatccctccagcactgggcaaagtggttcaggctctggcatcccacagaccatggatgacatagtggccaggcctcgctggtagatcaggcactgacatcccatctctgagtctcaatttcccatctgtgaaatggagataatagcagtaggtccctccctgggcgctacaaggattcagggagataatcggaaaatgccaagtgtgttccttggttcatgatactttttttgtgagacagagtcttgctctgtcgcccaggctggagtgcaggggcgtaatctcagctcactgtaacctccgcctctgggattcaagggattcttgcccctcagcctctcgaatagctgggactacaggcttgcactaccatgccggctaatttttttgtatttttagtagagatggggtttcgccatgttggctaggctggtttcaaactcctgacgtcaggtgatccgcctgcctcggcttcccaaagttctgggattacaggcatgaaccattgcgcccagccttggttcctaattcaataccattaattattagattagattaggatcgtgattaggattattgccttaggaggtgggatgtggggaagatagaaacccttgccccagatgcaaaggatgaagctgggtgggggctgggggacttgcccctcctgctcggttcaggacaccctttttcactctgccctcccaggggatgctctgtgcagacacatgtgccgggccattggcgagagcttcatcatgaagcgtggagacagcttcctcgatgggacccggtgtatgccaagtggcccccgggaggacgggaccctgagcctgtgtgtgtcgggcagctgcagggtaggcgtgtgtggacattggcgatggccctggggcctacctgtcctatcggaaggctcctgggggcaggttggtgggtgctggccctgatggagctgcagtgccctctgcaggggagtggtgctggggaaaaggatctggacttggagtcagcctgggttaagggctgcagtgtgaccttgggcaagtcactgagccctctaagcttgcttcctgtgtagatggtggggtgctatagaagtgttgctggttttgtggatcccagaatctcagagctggcagggctgcagagtcattgaggccagcaccctccagtgacacgggccctctgtccttccctttgcatagacatttggctgtgatggtaggatggactcccagcaggtatgggacaggtgccaggtgtgtggtggggacaacagcacgtgcagcccacggaagggctctttcacagctggcagagcgagaggtaggcggcctccctcggggcagaggctgggcttcccccagcctccaagatggccacagcccagagcgttggtgcaggggctgctcaggtcacagggcctgcacactcactcagccctggatgcctcctgtggtgtcagcgtctccctcttccacttcgccacccttctgtggcaggctcaggttttggccttgatgctgctgggactgtggtgcctcagtaatggtcactcactgtagccgtgctgcaaaaaaaacacagacattggccgggcgctgtgctcacgcctgtactcccggcactttgggaggctgaggcgggtggatcacctgtagtcgggagatcacctacagcctggccagtatggtgaaaccccatctctactaaaaatacaaaaattagctgggcatgatggcgggcgcctgtagtcctagctactcaggaggctgaggcaggagaattgcttgaacccaggaggcagaggttgcagtgagccgagatccctctgcactccagcccgggcaacagagtgagacactgtctcaaaaaaaaaaaaaaaaaagtatggacgttgtgcattctgtggcagctaccctcttctctcctgctcaagaaatcccactgagagggacacaagtgaatgagagggttggtagttacatttggaaaatctttgactttggtgtatatatgaggtcaaaaaccatttgcaaatgccagtgcttctatggagagcagagacttgagccctgcctccctctggcttgccccactgtgctggagaaccttggacccggtcccttctcccagccagggcagagccttggcaggtggtcctccagcctgcttttaattgcccccatgacaggggactcactgctgctggagccagccccatggcattgttcaatttttcccgaccagctaagatcagctccctttgtctgtggtgtggtggctgtgaggtccacgcatctctccttcttttcttctttctagaatatgtcacgtttctgacagttacccccaacctgaccagtgtctacattgccaaccacaggcctctcttcacacacttgggtgagttgactggaggactcccacccagttagctagactgcaaaggtgcagagcactgttgccaagatgccctcacttctgacatcacccgcaagttcagggggttccccaaaccaccctcaggcttgatagttgactaggaagactcccagagctcactgagagctgtggcacatggctgcggctccttccagaagaacacaggttagaattgtccaagggaagagatgtaggcagagtctgggagggtccaaccaggaggcctgatgtctcagggatgtgacacccttctagcattggagcgtggccatacgcatggagtattgcccacacagaaagcccactgagtgggagttgagagtttttcctggggtttgagtgcaaagacatgattgactaattggccaggtggatactctcagtctcttggtgacccagcccctatcctaaatcacatagttggtctttctggtacagccagcccctgccctaaaggaggacacttctgcctggtgtgacccgtgtttcctcttggaagccaacagcaaaagctggacttctctttgggcaaggcccgcttctttgctattgagggccacagtgggtctttctggagtgtgtctgcacctaacctttgaagccttggttgccggcacttgccatggggtccctgagccctgagcctgttgagttctgtgcgtgagtgcacttggtcatagcactcaccaggttgtggaaagaggcctagagcctccgctgtggggaagcctctagctcagatgcctgtggctccttagaggagggctggggaccccgggaaggagagtcactgacatgtgcctgtgaggaggatgggtgctcagctccacacagctaacagggctggttccccgacagcggtgaggatcggagggcgctatgtcgtggctgggaagatgagcatctcccctaacaccacctacccctccctcctggaggatggtcgtgtcgagtacagagtggccctcaccgaggaccggctgccccgcctggaggagatccgcatctggggacccctccaggaagatgctgacatccaggtcagcaggagagcctgggggaggccagtgggggcttcttcttgggggctatggctgcttgctcgtttgtctatccatccattccctgattcgttcatttattcattcagcggtcacttacaggggacccactatgtgttgggccctgtgctaggcaaaatgtagctagctcctccaggggcttagggtcccacaaatatccaaatgtgcctgtgcccagagcccgtgggagaaggccctgcagttctgggatcaggtaaggttggagggcccaatgcaggggtccagggctccctgggaaagagtgatggagctgaggtgtcagatgagcagatgttgctgggccaagcagggaaggaagcgtatggctgagggaacagtgtcagtgtgggagggatgaaggaaggtcctactgtgtgggtttgtggggagatgaaggcatggacgcaggtgcagtggcatctggggagtaggccttggtgctgaggaagctgagaacagatgctggctctcactgcttctttggtgcagtgtgtgtgggaaccggaaggccttgttcaggcgtgtcctcagtgacgtgtgctcgcccatgtatgtccccattggtgcttcgctgaggaaggcacgtggagggtggagagacataagcgcaggctgaaacagacctgagaaccttgggagaggggcccagtctcagcggccggagcagcgtcctctgcccctacagcagccagagacaggagggcctcccacagatcaggccaggccgggccaaagcaagcccctgtgagcggcttatcccttctcttcccctgatatggttcccttcctcccctccccttgcctgggacattgtatccagatgctagctgccgagtggctctcccatcatcctctgcagtgtgtaaaaaagcagattcccgggtcctctgcatattccctgaatcaggacttccctgtgttgggcctgagaaaccgcaccgtaaccaacacaggcttgcggcactggccagatgtgggcatcgagggggcaggtgcggaatgtcacctcgccctgggctctggcctccaggctggcctctttcttgggctggtcttgggcacaggacccagttaccctcctgaagagccttaggcccaggaacctgctgaagttcttcctagtgctctccgggccagtcccaagccagtagctggccacaggtccccagggatccagtttcttcctgccgaccctaccacaggtccccagggatccagtttcttcctgccgaccctacgggcctcagctctggctccagaagcactttctgtgctggccctgccctagcccttcttgggctccttagcccagcctaaggtgggcctgcctcctccactgcactttatcctctacccagccagcttagggaaccttctctgtgctgcccaaataccctatcatgtaacccaccaatgacttggtaattacctccccgagccctctatcccaacccactgagagctccttgcagctcagccagtgtcctgtgcactgtgctatccccagagcctggtacaggtcagtgttggtgattgcttcccgttatttttgtctttgttgtttttttagagagggtctcactgttggccaggctggagtgctatgttgcccaggctgctctgaaactcctgggctcaagtgatctgcctgcctcaggctcccaaagttttgggtttacaggcatgagctaccgtgcctggccagtgattgcttgctgaacgaaagattatagggatgcaagaagaagttggaaggcttcccaggggaggtggccatgacagtgaccctcagggaacccactggacaaggcctgaagctctttgtctgcaggtttacaggcggtatggcgaggagtatggcaacctcacccgcccagacatcaccttcacctacttccagcctaagccacggcaggcctgggtgtgggccgctgtgcgtgggccctgctcggtgagctgtggggcaggtgagacctggggaaggctcatccacagcacggcttgcccctgcagggaggcggcctagccctccctcttccctcccagggctgcgctgggtaaactacagctgcctggaccaggccaggaaggagttggtggagactgtccagtgccaagggagccagcagccaccagcgtggccagaggcctgcgtgctcgaaccctgccctccctagtgagtgtggtgctgtctgcgcagctccaagggggagagagggttccgctggggctgctgggctctgtccctggcctatggggcccatgtggcagggccgggctgagctgctcctgtgcaggctctcattacccctgcccacagccctgcaaggggggctctgtgagtgcccccattctgcaggtgaggacactgaggcttggggcagacatggtgacaatgtcagcccagtgggacccacacctgctgccaccttgtctgggccaccgaggcctctcttgagctcaggtactcatggtgagatggaggtgattgcctacctggagggttgtagggagacttgcggagctcctggtgcaaagcccctggctgtcaccacacctgacggggcacactgttagggacgaggccattcctgctgggtgcaggacagggcagctgctcaccagcctgtgattcggttgtcctcaggctcagccgtctggcagcctgggaacacctggagaggctaggctggccgtagtgcccattgcttgtcccagaccgggggagtacatcagcacctgccaccccatcaccccaggccagcctgggacctggccagggtcccgacgctctgtctccttcctcagctgggcggtgggagacttcggcccatgcagcgcctcctgtgggggtggcctgcgggagcggccagtgcgctgcgtggaggcccagggcagcctcctgaagacattgcccccagcccggtgcagagcaggggcccagcagccagctgtggcgctggaaacctgcaacccccagccctgccctgccaggtgagcccagggctaggtggggctgggagagggccttcctggcagagctcgtccctgcgctgagcccccatccttctgagaatcccctcctcctgaggcctccggcggggcctcaccatccagggtgatgggcagtgtcacctggcggttgtaagtgctgctgtcagagttccttactacccaggagagcctgggcccattgtttccctctctgagcttccgagcccctgctctgaaatggggatgccgacctgcctggggagggggggcttcgaggatgaggtcaaactgaacggagtgggagatgtcactttctcatcaccaccatctcccccgtgcccacgtggctgcatctcatcccctcagtgtccaagttgacagtggcttatcatcctgccctgccactaacgagctgagtgacagggcaagtcccctcctctgtgggcttcagttttgcgacctgtccggtgggaggggattggtctggattgttggtggcccactcatagctctggactcctttccccgcctcgtcatccgtggcagacaaaacagtcaccactcttccccgctgaggccagatagggcctcagaatccttctcacacagctctccaggcagccactttagcgcagggctgactcacagctgaaacccattggccacccttgaacctggtgatccaattccatgtggcacctgtttctctgcacctgctatggtgcatggagtcagtgattacctggctggaggtcggcctctgcctctggagagtaggagggatgggttctcttttttttttttattaaaagacagagtcttgttctctcacccaggctggtatgcagtggcatgatcttggctcactgcaacctcctgcctcagcaagtgtgcgccaccaagcccaactaatttttgtattttttgtagaaacagggttttgccatgttgcccaggctggtctccaactcccgggctcaagcagtctgctcacctcagcctcctaaagtgctgagctaccgtgcctggccagggataggttctgtctctgcaccctgggtgcaggtggggtgcctgactgttgagcagcgagtgcttgttgaatgggaacctgctggctgatgaatggggaacccggtgcttcagggagagaccctgagcttcacttctctgtggggctcctctttgggctcctggatgttggggagcaggtccccttcctccctgcccctagcagctgggctataccttcccctgggtggcagaggcagggcctgatgactgtctcatgccatcctcaggtgggaggtgtcagagcccagctcatgcacatcagctggtggagcaggcctggccttggagaacgagacctgtgtgccaggggcagatggcctggaggctccagtgactgaggggcctggctccgtagatgagaagctgcctgcccctgagccctgtgtcgggatgtcatgtcctccaggctggggccatgtgagtgccctgggcatgagggtggctggggctgttgagtcctttacctggctgggagaacgaggagcacccattgccaccgtcctccaggccagagcaagaacaccatccttctgtgggaatgctgtctgagggccacccctgctcagaaaagaagcttagaaagagggctcagggcccctgggaaggctcccattccccttgcaagccgggctgagggaagcatctgaggagagtgtaatgcagctgctgtgcagagaaatgctgccaggctcccgcctggcgtccaggggctggaggctgactggccttgctctctggcctgggtgctggcaaccctcgcccctcatggctggggggattgcagggccaggcatgctcccatgtcccactcttggtccccagctctcggccaggcccacagtgagcactcatgctgctgaggagcctgcaaaggtggggtgtgcagcaaggatacccgctgcgagaccggggagccgatctcgccaagggaggaggggagggagcccctggtgcacacacgccacttcctggtctctctgctgctgcctgagaagatcgagacggggatcgctgggtcctcagaggaggcccagacccaccagcttgttgctattccccacagctggatgccacctctgcaggggagaaggctccctccccatggggcagcatcaggacgggggctcaagctgcacacgtgtggacccctgcggcagggtcgtgctccgtctcctgcgggcgaggtgagggcccccgggatgctcctggggaccagcactcatggtaactctcctgtccacttgcatcttgcctcgttctgaaaagcatttgaggtggattgcagaaaatccagactatatgggaacacgtggtaatacacaaggagactaagcatagtagctgacagccacttcaaatgtgggtgttgattggctgaaaggtaggaaaagacaataacgcccggcagtgtggcacgagagccattccttatggtcctagcagagcggccggggggtccccaattgatgacccgagcagagaaaccttagctttaagatacacagcgttcttctattttcccaatcttgttttattgcagtataacacagatattataaaatttaccatccaaactgtttctccctgtgcaggtcagtggcataaaagcacagtcacattgttgtgcggccatcaccaccaacctctccagaacttttccagtttcgcaaactggagctctgtccctgtgaaacacgaactcccatttccccctccgcagcccctggcaacctccattctcctttctgtctccagattccacaattctagggaccttgtagaagtggaatcatatagcatttgcctttttgttactagttttcactcagcatgatgtcctcacagttcatccatgttgtagcatgtgtgagtgtttccttcttaaggctgaaaaagattccattgtgagtgtatcctttacaggtttatccatttattcatcagtggacacttggcttccttccacactttggctattgtgaataatgcttctgtgaacatgggtgtgcaaatatctgtttgagttcctgctttcagttcttttgggtgtatatctagaagtgtggtagctgggtaagatgagaattctatgtttaatttttgtggaactgctggactgttttccccagtggctgcaccattttacatttccactaatggtgcataagagttccaatgtcctcccatccttgccaacactttttatttctatggttttttttgtttttgtttttgtttttgagacagagtctcattctgttgccgaggctggagtgcagtggcatgatcttggctcattgtaaccttcgcctccggggctcaagtgattctcgtgcttcagcctcccgagtagctaggactataggcgtctgccaccatgcctggctaattttttgtttagtagagatggggtttcaccatgttggccaggctggtcccaaactcttgacctcaggtgatctgcctgccttggcctcccaacgtgctgggattacaggcgtgagcccccacacctggcctatttctgtgttttttttataatggccatcctaatgggcttgagaagacacaccatgttcttaaacgaaaaccctgaccacttgctcagtaaaatgtcagcctgtttaaaaccgagaccaaaaagagatttctttttctctcttttcttttttgagacaaaaaagaaaacctctgtcaccaggttggagtgtagtggcacaatcttagctcactacaacctccaccacctgggctgaagccatcctcccccctcagcctcctgaatagctactataccctgctaatttttgtagttttggcagagatgggatctccctatgttgcccagcctgatctcctgagctcaagcgatccttctgcctcggcctctcaaagtgctgggattataggcatgagccactgtgcccaaccaagagattttttttctttttcttttttttcttttttttgagactaagagttttcctctgtcgcccaggctgaagtgcagtggtgtgatcttggctcactgcaacctccgcctcccatgttcaaacgattctcatgcctcagcctcctgagcagctgggactccagctatgtgccaccacacctggctaattttttgtattttattttattagagagggggtttcgccatgatggccacgctggtctcaaactcctgacctcaggtgatccacccgccttggcctcccaaagtgctgggattacaggcatgagccactgagcctatttcttttgaggatattcctaaaagagagacttgagaaaactggccctaataacatctttatgatagacacaatcagagattttcatattgtgatttttttttcttttttttttttttgagatggagtctcgctctgtcacccaggctggagtccagtggcgcagtcttggctcactgcaacctctgcctcctgggttcaagtgattctccgtctcagcctcctgagtagctgggattacaggtgcgcaccaccacgctcagctaatttttgtatttttagtagagacggggtttcaccatgttggtcaggctcgtctcgaactcctgaccttgtgatccgccgcccaaagtgctgtgattacaggcgtgagccactgtgcctggcccatattgcaattcttataatgcctctcggtcaacaataacagctaccatttgtcaagtgtctactgtgtgccaggcacttgttatcttcccttttaaaaatctttataaatgattctgcaaggtagatgccattatctttttttctaaatctaagattcagagggttaagtcagttgtctgaggtcacacagctggtaagtggcagagccgggattgaaacccatgcgggccttatgtgctagaggtgtccagtgagcctgggctgcagtccttgctgagcctgtcccttggggctctgggtctctgctttgtccacgcaggtctgatggagctgcgtttcctgtgcatggactctgccctcagggtgcctgtccaggaagagctgtgtggcctggcaagcaagcctgggagccggcgggaggtctgccaggctgtcccgtgccctgctcggtgagtgaggggagcaagactgtgtgctggccttctccctgtaagtgggagacccgagccttggctccatgcccggtgacctgcggaggggggcaggtgctgctggctgtgcactgtgtgaggctggaccatggccgccccatccccctgcctcactccaagtgcaggccagagccccggcccagcccctttgaggactgcaacccagagccctgccctgccaggtgggccccttcccaaggagacagggggtgctaggtctgcatcctggctctttcctcacctccaagccagaccttttgaccctcagtgtcctcaccagtgggagcaggtcattttgtgcccccagaagactgggggagtttaatgaaaggattagatgcatgtaaagtacatgctaaatgcaatgagtgtaaaatgcatgctcgatgcaacgcgtgtaaagtacattgcacaggatctgggatgctgtgggtgcacatggttgctggtgcgtttcttcatcgcctgctctttatggagcacctaggccccggggccgtcctggagctaggggacacagcagagaacaaggcagacaaatgtccctgacctcctggagcaaatgcagggggaaagggggacagataataataggacaggcggggaatgcagtttgatggatggtgttcagtgcgatgcagccaaacacagcgggaggggaggaggggagggctggcggggtgggctccagggcggtggtgctgggatcactgttgaagacagacatgcagggcccttgggtgcccggacccctgcccccactgtctctgggatacgacatctgtcgtttgccctcacctttctcttctgtaaaatgggtttgtccaaatgttctgtccactctgccaagcctcttggtgaggacacaagggggcctccagaaagagaacctctccgggcccttcccagcttcctgtctcttcctagtctggggaaatgaaggggagacctggctcccctgggttcccaggccctggggctgtttggggtccctgactccagtttgctccaggtggcagtacaagctggcggcctgcagcgtgagctgtgggagaggggtcgtgcggaggatcctgtattgtgcccgggcccatggggaggacgatggtgaggagatcctgttggacacccagtgccaggggctgcctcgcccggaaccccaggaggcctgcagcctggagccctgcccacctaggtgagtcagccggtgatgggaggggcagctcctggtgtgtgcagatgccaggccaggcgctgtggtgtgtgcctgtaatcgcagctacttggaaagctgaatcaggagaaccacttgagtccaggagtgcaagtccaacctgggcaacacagtgagacctcatctctaaaaaaaaaacaagacggggccaggtgtggtggctcacgcctgtaatcccagcgctatggaaggctgaagcgggtggattacctgaggtcaggagcttgagaccagcctggccaacatggtgaaaccccatctttactaaaaatacaacaattaggctgggcgcggtggctcactcctgtaatcccagcactttgggaggctgaggcgggcagatcacctgaggttgggagttcgagaccagcctgtccaacatacagaaaccctgtctctactaaaaatacaaaattagccgggtgtggtggtacatgcctgtaatcccagttacttgggaggctgaggcagaatcgcttgaaccggggaggccaaggttgtggtgagccaagattacgccactggactccagcctggctaacagcagcaaaactccatctcaaaaaaaaaaaaaaaaaaagaaaacccacaaaaattagcctggcgtggtggtgtgcacctgtcatcccagctacttcagaggcggaggcaggagaatcgcttgaacccgggaggcggaggttgcagtgagccgagatggcgccgctggcactccagcctgggctacagagcgagactccgtctcaaaaacaaaacaacaaaacaaaacaagacggggtggggggctcagtggcccaagagccagtctgtaaggaatagggctacctggcaggctgtgctagttgtgggaggtgaagtttaagcaccatgcaggcagggtgcagtgtggggaggcctgggggacagaggaggcagcatttgagcagaacctaaagctgtgagcaccagcattctgatgtggaagacgggagggatggaggtctccacagggacacacacagccacactaggacacgggacagaatcatgttcaagtccgtggggtccggagcccagtggtaaagggcgaacatttgcctacctcatttacaattctttaatggtttctttttgtaggtttgcatttttagtaaagaaatacttttctatatcatacagaaacgtccagaaaagaatgtaacagacatgtatgttccagcactccagtttaatagatagcatcctactgccatgtttccttcctgtccacttacttttatttatttaatttatttattttgagacggagtctcgctttgttgcccaggcagtgatgcaatcttggctcactgcaacctccgcctcccgggttcaagccattctcctgtctcagcctcccaagtagctgggaatacaggcacccacaaccacacccagctaacttttgtatttttagtagagacagggtttcaccatattggtcaggccgatcttgaactcctgacctcaggagatctgcctacctcagcattccaaagtgctgggattacagatgtgagccatcacacctggccagcctccttagttttaaataaatccagttacagataagatttcacttaaatttaggctggtcatggctcacgcctgtaatctcagcacttcaggaggctgagatgggtggatcatttgagcccaggagtttgagaccagcctggacaacatgccaaaaccttgtctctactataaatacaaaaattagccgggcatggtggtgcatgccagtatccccagctactcgggaggctgaggcaggagaatcacctgaaccttgggaagtcaaggctgcagtgagcagagatcacaccaccactgcatgccagcctgggcaacagcatgagaccctgtctcaaaaaaaaaaaaaaaaaaaaaagattttacttaaatttaaaccctgtactaatctgtgatttatttggagtatgttgcaaagtagggaccaaaggatttttttttttttctaaattgttaactagcatctgttggacaagccctgatgcctccaggtggctccttggtggtattggtgtgtgttagaatctatgtctgggctttctactgggtttttttcttctccttttttttttttgagacagtttttctctgtcacccagggtggggtgcagtggcgcgatctcagctcactgcaacctccgcctcctgggttcaagtgattttcatgcctcagcttcccgagtagctgggattacaggtgcccgccaccacccccaactgattttgtgtttttaatagagacagggtttcactatgttggccaggctggtcttgaactcctgacctcaagtgatctgccaggttctgttttttgtgctttttttttctagctattctcttgcccatacaaaattgttttaaatgttgtagctttataaccatttaacatctgtgtcactagtgtgtcctgatttctttgcctatgctaaagtcccttggctgtgtgtcccatttatttttccacatcacatttagagatgatctgggattttatgggaattgcagggtttttcacactgcacgctgcctgcatggtgcttaaacttcacctcccacacctagcacagcctaccaggtagccctgttctctacagaccacctcttgggccactgagcctcccctcacttttttttagagatggggtctcactatgttgcccagtctggacttgaattcctgggctcaagtgatcctcctgcttcagcctcccgagtagctgggatgcaggcacacactacatgagctctggccatccctctgacgttgctgtagccacgctggcctcattgtcctggaacattccagggatactcccctgacttagggcttctgtgctagctctcgctgcctgatgtcttctgtggatatcctcgaggccctggatatccctcccccaggctcggctcagacaccacaactccaaagtggcccagtgccctccctgagcgtcggtccagaacggcactctcgtccctcctgtgacgctctgcttggcactttgggaggctgaggcgggaggattgcttgagcccaggagttctagaccagcctgggcaacatagtgagaccccgtctctacaaaaaatacaaaaattggctgtgcgcggtggcttatgcctgtaatcccagcactttgggaggcgaaggcgggcagatcacgaggtcaggagatcgagaccatcctggctaacacggtgaaaccctgtctctactaaaaatacaaaaaattagctgggtgtagtggtgggtgcctgtagtcccagctacttgggaggctgaggcaggagaatgacgtgaacccaggaggcggagcttgcagtgagctgagattgtgctactgcactccagcctgggtggttgcagtgagctgagattgtgccactgcactccagcctgggcgatgagtgagactccatctcaaaaacaaaaacaaacaaacaaaaattacaaaaattagccaggcatgatggcacatgcctgtagtctcagctacttgggaggctgaggtgagaggatggcttgaaccctggaggttgaggctgcagtgagccgtgatcacaccactgccctccagcctgggtgacagggcgagaccgtgtctcaaagaaaaccattaaaataaaataaaaaataaaatttctgcgatgcacacgacagcctccacagcaaatcagcatccagttgctcatgccagtgatgccccaatggagaacaatccacgctctgagaggaggtggggtctggtttggttcactgccacctcccagtgtcatgtagaacagtgccaagccgcggaaggcacgggtccaagaggcagcgctgcagggtcatgggggagcacagtattgcgatgaagatcccagctcccttgcaggctgcctgggtttgtgtctgggctctgaagaatgcgggccataattagttattgattgattacagatcaacatgggcagccttcccttgcccaagggaagggaactcggccttcccttgcagaacgtggggtgttgagatctgtctcctgttacccaggggctcgcttcctgttgctgttacttgggtccataggcaacccctggggtgctgacaggtgttctgtgataaaggcgactagagggggatgtgcaattagggaaacaggggcctcttccccctagggccttttggtagctctcctgtggccgtgagccctggccccagacaggaggggctcagtggctgcactttccatcttgcctggccacggaagctgtctaggcaactgtccgagtacacgtgggtggagaggggcctgcgtggggcagtactgtctctggggagacctagcctctctctggggtcttctcttcctgcaggtggaaagtcatgtcccttggcccatgttcggccagctgtggccttggcactgctagacgctcggtggcctgtgtgcagctcgaccaaggccaggacgtggaggtggacgaggcggcctgtgcggcgctggtgcggcccgaggccagtgtcccctgtctcattgccgactgcacctaccgctggcatgttggcacctggatggaggtgagcacagcgggcactcggaatccctatggggctggggtgggcatcagctgtggctcctcatgtgtgagggagtctaggaggcattggctcatcgtgtcccctgaaaggaaggagagagctgcgcccgttggtgagggggcacctagaggcagagagacagagggcctagagacctgcgggcagctaggacttaagaggcccttaggtttggggacgctggaagatgaatggcaggccactcagctctacacagatgagggaatgccagctgtgccacgcacctggcaaggcaggacagacaagggtaaatggggttcaggctgccccctggaggggctcgctcatggtgtggagggggcataggggcacagcagacagagatgagccgcagccccgcagacctgcttgctctaaggcttggagggacagagaggccgtgagggtgacagggacccagacttgaattatggctcctcccacctatatgacccatgcaaggtgccctctctgagcctcagttttctcatctgtggaatggagacacttaactgcctcccagcttgtacaaggattatattggatcactcctggcctgtggttaccactgtccttgtcaccttctggcagggtcagctgtgactcctcctcccctctcttggcagtgctctgtttcctgtggggatggcatccagcgccggcgtgacacctgcctcggaccccaggcccaggcgcctgtgccagctgatttctgccagcacttgcccaagccggtgactgtgcgtggctgctgggctgggccctgtgtgggacagggtacgcccagcctggtgccccacgaagaagccgctgctccaggacggaccacagccacccctgctggtgcctccctggagtggtcccaggcccggggcctgctcttctccccggctccccagcctcggcggctcctgcccgggccccaggaaaactcagtgcagtccagttatgtcctgtcctccttcctgtcaggcagctgctgcaggaggggtgggcaaaggcatcttcctctgggaaggactggcacaagcacttggtccctgggttgtgtgcctgggaggccgggatcagggctggccctctttctccctggcaaagcaaaacctcccttttactactatcaaggggaagtaacttgaaggtaggaacccagcttgtgagccccctagcctctgggctgctctgcatgtgccccctcttgctggatcatctggtagcagccctgtgccctgagggtgatgctctgacctatgcagcccccctccctgtcctgagaaggcttccagctgggccttggaggacagggtccacccctacctcctggtctccttcctcagcttggaagccccggagcctgccctgctgggaatcggggaagcactgcttacctgtctcctgctcccttttcaggtgcctgtggcaggcagcaccttgagccaacaggaaccattgacatgcgaggcccagggcaggcagactgtgcagtggccattgggcggcccctcggggaggtggtgaccctccgcgtccttgagagttctctcaactgcagtgcgggtatgtctagggccatgcaagcgatgctgccagttatgggccctgccaggagccagcacgacgctgcatgccccattcctggcaggagcccatgtgcattcccacctgtagtttgcatcccatctcatgactggggagtgatgatctgcattttacagatgaggaaactgaggctaggagagattaagtgatgtgcccagttacttagagtcacatagccagcagtgggagaggtgggacttgaactcggctcagtctaccctggagccactcctctgctgaccaggcgtgggagtgctggaccctcactgccctgccgcttcctaggggacatgttgctgctttggggccggctcacctggaggaagatgtgcaggaagctgttggacatgactttcagctccaagaccaacacgctggtggtgaggcagcgctgcgggcggccaggaggtggggtgctgctgcggtatgggagccagcttgctcctgaaaccttctacagaggtatggccaggccttctccacctcccttgggtgctccagtcctggcagggaggctgggtgggtgctgctggggatggggccagtcccagtggggcagtgggaagatacggagggaactgactgagatggaaggaactggggttggccagtgtcagtctgcacgtgccagggaggggtcacaggatgaatgctatatccctcctttttgggaccgtgcagcaagatggacggatgtgggacatggtccacatcctcagtcagtccctcaggcctctgccccacacccacctgccccgcccccacccctccagcctttcaagggcttttagggttttgtggaagccactgtccctcagccctgtttcagtgcactggtgtaagcagacatgcttgtacatgcatgtgcacccacaagcacacctcaggcagaggatgccacctcagggactccagccttgcccgtggccccctcgatatcctctgatagccctctcggttgtcctggggggcttgccctctcccaacagcccgagctggccgaagttggcttccctagctggttccagaggttcctcggctcccccaggtgtctggggcttagtggcaacaggggcttagcctctgcagagacctagtgcgccgcctccttgccccagacctgcccgggcagagagccgtgtatgtgtcccagtgcacaggcgctgctgggccctgccaaaaggccacaagcccactgtcaccgttcacattgcttctcgcttcccggcccagccccgcccacacaggcatctgccttgaaagaggtgcaggaggtacaggcaggtgggggctccagtgagctctgaggaacagcagtggccgccatgggtggagcctatctttgttgccagtttcagtgttaaacactcttgcacgtgtgacatcattgagtcctaaagaccactctgctcagtgcatgccattgtttccttcagttacagaggagggaaccagagcccagaacatttagcctttgcctaaagtcactgggccaggaagtggtagaggtggggttcagcaggatttgcctgggaaccccaatattgaccacagtgccatgctgccctgcacggctccctggctgtgagttgtcctggcctctggcaccaccggtctgtctgggttcctatgtccctatgtcccacctgcagaatgtgacatgcagctctttgggccctggggtgaaatcgtgagcccctcgctgagtccagccacgagtaatgcagggggctgccggctcttcattaatgtggctccgcacgcacggattgccatccatgccctggccaccaacatgggcgctgggaccgagggagccaatgccagctacatcttggtgaggcccagcatggggacttgtgctgtgattctggacagctttccctagggcgtgcagggctaggggacccccttcagtttatttcagactaaaaccctcaaaatcattagtgaaagaatgggagaagatagcttcctccacatattcaccaagaaatgttttttgagctacctacaagagtgaaatagtggctcacaactgtaatcccagcactttgggaggcccaggagggcagatcactcaaggtcaggagttcgagaccagcctggccaacatgatgaaaccttgtctctactaaaaatagaaaaagtagccaggcatggtggcgtgtgcctgtaatcccagctacttgggaggctgaggcacaagaatcacttgaacccgggaggtggaggttgcactaagcccagatcgcaccactgcactccagcctgggcaacagagtgagactctgtctcaaaaaaaaaaaaaaaaaaaaagcgaaatggtaaagaatggtaaagacctttctgatgtagactgacagctaacccaagactgaagcataattttacagtctgatataacttggacagaatagcaccctgcaccctccccgaggtttcaagtgtcctgggagaactgtgttctgcagggtatcagcttccccagaggaggcagcctggccccgctctggcaccctgactgtgtgtccttggggaagtgatgtaacgtccctggacctcggttttctgggtagagtaatggcgtattcctagtagggctttgtaagcattaaatgtgatccggaatctgtgagcccttgcacacgaaggcttccgtgagtgctaattattacttgtggccggtccttctgggctgccccttttctctcagatccgggacacccacagcttgaggaccacagcgttccatgggcagcaggtgctctactgggagtcagagagcagccaggctgagatggagttcagcgagggcttcctgaaggctcaggccagcctgcggggccagtactggaccctccaatcatgggtaccggagatgcaggaccctcagtcctggaagggaaaggaaggaacctgagggtcattgaacatttgttccgtgtctggccagccctggagggttgacccctggtctcagtgctttccaattcgaactttttccaatcttaggtatctactttagagtcttctccaatgtccaaaaggctagggggttggaggtggggactctggaaaagcagcccccatttcctcgggtaccaataaataaaacatgcaggctga

SEQ ID NO: 15389 - DNA, 62356 bp, Homo sapiens
gagagccccgggagagtgaagggccggggaggacaaggcgccccgggcccaaagcgcgccggctcccgctcgggcggccgcggacatgtgcaggatgtccttcaaggtgagcgaccgggactccggggtcagggctggggccgggctcgggcggccgggcccgcggggtcgggtggggtgggatggggtgggatggggtgggcgctgcccgctgcccgccgcctcctccttcctctctcctccagctgcgggcgaggcccgggaggaagcggcggggctgggtgcgccctgtgggtttgcggtttgcctgcctgccctgcctgagaggcttcgcactcatggctgtggatcggctgagtctgtgcccggcgacggggcggcggggactgtcgccgggtaacaggtcgggggcgggtaagaagcctggggtcagcgctgtcctgcagcagaaggagtccccgaccctgaccctctgggtcctcatgcaggagtaccagctgcacccacggatgcctcctccccggaggggtggccagcacccagggaggcttcagggtccaaaggtgtcttgtctcaaaagagttgattaaagtcattccatctaatccccacattttaggatgaaagaggttgatttgcctcgattgaaagggtttaataaaaatagcagttaaaatgtattaaacagttcaaatgtgcctgactctgaaccaaggacatggtgtgtatggtctcaaccctgggggagacctgtgggaggtgctcttcgtggctcttttttttttttttttcaaatgagaaaactaagatatagagaaattaactcacccacggttttgcagccaataagttatggtgttaagactgaaacccaagtgtgtctgactcctaagccactgtaatcccgttgccgacaatagctcatgtaagcagaggagtgacatggcgagatgtgcatgttgcaaagatctctggctaggtttggagaagagggttggagctggaagatgttgtcatctttttaagaaatggtactggaccagtgcataggtggtgagaatggaacgaagcagacgaatgtgaatgactttaaagttttttttcctgagacggagttttgctcttgttgcccaggctggagtgcaatggtgtgatctcagctcactgcaacttccgcctcccgggttcaagctatttctccttccttaccctccagagtagctgggattacaggcgtgcgccaccatgcccagctaattttttcgtatttttagtagagacggggttctgccatgttggcgaggctggtctcgaactcctgacctcaggtgatccaccctccttggcctcccaaagtgctggggttaaaggcgtgagccactacgcccggccgactttaaaagttttaaatcggcataattcagtagggaaggcaagagagataaagataaaacgtttggtttgggataaattttgaggatagatgggaatccaagcagagatgttgattagacagatatactctcctcgatcccaggaggcaagtctgggcagcagctagagatgagatttaggagtcagcagtgttaagtaggcacccatgggaatgaacatgattgcccagtggaaccatataaaggtggaaaataagaggactgaggacaaaatcttgaagaagatttgagaaagagcagccagagacgaatgagaaaactcagaagcatgtgctgtcacttacaccaagcatctctaatctttcaacaaagatgaagaggaccttgatgtttattaatgccacagggaaatcaaataaacaaagaattgaaaagtccattggatttagtgacggaataggcactggtgaccttgccaagagcactttcagtggtgttaggatcaggagccagattgcaatagcttgaaagagagtgggtagaatccacaagtgtggagaactctttcaagaaattctgcaagaaacagatttttgttagtttgtttgtttgtttggacaaagtcttgctcttgtcacccaggctagagtgcagtggcgcaatcttggctcactgcaacctctgcctctcgggttcaagcgattctcctggctcagcctcctgagtagctgggattacaggtgcctgacaccaagcccagctaattttttgtaattttagtagagacggggtttcgccatgttggccagcctggtctcgaactcctgacctcacgtgatcgcccgcctcagcctcccaaagtgctgggattagaggcatgagccacggcacccaacccagagattctttttaaaaggcagtggctgcagcaaggatctggaattgaccaagtgtttgtttgctttaaaatggtagagacttgagcatctttaaatgatgataggcacttcaacaataaaaagacaaataaagcctaattttaaagtggacatatgaatagacatttctcccaagaagtttacaaatggcccgtaagcacctgaaaagatgcttaacattattagccatggtcttggaaatgcaaatacaaaactgtaatgagataccacttcatacccgctaggatggctttaatcagcaagacaatgacgaatgttggcaaggatgtggagaaattgaatctgcatgcattgctggtaggagtatgaagtgatgcagtcatttttatttatttattttatttatttttttgagacagagtctcactctgtcagccaggctggagtgcaatggcatgatctcagctcactgcaacttctgcctcccgggctcaagcaattctcctgcctcagccccccgagtagctgggattacaggcatgtgccaccacgcccggctaatttttgcatttttagtagagacggggtttcaccatgttggccaggctggtcttgaactcctgacctcaggtaatctgcctgcctcgggctcccagagtgctgggattataggcgtgggccaccgcgcctggccgatgcagtcatttttaaaaccatgcttgtctttcttcaaaaagttttttttgtttgtttgttttttgtttttttttttgtcttttttgagatggagtctcactctgtcatcaggctggagtacagtggcacgatctcagctcaccgcaacctctgcctcccgggttcaagcaattctcctgcctcagcctcctgagtcactgagactacaggcatgcgccaccatgcccagctaatttttgtatttttagtagagaccgggtttcaccatgttggccaggatggtctcgatctcttgacctcgtgattcacctgcttcagacttccaaagtgctgggattacaggcataagccaccgcacccagcctcaaaaagttaaatatagagttaccacatgacccagcaatttcactactaggaatatacccaagagaaatggaaacgtgttcacacaaaaacttgaacataaagatccatagcaatagtattcataatagtcagaaagtggaaacaatccaaatgtccataaactgatgataaaaacaaaatgtgggccaggcacagtggctcatccctgtaatcccagcactttgggaagctgtggcggatcacctgaagtcgggagtttaagaccagcctggccaacgtggtgaaaccccgtctctactaaaaatacaaaaattagctggacgtcatggcaggtgcctgtaatcccagctactggggaggctgaggcaggaaaatcacttgaaccctagagacagaggttgcagtgagccaagatcataccactgcattccagcctgggtgacagagtgagactctgtctcaaaacaaacaaaaaaaaagtgttttatattataaataccatagatagggaggcttaaacaacagacatttatttctcacagttctggagctaggaagtcttgagatcaaggtggctggtgagggcacttttcctgacttacagatggccacctgtgcatgccccgtttcctcacatgaccaagagagaaagccctggtgtctctaattcttttaaggacattaattccatcatgggggctatacctacacaacctcttttaaacttaattgactcccgaagactgctcctcctaaaatcattacactgggcattaggacttgaacacatgaatttttggggggatgcaaacattcagtcctcagcccctgtcctcctggcatgtctgtcttgcgtgcaacatatattcattccatcccaacagtccccaaagttttagctagttccagcatcaactctaaaatccacagtctcatctaactatctaaatcagatattgggtaagactcaaggtatgattcatcccaagtgaaattcttctctagctgtgagcctgtgaaatcacacaagttttttgtttttgtttttgcttttgttttgagacagggtctcactctgtcgcctgcccaggctggcacaatcacgattcactacagccttgacctcctgggctcaagcgatcctcctgcctcagtctcccgagtagctgggactacaggcttgcaccaccatgcctggctaatattttttattttttgtagagataggggtctccctgtgttgcccaggctgatctcagactcctggactcaagcaatcctcctgctttggcctcccaaagtgttgggattacaggtgtgagccaccatgcctagtcctcaaacaagttttgtggttctaaaatacgacagtgggacaggcataggatatacatgtttccaccccaaaagggagaaattggaagaaaggaatgacaggtcacaagcaagtccaatacctagcaaggcaaatattattagaacttaaagtttgagaataatcctctttggttcagtgctttgccttctgaactcactgagtggtgggtcctgctttctggaccaactcgggcaggggattgggctcgcaagacattggtggttagggcttcagcatatgaatttggggaggaacacaagcatttagtccataacatggtaatctgtacaatggactatcattcagccataaaaaggaatgaagcactaatgcatgctacaacatagatgaaacttaaaaacatattcagtgaaggaaaccagacacagaatgccatatattgtatgattccatttatatgcaatgtccaaaatcggcaaatccatagagacagaaagtcgattagtggttgccaggggctggggaagaggaggggatggcgagtgattgttgatgggtagataatctggaatagatagtggtgatggttgtgcaaccttatgattgcaccaaaacccactggattgtatgctttgaaaggatgaattttatgtatgtagattatatctcaatttttttaagtatttttaaatcataatagggaatgaggagaaggcttggggatgattttgctgagtgactgaatttctcagggagttgagggcggtgagcctgagctgggctccattcgctgtggaattagctagaatggcagaaggaaacctctcccgttgggctaaagggaaaggaggtgaggttgagtgtggatgttttgtaaagtgaagcccaggatgaagtcaggatttggggtaggtagaaaggaggctggcaagccaggtgccaacgttttccatgaataaggaagaacgatcaggtggtgaacgataaggaggtgacaactgccaggtgaggtgaggtagaggttgggaaggtgggacgacctgagtcttgaaggagcagagatttgcacccctgatggaggggcagtggcctggaagccaggtgggcctattcactgcagtgctgatgtgggagaaggccttgcttccaccgggagcaggcactggggaggttgaggcagggagagagggagtgctctgcgctaggcaaaggatgaagaggagttgatttactgtgaaatggacttccagaaggcacagagggaaggtctgtccagagcagagtcccaggccagtctgagatttgcattagcaacattcttctatccacctcccatcctatcaaacatattaaaatgcacccacggccacaataataaaagagaccttttattgtaaaatttttgaaaggattttgtgacactgctttttaaatgatttagctgtaagttactcatttaatttaccttttgtccatttttctgcagttgtcatagttggtcagtaactcatgcagcgagcaaatcagacctacaaatgattttcatgtggcatcagtattttatgaataccaaatttagcagttaataaagttgacaggatgttatgttttgtagctatttaattgaatatttattaactttgatttgggaaacacagattaactttttcattttcataggctcctgaaagactcataggccctaggctctgggtctccaaagcctacgtgtaaaaaggccctggtttgttaggcgagtctgtggaagaataaatagagcattataagtcacaatttaggctcttcttgatgattcagaatcaatgtatgtagggctgcttgcatctgagctacatgactcctttgcgtctacttttgatggtttttccgtcaagctgttatcagtgacttctcactggtaccactttgcctccagcaaacttcctttaacaactggcaactcctaatctcttctgcttgagaacacagacacatgtttgttagaattatcttttttttttttttttttgagacggagtctcgctctgtcgcccaggctggagtgcagtggcgggatctcggctcactgcaagctccgcctcccgggttcacgccattctcctgcctcagcctcccgagtagctgggactacaggcgcccaccactacgcccggctaattttttgtatttttagtagagacggggtttcaccgttttagccgggatggtctcgatctcctgaccttgtgatccgcccgcctcggcctcccaaagtgctgggattacaggcgtgagccaccgcgcccggccagaattatcttttaaagtaaaacgaaactcagagaattattttttaaagtaaaaggaggccaggcacggtggctcacgcctgtaatcccagcactttgggaggctgaggcgggtagatcacctgaggtcaggagttcaagaccattctggccaatatggctaatacagtgaaaccccatctctactaaaaagtacgaaaattagccaggcgttgtggcaagtgcctgtaattccagctactcaggaggctaaggcaggagaatcgcttgaacccgggaggcagagcttgcagtgagtcgagatcacgccactgcactccagcctgggtgacagagtgagactccgtctcaaaaaataaaaaaaattaaaaaaaagaatttcatatttccttcagggtctgctgtcatatgatactataccccagccaggttggagtgggtatcttattctacaaagagtctgttttgtgaatcttatgaactatattttaatattaatgctggttaatcgttgcgcctaagttccaaagggagtgaagtgtaatgagatatatcagacctcccttcctgtcatggcctgaacttttcaggttttctttgggatcccctgggccaagaggggggttcactcagtcagtgggggggcttaaaattttatttttgatttacaggcttgatgtttgttaagcattctgaaaattgtaaatacttagcacaaagtgggacaatggatgtctcaaaaacatctttctgcatatagctttgcaatccatcactacatctttattttatgtcacctctaatatcatagaaattcattattgagtagagctaatattctcttgattgaattaataagtgtacgattgaagtccacattactctaaacttttttaaactaatagtttaaatttctaccccctcttagcttttaattagaattccagttctgtacaaataaattttcctctgtgtttcctctccccttccttcctgtacaatttctggaagtgtacagatgagcagtgtattagccaaaattctgacagtaaatggaagggggcaagtagggagagaagaaaatatgacaaatgtggaagcttgcactcaattttctacaaggtgtaaaatgtaagatctcagactctggacccaaacagactatcagacttttttttttttttttttttttttgagacagagtcttgctctgtcacccaggttggagtgcagtggcgccatcttggttcactgcaacctccacctcccaggttcaagcaattccttgccgcagcctcccgagtagctgggattacacgtgtggaccgtcacacccagctaatttttgtatttttagtagaaacagggtttcacgttgttggccagactggtctcgaactcctgagctcaagtgatctgcctacctcagcctcctaaagtgcttgggattacaggcgtgagccaccgtgtccagtccagacttggatttatttatttatttatttatttatttatttatttatttatttattttttgtggaggctggggaaacagagtctcgctctgtcaccaggctggagtgcagtggcatgatcttggctcactgcaacctccgcctcccggattcaagcaattctcctgcctcagcctctcaagtagctgggactacaggtgcgtgccaccgtgcccagctaatttttgtatttttagtagagatggagtttcaccatgttggctgggatggttttgatctctcgacctcatgatctgcccgcctgggcctcccaaagtgctgagattacaggcgtgagacaccgcacccagcccaaacttggacttaaatcccggctctgttatttggatgagccaagatccttactgcgtgaccttgactaactcattcctatgctcaatttcctcatcttaaaaataagaataataggccaggcatggtggctcatgcctgtaatctcagcactttgggaggctgaggcaagtggattacttgaggccaggagtatgagatcagtctggccaatgtggcaaaacgctagctctaccaaaaatacaaaaattagccaggcatggtcagtgtcaggcatggttgcagtgagcccagattgcgccactgcactccagcctgggcaacggatcgagactccatataaaagaggggaggggaggggagaagagggaagggaaggagaggggagaggaggggccttcctttaaaaagtaaaaaataaaagaaaaaatgggactaggccaggtgcggtggctcacgcctgtaatcctagcactttgggaggccaagatgggcggatcacgaggtcaggagttcgagatcagcctggccaatatggtgaaaacccatctctactaataatacaaaaattagccgggcgtagtggcaggtgcctgtaatcccagctactcaggaggctgaggcagaagaatcgcttgaacccaggagacggaggttacagtgagccgagatcatggcactgcactccagcctgggtgacagagtgagattatccatcttaaataaaaagaaaaaatgggaataattatctcagtcatacattacttaacaacaaggacacattctgagaaatgcacattaggttattctttcattgcgcaaacatcatagagtgcacttactacagacatagagagtgtagccgactgcacatctaggctctatggtgtagcctattgctcctgggtgacaaaactctatagcatgctcctgaatggaatactgtaggcaattgttacacagtggtgagcatttgcatatctaaacatatgtaaatgtagaaaagtacagtaaaaaaatggtatcataatcttacagggccactatcatttatgcagcctatcattatatattacatgactgtactacctcatggggctgctcctggaattaaatgagttaaagcagtaaattgtttagcacactgcctgatacagagcaagatctcaacttagttgtccttgctgttacttataaggttggaaccagcaagcctgagagaagctccttggttttattgtagagatcagaaaaatcaagaaagaggtgaaatagtaatagcatgcttggtaaagtgctttacagtttctgtgatgtattttcacgtgcactgtctcctttaaaggctagaggactggccccatctctcgccacaccatttatgattgtgtgcatatcatactgagaggagatttggaagttatccagggaatgtgatgtgtatagaccccaaacagaaggaacgttggggactttccatcttagctggagaggagcttgggatggaggataggaaggaggtcaccgggggtcactgctgccttactccttgctatccacagaagaattccacaggaggcagaacagtgtgatggggagttaaagggcagcctcaagcaagagactgcctgttgctgaagcctgacttgccatttctcactttcctcatctgtaaaatggggtcgtcccagtgcccacttcactgagcaaggatgaggatgaaataagctagtgtatgcagaagatacgccacgtggtccagagtaagcactttgcactgagtgagcattagctcaagattcctgacctccagtaaatgtgccggccatagggtgacaggagcacctgcccatttctttgctagacattgccacctagatgccccataggcacttgaaacccaccatgtccaaccctgaactcatcatttttttccaaagcctgtccttcgtacggtgtttccaatcttcaagaattggcaccaagatcagccaggcactggaaccagaaatcaggagtcaatccactttcctattccctcctctcctgcacatacaatcacagaccaaggctgtggagtttagctccttaaaatgtctctggtctgtctaatcttcccatacccactgttgctgcctcttagtaaattaagcccttgaaggaaaatgaaatatttatagcttttcacaaagcttggtttctagaaccttatagaaaaccaggatggccagcccagctggagaggaatccccaagaccatcctaaagggaggagaggccccgactagagatcttgttatgacaatagacacttgctgtttgcagatggtcttttgaaggtatttggggttaaagtgaaatgacagagtccctgaaaatgaattacagtctatcattcttgtgtgtttacctttcaggaaaagctagcagagctgttccctggtgcatattacattgtctgcctgattcaccctaccagacttcattttggccttgtgcaatctctttgttaaaaggctttgtttcatgattcattatacaggtcaaacctcccttgccatttctttgcctagttactgacagctggaacaaattagacccagcctggtgcctaagctgcaacactggtgtgaaaaccatggttgcagtttgccttgaaaactccaggatagcaaaatttacacggtcaggaaaggcaaattgttcatctgaaattggaggtgatttttttcccttctaaatgagccaggaaactattcaaagtatgtttgctgttagcttatcactctccaccctgccattctctcattcaggtatgtacaagggcgtacgcctgtgtatgtgctgaaggacttctgaaatgaaatcctcacacccacaaatactgctgccactgtcctttcattttagagggcttgttgagtagctgaaattgttggtattttcttttgagcttagaaaaagcactgtatttaatacgatatcaatatatttaaaaggcatattacgcaaaaggccttttgagtcgcgtagatgttttaaacccactcacaaaaaatgctttcattaaacaatgtgaatacttttataaaatttcctaagaccatcaaaattctttattagtaccaatactctggatttaattttgcctattgattctgacttcgtaaagaaaagtaaatagaggaaaggaaactggcacttaatcagcatttatggtgtgttgggtacaatattaggcaaaaatcagcatcatttaataccgtcaacttcaaggcaggtactgtgatctccatctaagcaagaggaaactgagattcccaagggccaacttacttgtgcagggctggggtgagctgtctggtcccaaagccagttcttccctctcgtcgactgttctctacaaactcatatcaattattttagagaagaagattgtactacagtcagctctgccacccatttagaagacctgttttccacttccatgctttccataggtatggctccaaaattaactttgtagctttaaaataacccagtaggcccagtgcagtggctcacgcctgtaatcccagcactttgggaggctgaggtgggtagattgcttgagcccaggagttcgagaccagcctaggccacacagcgagaacctctctacaaaaaataaaataattagccgggcatggtggcatgcgcctggggtctcagctactcaggatgctgaggtgggaggatggcttgagcctgagaggtcgaggctgcagtgagtcataactatgctactgcactccagcctgggcagcagagtgagtccctgtctcaaacaaacaaaacgatccaacagtggaatgaaggatccatatgaagacatgtaatggcattatttgccctaagttccttgttctcaagtcaaacctctggcaagttccagctgaagcaaagaaaattagatggaggggccgggcacggtggctcacacctgtaatcccagcactttgggaggccaaggcgggaggatcacgaggtcaagagtacaagaccatcctggccaacgtggtgaaactctgtctctactaaaaatacaaaaattagctgggcatggtggcgcacgcctgtagtcccagctactcagaaggctgaggcaggagaatcacttgaacccaggaaggggaggttgcagtgagccaagatcacaccactgcactccagcctggcgacagagtgagactccatctcaaaaacaaaacaaacaaacaaaaaaagaaaattaggtggaggaaaagtgaaacattcacacaggtagttggaatcagatagaaagcattgagggcttaggaaacgggcaggtaaactcttttgagaggtcagaattgggagaaattttgccccacttagaggtgaggaaagatttggagtgtttctgggaggaaatagcattcgagcagagccttggccttgaaggatggaggaaaattcatttcaagcaaaaaggaaactgggtgaacaaaaacacaacagaggcaggaaagtgagaacattagtgggaaataggttattaatagtgctggattatcaacaacactgctcttcatagccatgtggtggctcaggtgtctggaatccaacagagttcattctgttattacagttgtctattgctggaggatcaatctttcaaatgatgcaacacatctggatgttcttctttctgaatgttattatctatgtgcatagcagcagtcatgttaactgacatcaattttaagatcctgtttcattttgttcttgcagaaggaaactccacttgccaatgctgcattctgggcagccaggagaggaaacctggcgctgctgaagctgctgttgaacagcggccgggtggacgtggactgcagagacagcgtacggtggttcggtagatgcatgcccagcatgcaccattgccctctgtgggcacaggagcacctcaggaatacattcccctttacaatgcttatttactttttcatgtgtttgcttgctttatcctttttaaaacatccaaggtactgtggtgaacttaaaaacatgctgggggaagtcagaaagaaaaggaaacaatgaaatgcataaaacagaaggcaaccacaatagggaaagaggcacttcactgggaatcagaattggcagattacaagaagaaaagcctgtttagtgaaagaattcaagccaaccacttccatgaaaagatggagataatttagagcacaagtgggctgccatggatgtgggcgttatgtttcttctacaaggatgagaaaacaaaaattgaagcctcccccaggattttatcctttcattacctcttgaaaacataaatacactaattggcaatttaaaaagggaaacaaaaatagatactactgcccactggcagataccacttagagagcttttccatccccagctagaggcaatcgtttttctgtcctcagcaagacttctcatctctgggaccaagaggacctccaatgaggaaagggagcgagcaatgatgttttgattttaggatttgaataaaaatgtttcaaaggagctttgttttcctgaaaacagggtgtgccatttccagcttttattgtacaaatttgaaatctaccacaagcccaaaagtgaaatagcagtttgccccagttggccccgtgggggcatcacagtaggatatctttggtttacgggatatctttggttacacctccagacccactccacacccttctcgctcttagtcccacagtctgaattgtatgtactgctccagcagactcgctttcctctggcctccagttgtgtttggcccataggagcatctgcaggagtcagagggtaggaggagagggacatcagggagcccaccgccctccctgtttctgtctggcagcagcgccccactgttctctgcatcctgggagccgctcccttcccccctggcaccttcaggcctcagctggtcatggacccccactgttcctagatcccagtactgtgctgttctttgtagatgccctacacccaggcctcagcttaatagtctctttattacactttcttccaattatcccaatctgaatgtaccatctgttccttgccagaactcgggctgctgtcaagtcttgggcatctgtgaactggccatcttggtcttatttgggttttacggggctggttcctacatcacagtgggaaaactgtagggcagaaacaccagttgtcaccgtggccaacacggagaaacccgcctctactaaaaatacaaaaattagctgggcgtggtggcaggcgcctgtaatcccagctactcaggaggctgaggcaagagaatcacttgaacctgggaggcgggggttgcagtgagctgagatcgtgccatcccactccagcctgggaggcgagacttcgactcaaaaaaaaaaaataccatagagcaccactaagaagccattagctttttgttacttcgttacttcgttactttaccgatactttttacataaagccaacaagactttcacaaaactagcatggccattgacagaagtcaacaaaagccagatgacagcctaacattgaattatcgtaatgttattttaatatctaacacttactgaacgaatatctaccattactatgttaaccatattgcctgacttatctcattcagtaatttaatcaggtggatacttttattattcccccatatttcagatgaagagaatgagacttaagggttacatgatgtgcccaagatcatactgtcagtgactactcagcaatactgccttcctacaaaatcccgtagatgaaaataacacgaagcctccaaaattcacttaattaccctatacctaatgagcctcccctgtgtgcagagtcacctgtctctctcatcatccacttctgagcagcaggttgctgaatatgcagaggtggtagctaagattacaatttcaagtgcttgaaaacaactgtaagtcaaactgcaaatgcccacttcaattagaagggtccatatcacatggtacacctcaggtccttgaatcttaaagctgggacagactttggtgatcatcccatccaaccgctcattttaaaaatgaaataaatgagtccaagtaattgtaagcaacttgcccaggttacactgttggtcagtgacagctacctgggtttagcccccacagctcctgactctcaactctgtagtctctcatttcacctggtgccatacatctttacctgaatcattttgaagatgaagacttttaaatatggaaaatcagatggtaccatttaatttttcttttgcattaatagcaatgttttggctcaggaatcatttaataggaatcataaaatgagagcaatatatcatcgctgccttaaaatgcagtaactatggttcatttggactgtgcttctgaaggtaatggaagtaagtgaatttttacatcgaaaattccaacctcagcaatttgtcactttgctttttcccatctaggctgcatgatgagattattcatgaccacttttatcactgcagggaattttgcccttggatgtgttctgagtggagctgacatctctgcagcatcttctctaggacccttctctctgacatagcagtggcctaactcttcatctgtctctcctccatccagcatggcaccacactcctgatggttgctgcctacgctggccacatagactgtgtgagggaactggttctgcaaggagcagacatcaatctccagagagaggtaggtcaggctttgcacttgaagaaaaatgaccaggctcagagatctgaagttttcatgatagtgaactggtatgggggacaagagccatcattgcttttctcccacattaaagcccattgcagagtttattgtgcctacaatgaggtccagcaacgtactagcagttataatgcatttgagcgtagcctgtcgggcatatctgaggtaaccaaacctcttaccacctgcctataaacactcacacttttttttttatcaagcttaaatcagttctttattactcccttgggatgagatactgtaggatttatagcattttcatatagatcattatatttttagaagagttgagtcaccagcctatttgtaatgaggctcacttgctaggatgtctcaatcatcctccccaaaccatgttttcaaaggactgctctctaactggccatgaattaaataagctctcctggaaaaagccgtatgggtcaacactggacaaaaatgtgagcctgttcccacacttcattcaaggacaatcttgggagtttggtcttgcttgaggatccattcttggtctaatctagagaagcagaagggagtctgggacttttttttaagatggagtctcgccctgtggcccaggctggagtgcaatggcgcaacctcggctcatgcaacctccacctcccaggttcaagtgattctcatgcctcagcctcccgagtagctgggactgcaggtgtgtgccaccacgcccagctaattttctgtatttttagtagacatggggtttcaccatggtggccaagatggtctcgatctcctgacctcgtgatctgcccacatcagcctcccaaagtgccgggattgcctaggctgggacattttaacatactttggggctcaattctgagaaagctccatccatatatttccaagctgacccaggacctggtaaactaatctttatggagacacacgctcaggtcacccctagagtgtatctgacctctcagttcacactgactcagacctgagatgggcttcctgggcaagtccagactgaaccacttggttttccttggtccagccttattttatcccaggtcatgccttgcaacattttagaaagacaattcaccaaccaaactttcatcaagccagtatatcgtatatctcattcttccagcctggaccgtcacctctgagtggagcaaattaagacacatcaggtctcaggactgtgtcaagagttccaggtgtaacataggcctgggcaacatagcaagaccccatctctacaaaaaaatttaaaaatttagccagacatggtggtctacacctatagtaccagttacttgagaggctcaggctagaggctcgtttaagcccagaagttacaggctgcagtgagccatgattgtactaccagcctaggcaatgcagagagaccctgactcaaaaatagagttccaagacacatccagatgtccttcccaccacccgtctgggtgttggaggccttggctgtggaccatgaaagagtgacatgcagaatctgggactgggtctctgtagccctggatcaacaggcctggtctcttgagaggagcagtataaagagactacagcaaatgcagtcttctcacaaacagattctttggtgcaatttccataacactagatcgttgtttgaggtcattttcacttcagcacttaattttcctgtgggatgaaaatatctggacccacttagaattacagtttaaaattactttaatctttttatttttcctctctgctttatggtctttgtttattacaactttaaagacagtttttctctaataaaaacaatatggtccagatctggtttactttaaaaactttatcctgaaggacaaattgcacatgcacaaaaatctctctgaaacaactgagaaaagcagctagaagaggagagaagtatttgatttctagccagtctatggtttctatggttttatatttatccatttggttccaattgctcaactaatcttggagatgaaaactctcgtagcactgagaacaaaagcctttgaagatttaccaaagtgtactcagcttaaaggtaacctgcgtggctcaaatgatggtgctatgtaagttcctggcagtccctgaatttcctgagactgtgtcagtctggggcaagagggctgccaagccaaaggcagacctcagcctcctgtaccagttttggaagctaagagtgccttgcagtgctttgaaacttactcctatggcagacttctgccttgatccattgttagttaatccactttgcaatatcagaatatttgtctcctgaaaaactacctgccactccttgcttaggtcagctctctagatacacagagcttgctagagagacaaactggaaactaatgttcctgaaacactattgctgtaaagaacccacaattggctgatgacacctctcaggcataggagctgcacatacagttggcatgaagccctgaagtaaggcacacatatttaaaacttttattcacattccagactaaggtatagctcctatttatggattgctgcattgaggtacagaatgattaatagtagtatgtatgttctaaaatcagctcaaactgctctaataatgatttatgtaattaatgtaccaagaaagcctattgaaaagcaaattatttatcttactaaagaaacaacttctagaaaagacctttggtagtctctaaaatttaatatctattgagaaggtgagagttttcctattctagccaagtttcttcctccagaactattaattccctaaggtttccggaacccagcatcatcaactgtaataaagcagtgggaggatgcttcccacttatttctgtgggaaccaaggagaaaatcacacctgcattgcaggcagaaaggccctgtgaatggtcacaatgcctgtgccttcctgggacagagtctggctgagggcacagcctgatgtgggttatatctgactaggaaggtgttacatgttctccctcagtggtggtgttatcagcaccctagattcttataatctcccaggatagaagtcaaaagagattgtcagatagcaaagaggaagtttgtttagcttgtgcataagagaaccaggttcccttatggaaaggaaaagggttgcctgctccccaagagaagtatgtgagtttgttttatagggtctttttacagggaagggtttagtcagggcatgtacagcacttgcacagtagctcaatatgctttttaatcattgcatgtaagattagcattttaaatctccaccttcaggtgtgatttttagcattaagataaggaagaggtgactgtaagttgaagtttaagtctaactgtgcatgcagggccccaggaagtccctacccacctaaagtgagaacttctggatagtttcttgggtcttttgttgctgattggctgtcacaggatccttagggtgtcactttgccagctggaaacctccatggctagcagcgccttctgcccaagtgttgctcaggcccgttgggctcattctgcccacttggcccagcaggttgcacttggttcaccctaccagcccaggtcccatgcctgccaagggcaagccaggtgtgtgagcaagcatggggtccagccactgcacacaaccaggcatgccagctgtggcgaggcaggcagctccagccactggcacaggtgccagctctgtgtgaggctgtggctggaccagatgtaccgcaagtggcttccgctgcaggcaccagggaatgtagtggtgcctgggagcttggagatgccaggaaccgcagagccccaaagaggatatcatagccctggctcagggagcccctaggtctgggctccccaaagggctgtagctcctctctcctcattgcctgcaatgtggcaagcagaaggcgtgtttcagccctgtttgtgttataaacagggtcattcgccaggtcctaaattcttgtcccgcatccaagaagaatgaggtatgcaaacaactggagggtgaacaaagtggagaggagcttcattgagtgacagaacacctcccaggagacccaaagtgggtggctcttttctgcaggcaggtcatcctaacaagtgttcagctctcagtggagaggagacccatagtgggtagcgcctttccgcaggcaagtcatcctgatgatctgaggagacccaaaatggatagctcctcccgcagctggtagtcccgatatctgggtccagctctcagcagagaggagacccacagtgtgtagttccttcctgtagctggtagtcctgacctctgtgtcctgctctcagtggacaggagacccacaatgggtagatccttccagcagctggtagtcgggacatctttttgaatctggctgagtcagaggtttttatgggctcagaaaggagggagtgtgtgctgattggtccatgggaagccatgggtgggaacgtgtctgcctctcaccatcaacatgccatccacggcacccaggctgttcctgccaaggggcgcctacaggcccacacctagctgccctcagcccctcagcctccctcctgtgcttgtcagcacccaaagtccggagggggccaaggttggggggcaaggctggcatgtcaacaccacctcaagcatacacacctcaagcatgctctcccctagccaggtcatgacagacagcacccaggctcggctacagctttgctccgcactggagcaggtgccgggagtggggagaggccagggagcaggagcaggcacttccaagcctgtgggggtaatgggggcttcccaggcccagagagcacagggatgcccagaaccggagctgcagctgggcatggctgctcccgcacagccaactcaataggggatggggctcccacctgcttccagctcccactggacctgaggagcatgcagccccagctgcacctcccgtgtggcagcctgcatcttcgcagctgctgctccagacaggccaccactgccatcagtgagaagttaggcaagctacagcttgagtaaggggcttttttttttctagaccacatttaaaaacaggcaaacaagtgggtggatcctgcctgtctcagtgggtcttattgtccccactcccatcccacacatgcatgcacacacgtacatattcacagagacacccaggcccttaagaacaagttttaagcatgatcactagcttataggccaggctgtcctcagcttttcacacatgagtgagacctaccatcttaacagctttgggtaaactatggaaaaagggatttcttttcactgtgtctggtaaggtgtggtattagctttgtcccaagctccaagctcagaagtgaagagtactctataggaaaaatgtatgttgcccacaagaatggttcattattttgctcatattacacagtgatttgggtaccaatctttgagtagacttgtaaaagtagataggaagggaggatgctaaaaactgtgtctcagaatgtcatgatcagtttaaattttagaatcaggatgtttcttgttattatgtcccattttgagaaatgttttgagctcattttgactctgggcttgcaattggagaagtttgtgggtgaattacttattttccttcttgtacaagtagtcttccactctggggcgctaaaatttgtaatttgaattcttccctgtattaaggaatgctagtgtttaccaaacactataccaaatatcttgagtttccaagggctgctgtgacaaattaacacaaactaggtggcttcgaacatcaggaatttattctctcagatctggaggccagaagtccaaaatcaaggtgtgggctgtgccgcactgccactggaggctcctgggggaattcccttccttgcctcttccagcccctggtggctgtcagcactctctcctcaatgccacagctctccagtctctgcctatgtggtcacattggcctctctctgggtcaaatatccctctgcctcacttcaaaaaaaaatttattgttttttattgtggtaaaatacacataatgtagactttaccctcttagccatttttaagtgtacagttcagtcttattaaatgcattcataatgtggtacaaccaacatcatcacccatctataactcttttcattttgtaaaactacacaactctgtatccattaaataataacttcccatactccccttcccccagcccctggcaaccagcatcatactttctggttctataactctgactactttagatatcacagcaggctgggtgcagtggctcatgcctgtaatcccagcactttgggaggccaaggtgggcagctcacttgaggccaggactttgagaccagcctggtcaacatagtgaaaccctgtttctactaaaaatacaaaaaatagccagatgtgggggtgcacgcctgtaatcccagctacttgggaggctgaggcatgagaatcacttgaacctgggaggcagaggttgcagtgagccgagatggcaccactgcactccatccagcctcggtgacagagcaagactctgtctcaaaaaaaaaaaaaaaaaaaatcacagtaaaatcatacatagttgttggccttttatgactagcttatttcacttagcataatgttatcaaggctcatccatgttgtagcatatgtcagaatttcctttctttttagctaaataatagtccattgtatggatacatcacattttgcttgtctcctcatccatagatggacacttcagtgcttccacattttagctgttgtgagtagtgcctctgcctcactcttagaaggacacttgtcattagatttagggcccacccagataacccaggataagctcttctcaaaatccttaacttaatcacgtcttttgccatagaaggtaatattcacaagttttaggatggggacagatcttttgaggagccaccattcatcccatttcactaagaataaagttttcctttccttttgtcacttctctgaccaaaaaataagaatctgttcaaatttagccccttcctaggctagaagttttctatgcaaggatattgttttgttttctttgcagatgttcaaatcaaatgtaagataaccaaatgtcttttaaaactagcctctccctctctcccagtcaggtacaactgccctattctttgccgcccagcaaggccataatgatgtcgtgagatttctctttggatttggagcatccactgaatttaggaccaaagtgagataaccttcttgattttgtattatgttgaagaatttcagcagccatgggtattgcttttctcctcatctatggtacgaatttatgtttccctttttacaagattctcaaacctaagtaagtggatttcctcaaggttacttgtagtggttcaggggtagctctaagggttctattcaaaacgttacatttttactctgggctcacaattggaaaattttatggggaattacttctatcctttcctgaactgatacctttctactgtagaacactaaattttgtaaccaggagggatacagtagcagtggctttctaactttccctgtttccatgttctttttcccactgaagattaattctgatactatgataggaattgttggaagtattaatctgatcctactagatctgagacatttctaaagagggtggtttggcagacagcttactttcatgagctatcctcactgaaatacataatacatagctacagtttacatagttgggaaactatatagtggttcttcctttaaagaagtaattggctaggcgcggtggttcatgcctgtaatcccaacactttgggaggccgaggcagggggatcacgaggttaggagttcgagaccggcctgatcaacatggtgaaaccctgtctctactaaaaatacaaaaaaaaattagccaggcgtgatggcacatgcctgtaatcccagctactcaggaggctgaggtaggagaatcacttgaacccgggaggcagaggttgcagtgagccaagatcacgctactgcactccagcctgggcgacagagtgagactctgtctcaaaaaaaaaaaaaaaaaaaaagaagtaattgattttcatttttgacatatagataagaaagctgagaatgtagaaagattaatttcatgttgacagtatgattttacatgataatattttgtagtagcagaatttgaactgccgtaagatttttgtaattgtcagctcatttctagcctaattataatttttaaattcctgaaaatgtgcgcaagttggaaacttttaggttttcttagttaatcctttttgtggactatttagatatcaagggagtttccagtgggattttttttctgttaaaatggtaactactggagctggccaaggtggctcacacctgtaatcctagcactttgggaagctgaggcaggaggatagtttgagctcaggagttcaagaccagcctgggcaacaaagcgagacctcatctctattaaaaaaaaaaggattcgctgggcatggtggcacatgcctgtagtcccagctatttgggaggctgaggcgggcagatcacttgagcccgagaggtcaaggcggcaatgagccgtgatcatgccactgcactccagcctgggtcacaaaggaagactctgtctcaaaaaaataaatcaaataataaaattctaaccattaagtagatgtgaatttcatataaggttttgtcttttctgaaacctgctattgtactacgtatatgccttcaaacttactgagtataacatacagtaatactatatatttttttacattattagtttattttctattataaaagtgataactaaaaatagaaagtaaagtcctatgaacctaaatctcaactctttgaacgaaggtcaaaatgatcgtgagtgaccatatggctgcttcagtcttcttggttaacgagtgaatactggcttaaagcctttgtacatgagccagtttgtactatctcagaaatccatggaacatggaactcaggatgagcaattccacaggtttccattaggtcagctgcaggtatccaagagctttccatgggaagaagagagggctgagaggctttcagttttaaatgattctgtcatcaaaactttgcttcaacaattgttctcactgctactaaatctatatgccccaaaactgtgttttataaaataaaagaggctgggcatggtggcccacacctagcactttgggaggctgaggcaggcagatcgcttgagcccaggagttcaagaccagcctgggcaatatggcgaaaccccgtctttatcaaaaatacaaaaattagccaggcatggttgcatgtgcctgtagtctcagctacttggaaggctgagatgagaggatcgcttgagcctgggaggtcaaggctgcagtgagtcatgattgcgccactgcactccagcctgggtgagagtgaaaccctgtctaaaaaaaatttttttaattaaatcaaagaggccaggtgggatggctcacacctgtaattccagcactttgggaggccaaggtgaaaggattgcttgagaccaggagttggagaccagcctgggcaatgtagcaagaccctatctctataaaacattttttaaaaaattagtcaggtattgtgatgccagctactcaggaggctagggtgggaggattgcttgagcccaggagttctagaccggcttgggccacatagcaagaccccatctataaaaaagtaaaaaatattttaaaagctggcacagtaacatacacctgtagtcccagctactcaagaggctagggcaggaagatcgcttgagcccaaagttcaaggctgcagtgagccatgattgcacaactgcagccagcctgggcgacagagcaggaccctgacatacatacatacatacatacaaaaataacagcagttcctccataagaatcttcatattttatcttttctgttactttattaggcaggaaaatttattactttattagctaggaaaattgacaggataaagcttagaaatggtgcttattcctgctgttacgcaattctgtgatgcctcctcaccactgccgtctaccaccagcttcagccttcagcctccctcctctccattccccacacttcaaagcccatctcaagcaccctcccccaccacagagcctgcctctggggaagcactacccagccacacgcagccccataggatgttacctgcctacgaattcgagacctcttatagcagtgtttctccacatgaggcccacctgccacctgcctacacaatcaacccacatgactggtcaaaaggcatatttctggatctcaccccagacctactgaaggcagggctgagggtggggatctatgagtaggcattttgaataaacaccttatgcccaaatttagaaactacagtatcttatatttatgattcatgttttagaaccaggttatgtgtttttgaattacttacaattagctcagatgtccagttcagagagccaaacaactcaacaacgctagatgggaaaaaagaatgccttagctgtagcacctgaggaaaacaattaaggattttagttgaccacaaactcaatgagtcagcagtgtgatgtggttggtagaaaagctctaatttaggctgcagagataaaagtagagtagatggaacacaggaatatcccattccacatcagagcatgtgtgctttacagtgccctgcttagttgggtttttttttttttttttactttttttatttgtttgttttgacacagtgtctcgctctgtcacccatgctggggtgcagtggtgtgatcttggctcactgcagcctccacttcctgggctcaattgatcttccgaccccagcctcccaagttgctgggactacaggcgcacaccaccacaccctggctaatttttgttgctcaggcttctgcttagtttttagggccacacttttaaagagccctggacaaattggcacatgttaaaaggaaaatactaagtaggatagtgagagacacacagaatgtgccatagctatccgctcttttaatggcagcagatcttgtcccatgagggcaatggccccagagggttaccccatacaaacaccttaatctcagtggcttaccactgggttacatcacagggagaagacggcgtttccccaggaagtctctggctagaagccctgggaggcttttctgatgattccaagaactgacaagactttctcttctgtgtttctcatattgagaagcaaatagatgatgctgcatttggcataggaattttctaaattaattcacaataaataacttggtcaaaaaactgtaatacatctctagcaagccgcccacatatacaacataatcacgtccttaggatgaactctgccataattataaagaaaaagtaaaagggataaaagagggaaagtaggctggacatggtagctcacacctgtaatcccagcactttgagatgtcgcggtgggcagatcacttgaggtcaggagttcaagaccagcatgaccaacatagtgaaaccccatctcttctaaaaatacaaaaattaactgggcatggtggtgcacgcctgtagtcccagatacttgggaggctgaggcaagagaatcgcttgaacccaggaggcggagattgcagtgagccaagatcgcaccactgcactccagcctgggtgacagagcaagactccatctcaaaaaaaaaaaaaaaaaaaaaaaaaaaaacagggaaagtgagtttgttattatctttgggaaaactctcttcctaaattctatgtatgtgaggaacatctgctggtgaattatgtgcctgcgccacctctaatgtgtttatactttgcatgtccataggacgggggcaccgccctgttggctgccagtcagtacgggcacatgcaggtggtggagaccttgctgaagcacggagcaaacatccatgaccaactttatgtgagtgcatttcagggggacattaggacatttctcatcacatacaaaattgcagtctaaattcagatgccagaaatgccaacttcaaaaatactttaatggacagtaggacttgggtctgagtcaagagaaaaatatatagcggaccagatgggctttttttatatagaaaccacatatctggccgggcgcggtggttcacgcctctaatcccagcactttgggaggccgaggtgggtggatcacaaggtcaggagttcgagaccagcctggccaacatggtgaaaccccggctctactaaaaatacaaaacttagccggggatggtagcgggtgcctgtaatcccagctactcaggaggctgaggcaggagaatcgcttgaacccaggaggtgaaggttgcggtgagctgagatcacaccattgcactccagcctgggtgacatagtgagactctgtcccccaccgacaaaaaatgaaaccatttatcttatttacccatctttgttctcccttttaaatctgttgtgcagatgaaacatttcgtgtacctatgcaattaaggccttcaaaaatcatgtgatacttattcgtaccatgacaaactacaaagcccagcatatggacttgctgaaaaccaaaatatacaaaatttttctaaatgcgctcattggatataaaaatatactgttgtagtatttgtgaggaagggcacaaagaggagaaatctaaggtatttggtagaaaagtgaggttggatggatgaagacctctgtgaaatatacacatgccattgacctgtgaaaggcatccactgctagtgcgggtctgtttgcagctaactgtcaattagtacatcatcacccaagggcctttcaattgattgtcgctataatgccataggatttatggcaaacattactccagttttgtaagcgaaaatagaatatagggagatgaatagacttgacagtctcatggtgaagagtggaaaaattcctacttccaattatctaggaaccgtattttaggctgtcctacaggtaggcatttaacccttatgcctggggcactatactttcatagacatgtaatgagctctgtaggtgtgaacttttccatttgaacaccctttccagagtttacatggttaaccctgacaaatcacaggcctctttgaaattcatagcagctagcctcaccctctgcacttcaaaatctgtaacacactttgagcctgcaacattaccagtagaatgattgaattacttgataatgatctaaagaggcgattctcaactctggctgcccattagaattatctgggaaagtttaaaaaaatactattttgaggcccactccagaccaacaaaactggagtctctgaaggcacagcttgggcaacaggtagttctcacatgtagcctaatctaagaagcacaggtctaaaggttagatatgtctttggctatatataggtagagtatatctgagagtgtgtaatatatatatatatacacacacacacacacacactgaataggaaaagccaaagtgtttggtgaaaagaaaagccccttcccatagtaatttcctctctgttttaaggtgactcaagaaatttcatgcattataacttccattttatattaagacctttacctttacccaaacaatctaaatattttcttaaaaacgattgaaatatggatgggcggggcagaaccaaaacttggaatgcacagtgaaaaattcaatgcatgggtagttcatcttggaaaattcctgagagttaaaaaaaaattaaaaaaagaaaaagaaaaagaaaattgctgagagttttcagcagctaaggacatggtagactttccgaaaatgttatccccatataaaacatctgcttgaaaatctgtacaggctgattaatttcttaatgattgcctggagggcagtttggcagctctgctgacgcccactgaaaatccaggaccctccacgtgacacacgtggctggacttgcagggaaacatgtcttatatttttgcttgaggttagtgttcccaatgggaggtgtggtaattagctgggtttgctaggtgttttcctctagggtgtgctctggttttccaccgtggtctgaaaacaatgaagctcaccctgcgctgcgaatgttgtcaggctgaagggagcatccggggatcatgctctcagctgatccacacgtctgccgaaagcaccgagtgacatgtgtccaagaaaacagaaatgcccagaaggcatagatactcagttaagacgaaaactaaagagcactggaaaaggggcacttgctctgggctttatgcaggagtgcttttttgtgtttataggtgttgttggtgtctgctgggctggcagagagccactttgtggagatggtttctagggcagttgtattgaaaacatctttcagggttcttttgtgttttgtcttgttttgtcttgttttgttttagagacagggtcatctggatatggtggctcatgcctgtaatcctagtgctttgggaggcagaggcaggaggatcgcttgagcccaagagttcgagaccagcctgggcaacatagcaagaccctgtctctactataaatttttttaaaaaattaactggatgtggtgatgcacgcctgtagtcccaacaactcaggaggctgaggtgggaggatcgcttgagctgaggaagttgacgctgcattgagctgtggtcgtaccactacactcaaggtctgagtgacagagggagaccctgtctcaaaaaaaaaaaaaaagaagagagagagagacaaggtcttgctatgtttccagggctggtcttgaactcctgggctcaagcaatccccctgcctcagcctcttgagtagttgggaccacaggtgtatgccatcgtacccagctgcatattgtatcttaattcttgcagaaccctcatgttgggggaacaaggataaggggacaagaaagagaaaagggtaggaaagatctaattaaaaggacaccttttactctcaatttttttttcttttttttctttttttttttttttgagacagggtctcactttgttccctaagcctggagtgcaatggcccaaacatggctcactgtaacctcaacttcccaggctcaagtgatcctcctgcctcagtgcccccaagtagctgggactataagcacatgccacctcgcccagctaattaaaaaaaaaaagaatttttagaaatttaaaaatatattaaaaataaattttttaaaaatgaggtttgggggatttgtatatctaacatttggctcttcattgacaaaaaggtggaaacctacaaagagatggagatggaaaattatattaaatgtgtatattttaaatctaatttattttattttatttattttgagacagagtctcactctgttgcccaggctggaatgcagtgatgcaatcttggctcactgtaacctccacctcctgggttcaagagattcttctgcctcagcctcccgagtacctgggattacaggtatgcagcaccacacctggctaatttttgtatttttatttgttttttgttttttgattttttgttttttgaggaggagttttgctcttttgcccaggctggaatgaagtggcgcgatctcagctcactgcaacctctgcctccaggtgcaagcgattctcctgcctcagcctccggagtagctgggattataggtgcccgccaccacgcctggctaattattttgtatttttagtagagatggggtatcgccctgttggccaggctggtctcgaactccggatgtcaggtgatccacctgcctcggcctcccaaagtgctaggattacaggcgtgagccgccgtgcccagcctaatttttgtgtttttagcagagacgggatttcaccatattggccaggctggtctctatctcctggattcacctacctaggcctcccaaagtgctgtgattacaggcatgagccactgcacccgccctaatttcttttaaaataagtgtgaaagataatgtttttaatgcttttaatttgttctctctcaggatggagccactgccctcttcctagctgcccaaggtggttacttggatgttattcgattactgctggcttcaggagcaaaagtcaaccagccaaggcaggtaatgtccactgttgacatttgcccgagcacatggcgcatggggcagggagggctgggtgtccgctggcagcacatacctgagataaccagtaagctcaaggcatcctttaaacccttctgcttctgtgatgaaaagttaatctttgattagggtatctcctgttctatgctctgagctggcctgaaagcctatgaaaccaagctgacatcacagttcagtactttcaaaacttaagtatttgatgtctgaggtcaagtacacaagtacacactctgccacctcctgtgcaaacaaattatggctgcactgatctaatgagtgcaggctggcctgggacataggtaaacagatgtgggccaagtagcctggcccctgctgataatgctgccttactacctgcccaccacttcttccaccaagccaaagaggagcccatgccgttggaatcattaggaggttctgcaccttcatctctcacaattgttatgctgttgagacttcatttaccaacagcaagctaacagctagcaattcaattaactgaaagtaaaagaacagaaatgtagtctgggagtggtggctcatgcctataatcccagcaccctgggaggccgaggcaggaggatcacttgaggccaggagtttgaggccagcctggccaacatgatgaaaccccgtctctactaaaaatacaaaaattagccaggcgcggtggcgcatgcctgtaatcccagctacttgggaggctgaggcaggagaatcacttgaacctgggaagcagaagttgcaatgagccgagatcgcgcctctgcactccagtcttggcaatagaacaagactctgtctcaaaaaaagagtaatgatttttaaaaagaagaaaaaagaacagaaatgcaagattatacaggcagcactttataaacagtgaagaaccttccaaatgtacagtattataattagcttctcttgtgtaggtactatttttgtccagattaactttttttttttttttttttgagacagcgtcttgctctgtcatccaggctggagtgtggtggcatgatctcgacccattgtaaccttcgcctcctgggttcttgtgcctcagcctcccaaatagctaggattacaggtgcatgccaccatgcccagctaatttttgtatttttagtagagatacattttggtagagagccatgttgcccaggctggtctcgaactcctggcctcaagtgatccacacaccttgggctcccaaagtgctggggttacaagtgtgagccaccatgcctggcaccagattaatttatttttaacaaaacatttcgaattaaggaaacattactataaaggtagtttcctaggaaaaagtcaagctgatttcatacccaggcacatctccactgtactatgacctgatacaggaatgcctctctgtgttcacataatgaatagctatgagaactttaaggttggtctgagctcttggacacaggtttctctggtctttagaagcccaagcacataaggagcctgagaaaaataaagagcctttgggcagagtggtttgaagtcaggaaagcaaagtggttttgaggtcaggaatcccaagttctcaatccatctctgccaataatttgagctgtgtggttttgaacaagtgaatcaacctctctgggcctgactttcatcattgaaaattaggaggctgagcagcatgagcctgatgatctcttcaaatgcccacattttaaataattgttttattcaacattcaatcaatatttcttgagtacttaccatgtgccagacattgtaatcaatgtaatgtatcaatgtaaggttatatttttagaattgtaaagttattcttaggtggccccaggaatactcctgggaaaggaagcagtttcaaaaaaacttttactttcgtcctgctagagttgactttcgaggactggagtttaatattttcgtattggtccttcttattttgttattgttgattgattctgaatcagatgattcattttactaaaattagtaaaaggaattggttatttttagattgcctaagtttgatttgggggccattattgaagataccactgtgaatttagaatgtgaggttatcaagattatcaagtctctctattagtacatccttccaaaataatttctggcactttgaattttattctttatatgcctaaagtactgcttgtaaaaaaccaagtcgatataagagattatatttcaaatgttgcatgagccatgcccacttaaacctaaaatgagtcatgccgtgatgttgaagccaagaagttaaagagtaaaccaacattgcagcagtagccacaacacgccatagctgttttttcttcctcaagagttaggataacctggtcaaagtggatgacctagtctttgagtgcagggatccaccctctggtcaaggagcaagtgctacaacttctaaagactgcatctaatgaaattgttttgaattattttgagttcagccctaaaagaattgttattcaggaaaagggtgtcttataaaataagaattgctttggggaaaaaaggcaatggaatttttcctttttacagagtacactcaccccattgtgccctcaaatcataataatttttattacctactgtgagcttataattagaggttgttatctatccaggtcagactagctcaagttccgtcttctctgaaagtgtaaactctgcatatttattatgttccaagaaaacagtgccatgcctgcacatggcctgcacatggcctacctatattctataggtagagcatttggaaaccaatgttttattctgaaatctcagctgacacattgagtcattattggaaaatccttgaatttacaaaatgaggacaggaatacctgcctggtttaatttcctaatacttttggctaaatctgatttgtaattgttgcactgacattctatgaagccctaccattttattacggtatcctgtaacaggatgttgacaaagttacattgaaattactcagctgacatttgatatgagcttcagggaatctgaacggtagtgggatgacttttctttgtaactctatcactgagaactaaatgaagacctttttagtactttgggatgaggaatcataatcccaaatctagtcatagccagacagtaggaagactatgttcttgatttgaaacttcaaaaaatattttccttccatattgtcctaagccaaaaggtcaagagtcacagagatcattgaaatatagatttcactctaacaattcattttcatttctttccacgtgtcctcaccaagttgagttgctatgagtcagacctttttaatcactagctgagtggctatttctatttttctattaaccaaatgcctcgacatatattttcccaactccactcacccaccttattaaaacaatactttaatagaatgcaaaggtctgatcctgttaacccagagctgaggttagtcagttaactcatctctatctagtctttttcatgtgctaaacagtatttctttgaaggctggaggaaaagtcatctaataaagtgccatctcctaacagaagccttgacttgtacacagagtagctggacccagaaattaaacgttctcccaggtcggaagcttagaggggtgaatccatcaatggcagtgggagaaggagccaaaagattagcgtagaatcctgggggtttggaaatgggaacagacagccataggaagtccttgctgcttggcaagggcagggactctgtcttgtttcgtttgcacatggtacacactcagaaaaagtgtatcgactgccagaagatccccatggctggtgcagagcaggtctggaagcctgcagcatttagtgatcagtgcctgagagttagaagaaggctccagatatagggcccagactcataagcataagccccaggaagactgtaagaggcagctagggagcagacccagattttttgggtggagagcagcttggaaattatggggatatagatatcttaaaatgaaacagaggccccattttgcttattaactgtgtgaccttagcaggttgcctactgtccctgagtctcagtattttaggactactgtgataattaaataaaataatccctgcaaaactcttaatgcagtagctgatacacacccagtgcaatgttaggtattgctgttattatcattcctattccaaccaggcctcattggaacagaaaacccatcagaaatcaaggctgcactttctctagtgagtcgtgtgttctctgtcatctcaaagtctcttcatatctctgtttctccccactcctttctttttttaccagttttgtctgcttacttatcttgtatgtggtccccaggtttatggatcagactgccaacctctgggaatagccatgtcattgtcacagctcatctttgtgcaccaggccacagtgactggctggcctgcctatcctcagtcccatcacccttgactggggaggatagagtcagaccatgggcaatgcagcatctggtaaaatctcttacagacccatttgctgggccaggcacacggtgcaagggacaatcataagaaataggctccagggcagggtagggtgggtaagaaaattatctcaatattgaactccctctgccacgggcaggattcctcacagctcttggactcccaacttcaaatagaattggtccccaagactttctgactggcctaaccctgtaggtagaagtaacccaagtgtgacggctggaaatcgtagaagcaaagagctagtgccgcttcagatactcattcccacagaagaggatggttttagttcttttttccaaatactctcaggagcctacataagaccatacaaggttagtctctaatacaggttgtgtcatatactccatctcatgctgtgatctggctgtaaaagtgatctcgaatgaaatgagggaataacagagttggaggaaactataaaactcactctatttagccatccatcggtactcgaatcctttctatgataatcagctactgttgaacacctctaggcatggagaactcactcctctctgatcagtttctttggtcttagccaacactcattaaacttttatacattgaccccaagtctccatgcagctttcacccatctgtcttctttctatcacttggtctgaaaaattggtctaaatccttttctacttgatatacacacacatagtaaaagacagctatcataaccccatgaatctcattcttcttcaggctaaatgttctattaccttttttttttttttttttttttttttttttttttgagatggagtctcactctgtcgcccaggctggagtgcagaggcatgatcttggctcactgcaacatctgcctcccgggctcaagtgattctcctgcctcagaatcctgagttgctgggactacaggcatgcaccaccacacccggctaacttttgtatttttagttgagacagagttttgccatattggccaggctagtctcaaactccaggcctcaagtgatttgccccacctcggcctcccaaagtgctgggattacaggtgtgaaccaccatgcctggccattacctttttaaaaaaagtgctgtagaggttataacttcacaatgatttctttgatttaatatcaaagtattaaaaatatcaaagtatatggaagtattcaaaagcctatttgaatatttttaaatgttttttcacattttggtacattccaaaactctacaaaaaggagctaaattgacttacttttcatcattttcaaaattatttttatatgtttaatttaaaaaaatatataaaatcgccagacgcggtggctaacacctgtaatcccagcactttgggaggccgaggcgggcagattacaagatcaggagatcgagaccaacctgcctaacacggtgaaaccccatctctactaaaaataaaaaaaaattagccgggcgtggtggtgggcacctgtagtcccagctactcgggaggctgaggcaggagaatggcgtgaacccgggaggcggagcttgcagtgagccaagattgtgccactgcactccagcctgggcgacagagcaagactccgtctcaaaaaaaaaaaacatatgaaatcattgttcttttttttatagagatgggggcctcactgtgttgctgaggctgatcttgaactcctgggctcaagccatcctcccgccttggccccccaaagtgctgggattacaggtgtgagccactgcaccccatcattttcatgatgaaaatgaaggctctaaccattataccagaaggaaaaaataagagaaaacagaaattaaggtgtacaaaagaggaaaacctctcctaattcataaactaaataatcaactgataggtaatctgatttgacaataatgctctaactcacatgcaactccctgggctccaaaatcagatttggagatgtaatgactagtaatgaaatacacaggcggcccccaaatctcattttcccactcattcctacctgctcacagtcagttatctcacagggtcgatggaagaatcaaattaaaaagcatatggaagtattttgtgaacaaaagtacaaattaaggggcgtattgtttctcatgataaatactactcagatgcaattaacatttcctaagcatctgtgagccagtgctcatgctcaccacctttgtatatgttttctcacttatctctgcgaagctaataatttttcctaagaggacactcactcaggctgagatgatttgcctaaggtcttacagccaggaagaactgattgctttttccacctcccatgactattccaattaagatgatatatttgatgagtgttatcattgatgttctaaattgataataataattttttggccaggcacagtggctcatgcttgtaatcccagcactgtgggagaccaaggcgggtggatcacttgaggtcaggagtttgagaccagcctggccaacatggtgaaaccccgtctctacttaaaatacaaaaattagccgggtgtggtggtgcatgcctgtagtctcagcctctcgggaggctgaggcaggaggatctctggaatctgggtggtggaggttgcagtgatctgagatggcaccactgcactccagcctgggcaacagagcaagactccatgataggtaggtaggtaggtagatagatagataatttttcacaatatagcaccttttagcactttcccacatattagtttcaattgttaatacaagtttactaataatgaccaagccattgaaaagcacattgaatagacagctggctgcctctccctgcccgccctctggtggagagagtgacaaagaacaaaacagacccagagcaggcacggagggagaagcgcattagtattggcaccagcttggacccacactcccctcctgccttccagggtcccacccgcacccctctggctacagcagctagatttcccaccctgcatgaaggagccatgcctgtccaagccactgtgactgtagctgcttttccttctccttcaaacgacccttcccctttctcacacctagcaaaatcctggtccttcttcaagacctggatcagatagcactctatccaggacactgagccctcattccccatgcagcagccctcccacctgtttgattttgtgcatttttgtccatactttatgatggcactgcagtcgtatggaaacctccatgtctcttctccaggacttatttttagcactctgcttgagacttagaaggctgggctcacacctgtaatctcagcactttgggaggctgaggtgggaggattgctggaggccaagagttcaagaacaacttaggcaacaaagcaaggccccatctctacaaaaagaaaaaaagaaaaaaaaattagctgggcatggtggtgcacacctgtagtctcagctactaggaaggctgagataggagggtcatttgagcccaggatgttgaggctacagtgagccttgatcatgccactgtactccagtctaggtaacagagtcctgtctcaaataataattatcattattggttgcttgaattattgattaattaaatcctgaattgggaaaatcaaataaagaatatggaagtgcttttaaactaaagtacaaattaaagtacaaattgctcatgataatatttagattcaagaatatttccaccaagaggaccctggaaaaattatgaagtaagttaaagtgtcttccacttccctctatcctttgtttcagcacctcttccactgtctctcccaagacaggtcccaacatcctgtgactgctcttcagcacccccagatcctcctgggctcccaagtcaccagcttccccgacccagctcagatgtcttcatcctctctccctttcctgggacagcagtgggcaacaatcttgtgcctgcttctgctagtaggctaaggttgaaattacacactgcagcagaaaatgtaactttatattctataactgaatcattttgctcttcagccccccttcccccgatgggtaattcagtcttatctggctaaaacagtctcttggggcatattaccataattacctcagaggttacctttagcccattctggatcctgctccctcctgcctttctctccgaagggacctaagagtcagactatcatcctggcattgagatgggggtggagagcctcatgcgtggcccttgtgctggtccacaagcgtcctgcactcttacaccccagggttgcagctggtctcgccattctctgctggcctggccattgtatctactcaggaagtcagggcactgtggccttgccttcccgacaccaggctcactccagccgactgtttctctgtcacttctgatttcccataggcagacgggactcctggatgcctaggtgctaggtggatgtgggccatggggactgggggaccactgactctgaaactcccacggccatttctctcctatctcccgggcaccagcagagagcagaactctaaagggcttgtaactttcctggtttctcacaagaagagaaaatcctttcccatctggaattccccataactgacctgatgtttcttccacaacctaggttacctctcccccacaacacacgcgagattcaacgcagagggggaagaaaacgtggacactctcacgtgacctccgccttccccctccctctctagctccttcacacattggaaggctttcccagtttccatcccatctgctgggaaccaccctactgtcaaatccttccccatcccttgcatgttttacttttttctcctctgaagcaatatatctccacctcatggcccagtgtgcacagagatagcaatattggggaaatactcccaaatatacgcagaggaaatattccccaaaatgctgtcctgccgtaactagtttatgtgcatcacttcctagaagacacaacaacagattccacctaaaattaagccccctaagaaatgaggtggctttggagggttctggacaccagactagaagagtaggagaaatgacttgagttctctgacccgcagaccccacctcaaagaaaactgcctgcgttctatgggaatgaagggtgtattttgtgaacattaaggtgtgacccactgggaaagcaaagaaatggacagtcttgggggaataggccggcttctctctgggtttgtggaatttggttctgctgtggtgtatgtatacaggtcagctgctcccccaagccttcaaagcaaggttcccacgcatctttccatgaagtctgtaccaccctttttggtaaaagatccagccacaaaatggatgattttataagccaaaatttgaatactggcaattattcaagtagcccaggctcagccacgtgccgtctgcgtccgtgggctacacacaccccctcttttctcactgcctcctgggcggtgtggatcagctgcagagtgtgatctgcggtcagggagtgccttcccggagttttcgctttcagacccctggtgttaaagacgttctgtgagcgggtggggccgggcgccccagtcacggcggccgccgcctcctcttcccgcaggacgggacagcgcccctgtggatcgcgtcccagatgggccacagcgaggtggtgcgggtgatgctgctgcgcggagccgaccgcgacgctgcgcggaacgtgagtgcccgagtcgcgcggccaaagagcgaagcctcccggcgcgcctgtgtggagaaaacgggtcttgactgagtctgcagcccacatgggtttcctcccaacctccttccttgagcaggaaaacaaagtcaaggtctgattcggtgctgctcggtctctctcctcctccacccgagatgaccttgggacgcactagagagggtggaatcttagccttaggcctgagggcggtagagacggggcctcccgcctgtcctgggggcctcccgcctgtcctgggggcctcccggctgtcctggggcgtgtcctagggggatcccctggctggtgctgcgcctcctgcaggccctgcctcttgcccctcctccctggagctgcagaccccttgcaccccgtcccctgttggcccgccgtcatccactggcctctgctggtgccacctaatactgcctttgtgtgctgcacagcaggcccttttccccataaggaaggcttgaagagaacctgaccacctatgctgtttgctttttgtgttttactgtggcctttgtataacccttgcttacgtaacccaccttcccctctccaagtctaagctccaaaaaagggaaatcaccagacgcgttcgccaccatttcactgccctctctctcactcttcttcttcccacaatctctgaagccagaaaagacccccaccccccgccccccaattcattcttccttctttctgattacagataaaccctaatggcaggccgaagtggtttcttggctacgggagaattatggactaaatcctccaaacacagcgactgatatgtgaaaatgggagaaaaaggaatttggaaactgtgttcttgagccaaaaaataacgacagaagctaaatattaatttttgaatttggcttttcattctttttagcagattttattttatttttttctgagacagagtctcactctgtcacccaggctggagtgcagtggcacggtctcagctcactgtaacttccgcctctgggttcaagtgattctcgtgcctcagcctcccgagtagctgggactacaggcacgggctaccacacccggctattgtatttttggtagagacggggtttcaagtgaccctcctgccttggccttccaaagtgctagaattacaggcgtgagccactgcacctggccttttagcagattttaatctatcacctctgcccctaagccccactacccacacacgggcggatgcctagagcagactagggcaaggctgtataaatttttttagaaacagtaaatacagctcaacaatgatctaaattattaaagacagttaaccatttctgctaagttatgaacagccgagaatgcctctttggtccaaccatggcctaaaaatatgctcttgaaattccccttgtcccctgcccagtgttctcaggaactgtagaagtatgaattcccaaatggcagagttctaacataatctaagtcactgtttatctgatactctttcatgcagaatttactgcttaatattctctaaaatgctcctagattaagagacattgctgatctgtgcttaatttacacgtcattagtttctgacaacggtactttccagttcccaactgactgctttcaagcaacacagatatatgttaataatcaacttttattttcctctttctgttaaggatggcacaacagcattattgaaagcagccaacaaagggtataatgatgtcataaaagagttgcttaaattctcacccactcttggtattttgaaggtaagacctaaagataaattttactaatctgtaagagagaggttagaaagtaagtcctcacttggggactgtgtcgaatttgggtgcagttagcctggttagttggattcttgaaagaacacacctgcagcttcttgatgctggagatcccaggggctctggtagaagtggggaggtggtagaaagagtgaaccacagtctgtcattacctagttttgcagaaaaaaaaaaatcgacagtagtaatgaaatagctaattggaaagtatgccattttgacaccatttggaggatttgtgaaatcaaggaagaagaacagacacttatgtctgttctcttcattttcttaagcaaagaaccactctgttttgttcccttaagtgaaataaaataagcctcaaacacctggaagcctcagaaaatatgtcagtatggatacctgggtcacctaaaaaacagagccaaaactctttttttaagttttgatctttttgttttgttttgttttgcttttttgagatggagtctccctttgtagcccagactggagtgcaatggcacgatctcggctcactgcaacctctgcctcccaggttcaagtgattctcctgtctcagcctcccaagtaggtgggattacaggcacgctgccaccacacccagctttttgtatttttagtagagacggggtttcaccatattggccaggctggtcttgaactcctgacctcaagtgatccacttgcctcagcctcccaaagtgctgggattactggcatgagccaccctatctggcctaaattttgatcatttttgattaaaatatttctaacctatattatatatcaggagtcagcaaactttttctgtaaagtcttaataaatattagtatttctgtttactaatataattatattattgattatattaattttattatattatattatttattatattaatagtaatgcttactaacattttagtaaatattactaaatagtaaatagtaataaatattactaattactaatatatttactacagtaaagatatatttattaatatataaatattactataggaaatatatactacagaatgtatttactatacactatatatatagtatatatagtatatatatatatatactgtatatatagtgtatatatatatatactatatatatatagtataaatttacattttttcagagacagggtttcactctgttgcccaagcttgagtacagtgatgcaatcatagctcacagtaatcttgaattcttgcgctcaagtaatcctcctgcctcggctgggactacagccacacaccactgcacccatctaatttttaaatttgttgtagagatagggtctcactatattgtccaagctggtctcaaactcccagccttaagcaatcctcctgccttgaccaggaggcatattagtatatggcatatatttactatatatagtaaattatatactgtaaatacatactatataatatatagtacatatagtatggatgtattatatacatacagtatgtatagagtatacatacatacagtatgtgtagagtatacatacatacatacggtatgtgtagagtatgcatacatacatacggtatgtgtagagtatgcatacatacatacggtatgtgtagagtatgcatacatacatacggtatgtgtagagtatgcatacatacatacggtatgtgtagagtatgcatacatacatagtatatatacatacatatagtatgtatatattatatactatataatatatacatactatatagtatatactatataatataaatatatactatatatactatagagtaaatatttatgtctagtaatatttactgaaatgttagtgaatattactgttaccagatagcaaatattttaggctgtgtgggccatacaagtctctcccaactgccccaactctgctgtggtaatccaaaagtaaccatagaaaatacaacaaaaaggcccagtgcggtggctcacacctgtaatcccagcactttgggaggctgaggcaggtggatcgcttgaatccaagagttccaaaccagcctgggcaacatagctagactccatctccacaaaaaatgtttttaaaattaactggtcatgatggcatgcacctgtagtcccagctacttgggaggctgaggtgggaggatggcttgagcctgggaaatgaagctgtgatcgagccactgcactgcagcctaggtgacagagaagctcctgtctcaaaaaaaaaatcttaattcctataaaactttatttatgaacattgttatttgtggaatttcatattttcacatattacaaaatatttttcgtcttttaatctttttaaaatcatttaaaaatgtaaaaacagtctgagtgcagtgatttatccctataatccagcactttgggaggctgaggcaggaagactgcttgaggccaggagttagagaccagcctggagaatatagtaagaccctatctctacaaaagtttaaaaattagatggatgccatggtgtgtggctgtagtcccagctgaggcaggaggattgcttgagcccaggagttcaaggttactgtgagctgtgattgtatctttgcacttctgccagggcaacggagtgaaaccctgcctctgcaaaaatttttaaaagtagaagccgttcttagcttgcaggatttgatttgcaggctgtggtttgctgacccctgagatataatgctcctgttttattacatacaggacaccaaatctgttctaaatggacacagcggcttagctttaggactgtcctctcagagtctatcaatgtatataaaacctacttgcccttgaatgaccccagacactttttggatattttgtgtctgctctttatatttttagattccattcttgctgacagttaatacagaactgctgttgtcaatgtgttggcctctctcccctgccctaatgagctcatgagctactttcatctgccatgagctttttttttttttttttggagacagggtctcgctatgttgcccaggctggtcttgacctttgaactcctgggctcaagtgattctctcatcctcctgcctcagcctcctaaagcgctgggattacaggtgtgagccactgtgtctggcctgccatgagctttagaagccagaaagctgcacttgttaaaattgtttgtaaagtaagaataaaccatctatgaaaatgaattctatgaacaaaaggaataagctttagaaagcttggactttgcaaaatatagtcttgtttcaaacagctcttttttggctttttaaaaactcctggtctggtgtggtggctcacacctgtaatcctagctctttgggaggccaaggtgggcgaatcacctgagattaggagttcaagaccagcttggccaatgtggtgaaaccccgtctctactaaaaatacaaaaataagccaagagtggtggtgtacacctgtaatcccagctactcaggagtttgaggcaggagaacctgggaggcagaggttgcaatgagccgagatcacgccactgcactccagcccaggtgacaagagcaaaactccatctccagaaaaaagaaaaaaaagaggccaaaaagctgcacttgttaaaattgtttgtaaaggccgggcacactggctcacgcttgtaatcccagcactttgggaggcaaaggcgggtggatcacctgaggtcaggagttcaagaccagcctggccaacatgatgaaaccctgtctctacaaaaatacaaaaattagctgggcgtgggggctcatgcctgtaatcccagcactttggaaggccaaggcaggaggatcacgaggtcaggaaatcaagaccatcctggctaacacggtgaaaccctgtctctactaaaaatacaaaaaattagccgggtgtgtggcgggcgcctgtagtgccagctacttggaagactgaggcaggagaatggcgtgaacccgggaggcagagcttgcagtgagccgagatcacaccactgcactcaagcctgggtgacaaagcaagactccgtatcaaaaaaaaaaaaaaaattgtaaagtaaaaataaaccatctatgaaagtgaattctatgaataaaaggaacaagctttagaaagcttgaactttgcaaaatctaatcttgtttcaaatagctcttttttggctttttaaaaactcctggtcaggcatggtggctcacacctgtaatcccagccctttgggaggctgaggtgggcaaaacacctgagctcaggagttggcgaccagcccaggcaacatggcgaaaccctgtctctacaaaaaatacaaaaattagcagagtggctgttacacacctgtagtcccagctactcaggaggctgaggcacgagaatcgtttgagccctggaggcagaggttgcagtgaactgagattgcgccattgcactccagcctgggagacagagcgagacactgtctccaaaaaaaaaaaaaaaaaaaaaaaaattctgacccgtgttgcatgtaggtgaagttgatagattggctaagatttagacaagtaaattgttacaagagtagtgaattatcatacatacttaaaagcaaccatagaaaaatgctactttgtgggaatttttctctgggtatgatattttactcttttacaaaatcagagtggtttttattatgagcaactaattaggaaactaagtttgcattaggtactatttatggacatatgtaccctctagaaccatgtcttatgactgcccactgttcttagttttgttatagtctcctcccctcctctccgtggtccagctacatgctgcatttagctggttccttattttgataaatatttgcagtaaatgtcataaaacattaacaactgacctatgaggcccttctgtgctcaaaaatgctccaactcaaagctccggggcattgcctcaccccacatacccttcctcttaagccctgtagctccacaatcacagtcctgcccacctgagtgctcagagtgtctgtagctggtctgacaggtcagcccgttggctaaacagctcttcctctaacctcgctggaagtggctcagcaaaactacagactgtacgtgttgtccttacgtgttgtccttgaagaacaaaaatgttgggcacggcgttgttgtttcttctgcagcaagttccaaagtatgtaaaacagactgagtgaccatgaagtcatgtgtcccctcagccctattccttatttcacttgtaagagaacattagcaatatttgtactgaccattggttatgtatccaaggacactatactaggggctgatgtgactttgaaaagtacaaggcaagataaggaaggttacgggtatgaggttacagtcttatcacccagatggtttatgatgaaagccatgctgaatgccaatggctgtgagctcactcctgacacacactgtcattttctcttagaatgggacatcagcgctccatgcagcagtgctcagtggaaacattaaaacagttgcgctgctcctagaagcaggggcagacccatccctgagaaacaaggtacccactaagcaatcttttaactcgtttgggcccattgatgtgtcctcctaggccaggaaggataaacatctccctggctccagtcaccatcttcattctttgcatagtaagggcattcaaggttgctgttagtaggtgattagtgagcagtacagttggacccaggaaattctactgttaataaaaaccctgactcatatcaatggtttttttttttcttttttaacaaacccttgtgtcaagggctgactttcaatagatttttgcagcgagggaggtgctctgctatgtacgaaaccctgacccagaagccggtcatttacaaatggtttagcaccaggttccccatggacgtgcgttgtgtgatgggtgagggcgctatcaatggttttctttttttctttgagagggagtctcgctctgtcacccagactggagtgcagtggcgtgatcttggctcactgcaacctccacctcccagcttcaagcaattcttctgcctcagcctcctgagtagctgggattaccggcgcagaccaccatgcccggctaatttttttgtgttttagtagagacggggtttcaccatgttagccaggctggtcttgaactcctgacctcaagtgatccacccacctcggcctcccaaagtgctgggattacacacatgaggcaccacgcccggccagtggttatcaatgaacagtggtgcactctcctggtggaggcgaggaagaaagggagagcagttactatgggagtattgttctgtcatctaagatgtaccctaaaaatgccaaaattctggtagtttatcaccattcccataagttcgatgttcatatcttgaaaattgcttgtgctatatttggttgcttttgtattgttaacaggagtacatgccactgttacaaaacaaacccacttttttctagtcctaaattcttcatttacaattaggccaaacttcgcggtgggtgggtacacaataagaatttttttaaatgattgtcattttacttcctcctcttcaacatctgcttaagctggcacatgtatagattgcagcagaggagagtagcctaggaaaggtcttgagagaatgcatgcgccaggcgcaaaggcccactcctgtaaacccagcactttgggaggctgaggcaggtagattgcttgagcccaggagttcaagaccagcctgggcaacatggcgaagcctgtctccacaaaaaatacaaaaattagccaggtgtggtggtgtgcacctgtagtcccaactactgaggaggctgaggtgggaggattacctgaacccagccaaggaggtcaagggtgcagtgagccatggtcacgccactgcaatccaccctgaacgacggagtagagagaaaatgcactaaactacaacctttatttacttatttattatttatttaaatgtaaatttttttctttttatagagatgtgttcttgctgtgttgcccaggctggtcttgaactcctggtctcaagcaatcctcccaccttggcctaccaaagtgctggtattataggcataagccaccacacctggcctaaactacaaacttttctgttgctattgttgtttttgagacagagtctcactctgttgacaggctggagtgcagtggcacgatctcagctcactgcaacctccacctcccaggttcaagcaattctcctgcctcagcctgcccaatagctggaactacaggtgtgcaccatcatgcccagctaatttttttgtatttttagtagagacagggttttgccacgttgaccaggatggtctccatctcttgaccttgtgatccgcccccctcggcctcccaaagtgctgggattacaggcgtgagccactgcgcccagccataaactacaaacttttggaggagaaagtggtattggtgtttacgaatagaggaggatatgaaaagcaacttttactttatacttaacatactctgaatttttctaagcatatcttactgtgttaaatttttttttaataataaaaacaaaaacatataacatttcatgacattttgaaaagaaaccttaagaagtgccagttaaacaacatgccaggggtcacttttttcatttgactcagcatgtagaagtattacttccccattcccattgaattgcttgtctataacatttctgcttatctctccttagatacttggatttgttttccattagctggcctggctgtgtgataagccagttgaaatcacaattgcctttctttagatcttatctttagaccttgtgcacagacttcctaaagagaccagtctttgttggtgagctatccagtcctgaattaaggcaaggaggaaacattaatacctttacataggaactgaaaaatgcaattccttgtgtgtctcctagaataatggaataactaccaacaataatggttatgagtaatttcaagtgggcaaaatgctggactttggaccctcctgaatccaagcaagtgtaaccgcccaatgggttcaccttgcctgctgcctagacagaaccgatgtatcaggacaggggacttgcagtggagaaagagtaattcacgcagagccagctgtgcgggagataggagttttattattactcaaatcagtatctccgagcatttggggatcagagtttttaaagataatttggcggataggggcttgggaagtagggagtgctgattggtcagattggagatggaatcatagggggtcaaagttaggttttcttaatgttttctgtttctaggtgcgatggcagaactgattgggccagattactggtctgggtggtgtcgctgatccatcaagtgcaaggtctgcaaaatatttcaagcactaatcttaggtcttacaatagtgatgttacccccggagcaaatcggggcagttcaaactcttcgagccagaagctgcatgacccctaaattgaatttttttttttttgaaacagaatttctctcttgttgcccaagctggagtgcaatggtgcgatctcagctcactgcaacctccgcctcccaggttcaaacgattctcctgcctcagccttccgagtagctgggattacaggggcatgccaggctaattttttgtacttttagtagaaacagggtttcaccaactttcactttgagaaacagggtttcccaaagtgctgggattacaggcgtgagccaccgcgcccggccctaaattgtaatttctaatcttgtagctaatttgttagtcctacaaaggcagactggtccccaggcaagaagggggtcttttcgggaaagggctgttatcaattttgtttcagagtcaaaccatgagctgaattccttcccaaagttagtctgacctatgcccagcaatgaacaagcacagcttaaaggttagaagcaagatggagttggttaggtctgatttctttcactgtcttaatttcctcagttataattttgcaaaggcggtttcacagggaggaaatattagtacctgtatatagaaactgaaaaatgcaattccttgtgcatctcctagaataatggaataatcaccagcaataatggttataagtattttccagtgggcagaatgctagactttggaccctcccttaaaaatgacttgaaaacatgtgtgggcactcctgttggaccttcatactgcagaagccctcagacacctgggaggagccgccagggaagtccccagcttcctaccagccactccatagaagccagtcttgctaatagcagctccataggcaagggtgttgggattcctgcagaaggagcattcttggctttcattctttcattcaacaaacactagataccatgcactgtgctatgtgctgggaatgccatagtgaataagattcacagttgctgctttcatgaagctcagagtttagtggggaataaagacaattaaagcaattgcaatatggagtgacagctgtaagcaggggagtaaagaatggtttggaggcttccaggagaaagtgacttctcagctagtacagaacactcttctgctccaggagttccaagacttctgctctggggcttcgagacagatgcctgaggagaaggccaaccagtggccccaacagccattcctcacactatagccattcctcagactgtagccatacccctgggtgcaggggtcttatgttcccaacacccttgactgagcacatcttctcccaggagcagtggggagatttagtggtttaatactgtagtatcatgaatatgggcctatgctcctgctccataatgaacgagatagcctttaggggctagcctggggcactcgccatcacatcaatctgtacaatctcagcaacctgagaatctagtggggactaacggggagggaagagcaattaaaccaggattttagaacagcatggaagacagaatggtgatgtgaatgaccaaaacttgacaacatgatttgaaagtataaagctttttttaatagcagaggatatggacattcatggagatggtcacacaaggcaacacgctggcaggctggtagacagaggtagagcttcttaagctcccttctccttgactgtagaggttcctctaactacctgccagtctgcttaccatggaccagccactgatgtagacagctcagttattcctgagtgtttgctctgagactggatgaagcttaggtctgtttaccaggagcatttctctgcaggcccaggtgttaggcctgtacaatatctgttcctgcaggaactaagctaacagaacttgaccccatagaggagcctctggtctgtagtagcatagcataataatttcctctgtgattgaatccagcatcggcatccagggtcccatgtggtgagaaggggtgcagccacaggacatgctgcacagcagaccacttgtgacaaacttacaattcctaacaagtgaggttccagccagcagatagaggtcagggggcaggatccagctagaagatggggactgcagaagtttcacctaggatcaagtttccagataaagcaactggggttccaggcttggctgctggagaagaaaatatggtgagacaggtaacatctacaaccaagcctccatccccgatactgcctgccgctttaccctttaatggcctcccctgaaattcccagaacatccttctttctttttagagacagagtctctgtcacccaggctggagtgcagtgttgccatcatagctaactgtaaccttgaactcctgtgcttaagtgatactcctgcctcagcctcctgagtagctgaactataggcatgagccaccatgcctggccacaagaaagtccttctgattcctctatacaaacatttctcaaagtgggatccttggacccctgaagatcttcatgacccatacagggggtctaagaagtcaaaacaaggttgggtgtagtggctcatgcctgtaatcccagcactttgggaggcagaggtgggaggatcacttgagcctggaagttcaagaccaacctgggcaatatagcaagaccccctctctacaaaagaaataaaaatctatttacaattttaaaaaagaattcaaaaccatattcttgataataaaaagatgttagccagttgaggtagttcatgcctgtaatcccagcagtatggaaggttgaggcagcaggatcgcttgaagccaaaagttcaagaccagcatgggccatacagcaagacctcatctctttaagaaattaaaaaacaaaaaacatagctgggcatggtggtgtgtgcctgtagtcctaactactagggtggctgaggtggaaagatcacttgaacccaggagttcaaggctgcagtgagctacatgattgtgccactgcactccagccttagcaacagagagaaaacctgtcccctataaaagcaaacaagatcttatctgcctttttcactgtgctgacatttgctctaatggtacaaaagcaaaagcaatggtgggtgaaactgttggggccttagtacacctcaaagcaggaacactaaactgtactggcaaaatattttacaagcctttgtaaattattttacaaattttgtaaattactctacaaaaataccagttgtacttaagaatgtctctgatgaagcagtaaaaatatgtcaattttattaaattttggctcttcctatacatctttttaaaattttgtgtaattggctgggtgcggtggctcatgcctgtaatctcagcactttgggaggccgaggcaggtggatcatgtgaggtcaggagttcgagactagcctggccaacatggtgaaaccccgtctctactaaaaatacaaaaattagccaggcatggtcgcgcatgcctgtaatcccagctactcagggggttgaggcaggagaattgcttgaacccgggaggcggaggttgcagtgagccgagacctcaccactgcactccagcctgggtgacggagcgagactctgtctcaaaaaataatgacaataataataataataaaattctgtgtgatggcggggcaaagtggccaacacctataatctcagcacttcaggaggcctaggtgggaagactgcttgaggccaggagtttaagaccagcctgggcaacatagcaagaccctatctctccagaaaaaaaataagccagggatagtggcacacacctgtagtcccagcttgagcccagagagtttgaggctgtcatgagctatgattgcaccactgcatgccagcctgggtgacacagtgagaccatctgtctaaaaaaataaataaataaaacagaattctgggccgggcatggtggctaacacctgtaatcccagcactttgggaggttaaggcgagtggatcacctgaggtcaggagttcaaaagcagcctgtccaacatggcgaaaccccatctctactaaaaatataaaaattagccaggcacagtggtgggcgcctgtaatcccaactactcaggaggctgaagcaggagaatcacttgaacccgggagacagaggctgtagtgagcagagattgtgccattgcactccagcctgggcgacagaataagactctgtttcaaaataaataaataaaataaaataaaattctgtgtgatgaaatggaaaacatgcctacagcacttctgctgtgtactgaagtatgatgattatctcaagaaaaagcacctggccaggaacggtggctcacgcctgtaattccagcactttgggaggctgaggcaggtggatcatgaggtcaagaaatcgagaccatcctggccaacatggtgaaaccccatctctactacaaatacaaaaattagccaggtgtggtggcacgttcctgtagtcccagctactcgggaggctgaggcaggagaatcgcttgaaccggggaggcggaggttgcagtgagctgagattgcgccactgcagtccagcatggcaacagattgagactccatctcaaaaggaaaaaaaaaagcacctgttgggcggtgagcaggcaaaactgcccccaaaagtctgaagaagctgagaagccaagaaagaagctgacatccagatgatctcagcagaaaagaagaaaaaaataaaaacaggctgacatatccagtttctcagaaagtaacagggacaggagtcatagtctcaggacaccaccccccagacccagggcctaagggaaggaatatacaggacaagtgaagtcaacctctcagggaaaggcaagaacactacgtgactgcctaagggcaggacttatgggcaaggtcgttttgacctatggtcaggattttcagtaggaaacacaaaaaagtagataaaataggaatcttagaggcattcccaaaactagggttaatcacatggcagcctgagtgcggtggctcacacctgtaatcccagcagtttgggaggccgaggcaggcgcatcacttgaggtcaggagttcgagaccagcctggccaacacgatgaaacctcatctctactaaaatacaaaaattagctgggcatggtggtgtgcacctataatcccagctactggggaggctgaggcaggagaatcacttgaactcgggaggtagaggttgcagtgagccgagatggcaccactgcactccagcctgggcaacagagtgagactccgtcttaaaaaaaaaaaaaagaagtaaacatggcagattagcatccaagatggagttgcattagcctccacagtccctgtgcagttgtttgaattgcaaagtgaacctgccacttttttcatagatcactatttttacttgaaagaacaaggtatctaccactatgaccttaacagcttcccaaaacttaaaggcttttctgatggatcagtttttttgtttgtttgtttgtgagatggagtctctctcactatcactcaggctggagtgcagtggcgtgatctcagctcactgcaacctccgcctcccaggttcaagggattctcctgcctcagcctcctgagtagctgggattacaggcatgtgccaccacgcccagctaatttttgtatttttagtggagacaggtttttgccatattggccaggctggtcttaaacttgtgacctcaggtgatccacttgccttggcctcccaaagtgctgggattacaggcgtgagccaccacgcccagccagaatgtgagtttttgatattgcacaatgaaatgtgccaacattctacaaactcagtgaactgatattttccaaatgagcagtgcatgttacaaaccatgcataggtaaaagatccaactataaatagataaacctgtgggttttaaagttcattggtatggtttcaaatcccacattgcatttaacctttaagaaactaccatttgttgagtattgatgtggcatcagagaataatatccacagcaatccaaaaagactgttaaaatactccttccttttccagctacatatctgtgtgaagcttaattttctttatatccttctaccaaaacagcatatcacaatagacaggatacagatggagatatgagaatccaattgtattctgttaagctacacatgaaagaaatatgtaaagctgttgagcagtgctactcttctgagaatttttacttgtttttgaaaatttaatttttcataactatattaacttggatttattatttttagtgaattaataaatatatttttaaaattttctcagttttaatttcttttttttttctttttgaaaatattttctttctaaataatagagatgaggtttcactatgttgcccaggctggtctccaactcctgagctcaagtggtcctctcacctcagcctctcaaagtgctagcattacaggtgtgagccactgcgcatagccctcagctttcatttttaataagttaaaaacaaaatttgttagactcttcagtaatttttgagagtataaagggtcctgaaaccaacaggtttgagagccacttccacatcacacctgttgtcaatggtagggactggttcactagatgcctaatggatgtatctcagcagcaatgtgaaaagaaaggccttcgagtgatactgagtaaggtggaaggtgttagccaccaatgctcttctttcccgggtgtctcttatgctctggaggtttcctatctctgccttctcatcaaaagatatctggcccgggcgcggtggctcacacctgtaatcccagcaccttgggaggcggaggcgggcggatcacttgaggtcaggagttcaagaccagcctggctaaatggcgaaaccccatctctactaaaaatacaaaattcagccgagcatggtggcacatgcctgtagtcccagccactcgggaggctgaggcaggagaattgcttgaacccaggaggcagagattgcagtgagccgaggtcacaccactgcactccagcctgggtgacaaagtgagactccatctcaaaaaacaaaaaaaaagacacctgtgctgagtcctgactcagtcccaagtccttagtgggcagactacctcatgtcatacattaataaatataaggtaggctgggcacggtggctgatgcctgtaatcccaacactttggaagctgaggcagaaggatcacttaaaccgaggagttcaagaccagctggggcaacatggcaaaccccatctctggaaattagccgagcatagtggtgcacatctgtggtcccagctactcgggaggctgaggtgggaggatcatttgagctggggaggtcaacgctgcagtgagccatgattgcaacactgcactccagcctgggtgacagagcaagaccctgtctcaaaaaataataataataaaatacatataaggtataacatttaatttgaccggtacttattgagcacattttagacatgctgggcattgtgctggagataaggatacaatgattaattagatctggacccttccccctaagagattacagtctagtaagggatctggctggaaaatgtctctaagaatgagataaggatataacaagtaatatttatacatttaaagaagatttgtaatacctttatataaaagagtgagtccagtgtggatttttttcattagtgaaggagaaagagtgggtcaaatgcccctctttggagtccctaaaaccacaccagctatggggattcactaatgcccatcttctcttctttcaggccaatgaacttccggcagaactaaccaaaaatgaacgtatattgcgtctcctgagaagtaaagaaggtcccagaaagagctaacttagctccatatttgacagaaagatagaaagcttaaccacattgtccaaaaagaaattgcatttcaagcagtgttggaaattcttttatgaaaaaaaaagatgcccagaatgcccatcctgtgggtccctgacaaagaagagctacgctctgtgcacgaagtcaagaaccaaacagctcagggaccctcttgccccttcaccatggacttctcatggtgtcctgtaactcatctcccggggggcctggcatgttcacagattccacagaaactcattttcaacaatgctaacttggacctgtcagttaaactctaaggtggacagggttctcagtactaagcaaggagacagaatgctttgttcctttaaaagactgaaaagctgaccttcaatggattgaggcacttttgcttttgtgttaaatgtagatgtgctaaaatatatagatctatcatattttacctacatatgtatgtcattccagtataaaacattctcctctacccaagaaccatagccatgattgttataaatcaatgaagtgtaaacatacattattaaaaaaccacttctgacattccattatgtgctattcaaagatggactattgaactatagaaaagacagactgtgcatttgttcgttgatcctcatcttattcctgacatgtaaaaatcaattttacgtagagtcaacattgtaggtaggttaaaataccagtggcaaatttggaaattcagaaacttataaaccacgagaaatat

SEQ ID NO: 15390 - DNA, 33032 bp, Homo sapiens
gcggcggctgctgccgggccgggcggcgggagcgcgcggcgtcggaggccgcccctctgcggaacgccgagagccccgggagagtgaagggccggggaggacaaggcgccccgggcccaaagcgcgccggctcccgctcgggcggccgcggacatgtgcaggatgtccttcaaggtgagcgaccgggactccggggtcagggctggggccgggctcgggcggccgggcccgcggggtcgggtggggtgggatggggtgggatggggtgggcgctgcccgctgcccgccgcctcctccttcctctctcctccagctgcgggcgaggcccgggaggaagcggcggggctgggtgcgccctgtgggtttgcggtttgcctgcctgccctgcctgagaggcttcgcactcatggctgtggatcggctgagtctgtgcccggcgacggggcggcggggactgtcgccgggtaacaggtcgggggcgggtaagaagcctggggtcagcgctgtcctgcagcagaaggagtccccgaccctgaccctctgggtcctcatgcaggagtaccagctgcacccacggatgcctcctccccggaggggtggccagcacccagggaggcttcagggtccaaaggtgtcttgtctcaaaagagttgattaaagtcattccatctaatccccacattttaggatgaaagaggttgatttgcctcgattgaaagggtttaataaaaatagcagttaaaatgtattaaacagttcaaatgtgcctgactctgaaccaaggacatggtgtgtatggtctcaaccctgggggagacctgtgggaggtgctcttcgtggctcttttttttttttttttcaaatgagaaaactaagatatagagaaattaactcacccacggttttgcagccaataagttatggtgttaagactgaaacccaagtgtgtctgactcctaagccactgtaatcccgttgccgacaatagctcatgtaagcagaggagtgacatggcgagatgtgcatgttgcaaagatctctggctaggtttggagaagagggttggagctggaagatgttgtcatctttttaagaaatggtactggaccagtgcataggtggtgagaatggaacgaagcagacgaatgtgaatgactttaaagttttttttcctgagacggagttttgctcttgttgcccaggctggagtgcaatggtgtgatctcagctcactgcaacttccgcctcccgggttcaagctatttctccttccttaccctccagagtagctgggattacaggcgtgcgccaccatgcccagctaattttttcgtatttttagtagagacggggttctgccatgttggcgaggctggtctcgaactcctgacctcaggtgatccaccctccttggcctcccaaagtgctggggttaaaggcgtgagccactacgcccggccgactttaaaagttttaaatcggcataattcagtagggaaggcaagagagataaagataaaacgtttggtttgggataaattttgaggatagatgggaatccaagcagagatgttgattagacagatatactctcctcgatcccaggaggcaagtctgggcagcagctagagatgagatttaggagtcagcagtgttaagtaggcacccatgggaatgaacatgattgcccagtggaaccatataaaggtggaaaataagaggactgaggacaaaatcttgaagaagatttgagaaagagcagccagagacgaatgagaaaactcagaagcatgtgctgtcacttacaccaagcatctctaatctttcaacaaagatgaagaggaccttgatgtttattaatgccacagggaaatcaaataaacaaagaattgaaaagtccattggatttagtgacggaataggcactggtgaccttgccaagagcactttcagtggtgttaggatcaggagccagattgcaatagcttgaaagagagtgggtagaatccacaagtgtggagaactctttcaagaaattctgcaagaaacagatttttgttagtttgtttgtttgtttggacaaagtcttgctcttgtcacccaggctagagtgcagtggcgcaatcttggctcactgcaacctctgcctctcgggttcaagcgattctcctggctcagcctcctgagtagctgggattacaggtgcctgacaccaagcccagctaattttttgtaattttagtagagacggggtttcgccatgttggccagcctggtctcgaactcctgacctcacgtgatcgcccgcctcagcctcccaaagtgctgggattagaggcatgagccacggcacccaacccagagattctttttaaaaggcagtggctgcagcaaggatctggaattgaccaagtgtttgtttgctttaaaatggtagagacttgagcatctttaaatgatgataggcacttcaacaataaaaagacaaataaagcctaattttaaagtggacatatgaatagacatttctcccaagaagtttacaaatggcccgtaagcacctgaaaagatgcttaacattattagccatggtcttggaaatgcaaatacaaaactgtaatgagataccacttcatacccgctaggatggctttaatcagcaagacaatgacgaatgttggcaaggatgtggagaaattgaatctgcatgcattgctggtaggagtatgaagtgatgcagtcatttttatttatttattttatttatttttttgagacagagtctcactctgtcagccaggctggagtgcaatggcatgatctcagctcactgcaacttctgcctcccgggctcaagcaattctcctgcctcagccccccgagtagctgggattacaggcatgtgccaccacgcccggctaatttttgcatttttagtagagacggggtttcaccatgttggccaggctggtcttgaactcctgacctcaggtaatctgcctgcctcgggctcccagagtgctgggattataggcgtgggccaccgcgcctggccgatgcagtcatttttaaaaccatgcttgtctttcttcaaaaagttttttttgtttgtttgttttttgtttttttttttgtcttttttgagatggagtctcactctgtcatcaggctggagtacagtggcacgatctcagctcaccgcaacctctgcctcccgggttcaagcaattctcctgcctcagcctcctgagtcactgagactacaggcatgcgccaccatgcccagctaatttttgtatttttagtagagaccgggtttcaccatgttggccaggatggtctcgatctcttgacctcgtgattcacctgcttcagacttccaaagtgctgggattacaggcataagccaccgcacccagcctcaaaaagttaaatatagagttaccacatgacccagcaatttcactactaggaatatacccaagagaaatggaaacgtgttcacacaaaaacttgaacataaagatccatagcaatagtattcataatagtcagaaagtggaaacaatccaaatgtccataaactgatgataaaaacaaaatgtgggccaggcacagtggctcatccctgtaatcccagcactttgggaagctgtggcggatcacctgaagtcgggagtttaagaccagcctggccaacgtggtgaaaccccgtctctactaaaaatacaaaaattagctggacgtcatggcaggtgcctgtaatcccagctactggggaggctgaggcaggaaaatcacttgaaccctagagacagaggttgcagtgagccaagatcataccactgcattccagcctgggtgacagagtgagactctgtctcaaaacaaacaaaaaaaaagtgttttatattataaataccatagatagggaggcttaaacaacagacatttatttctcacagttctggagctaggaagtcttgagatcaaggtggctggtgagggcacttttcctgacttacagatggccacctgtgcatgccccgtttcctcacatgaccaagagagaaagccctggtgtctctaattcttttaaggacattaattccatcatgggggctatacctacacaacctcttttaaacttaattgactcccgaagactgctcctcctaaaatcattacactgggcattaggacttgaacacatgaatttttggggggatgcaaacattcagtcctcagcccctgtcctcctggcatgtctgtcttgcgtgcaacatatattcattccatcccaacagtccccaaagttttagctagttccagcatcaactctaaaatccacagtctcatctaactatctaaatcagatattgggtaagactcaaggtatgattcatcccaagtgaaattcttctctagctgtgagcctgtgaaatcacacaagttttttgtttttgtttttgcttttgttttgagacagggtctcactctgtcgcctgcccaggctggcacaatcacgattcactacagccttgacctcctgggctcaagcgatcctcctgcctcagtctcccgagtagctgggactacaggcttgcaccaccatgcctggctaatattttttattttttgtagagataggggtctccctgtgttgcccaggctgatctcagactcctggactcaagcaatcctcctgctttggcctcccaaagtgttgggattacaggtgtgagccaccatgcctagtcctcaaacaagttttgtggttctaaaatacgacagtgggacaggcataggatatacatgtttccaccccaaaagggagaaattggaagaaaggaatgacaggtcacaagcaagtccaatacctagcaaggcaaatattattagaacttaaagtttgagaataatcctctttggttcagtgctttgccttctgaactcactgagtggtgggtcctgctttctggaccaactcgggcaggggattgggctcgcaagacattggtggttagggcttcagcatatgaatttggggaggaacacaagcatttagtccataacatggtaatctgtacaatggactatcattcagccataaaaaggaatgaagcactaatgcatgctacaacatagatgaaacttaaaaacatattcagtgaaggaaaccagacacagaatgccatatattgtatgattccatttatatgcaatgtccaaaatcggcaaatccatagagacagaaagtcgattagtggttgccaggggctggggaagaggaggggatggcgagtgattgttgatgggtagataatctggaatagatagtggtgatggttgtgcaaccttatgattgcaccaaaacccactggattgtatgctttgaaaggatgaattttatgtatgtagattatatctcaatttttttaagtatttttaaatcataatagggaatgaggagaaggcttggggatgattttgctgagtgactgaatttctcagggagttgagggcggtgagcctgagctgggctccattcgctgtggaattagctagaatggcagaaggaaacctctcccgttgggctaaagggaaaggaggtgaggttgagtgtggatgttttgtaaagtgaagcccaggatgaagtcaggatttggggtaggtagaaaggaggctggcaagccaggtgccaacgttttccatgaataaggaagaacgatcaggtggtgaacgataaggaggtgacaactgccaggtgaggtgaggtagaggttgggaaggtgggacgacctgagtcttgaaggagcagagatttgcacccctgatggaggggcagtggcctggaagccaggtgggcctattcactgcagtgctgatgtgggagaaggccttgcttccaccgggagcaggcactggggaggttgaggcagggagagagggagtgctctgcgctaggcaaaggatgaagaggagttgatttactgtgaaatggacttccagaaggcacagagggaaggtctgtccagagcagagtcccaggccagtctgagatttgcattagcaacattcttctatccacctcccatcctatcaaacatattaaaatgcacccacggccacaataataaaagagaccttttattgtaaaatttttgaaaggattttgtgacactgctttttaaatgatttagctgtaagttactcatttaatttaccttttgtccatttttctgcagttgtcatagttggtcagtaactcatgcagcgagcaaatcagacctacaaatgattttcatgtggcatcagtattttatgaataccaaatttagcagttaataaagttgacaggatgttatgttttgtagctatttaattgaatatttattaactttgatttgggaaacacagattaactttttcattttcataggctcctgaaagactcataggccctaggctctgggtctccaaagcctacgtgtaaaaaggccctggtttgttaggcgagtctgtggaagaataaatagagcattataagtcacaatttaggctcttcttgatgattcagaatcaatgtatgtagggctgcttgcatctgagctacatgactcctttgcgtctacttttgatggtttttccgtcaagctgttatcagtgacttctcactggtaccactttgcctccagcaaacttcctttaacaactggcaactcctaatctcttctgcttgagaacacagacacatgtttgttagaattatcttttttttttttttttttgagacggagtctcgctctgtcgcccaggctggagtgcagtggcgggatctcggctcactgcaagctccgcctcccgggttcacgccattctcctgcctcagcctcccgagtagctgggactacaggcgcccaccactacgcccggctaattttttgtatttttagtagagacggggtttcaccgttttagccgggatggtctcgatctcctgaccttgtgatccgcccgcctcggcctcccaaagtgctgggattacaggcgtgagccaccgcgcccggccagaattatcttttaaagtaaaacgaaactcagagaattattttttaaagtaaaaggaggccaggcacggtggctcacgcctgtaatcccagcactttgggaggctgaggcgggtagatcacctgaggtcaggagttcaagaccattctggccaatatggctaatacagtgaaaccccatctctactaaaaagtacgaaaattagccaggcgttgtggcaagtgcctgtaattccagctactcaggaggctaaggcaggagaatcgcttgaacccgggaggcagagcttgcagtgagtcgagatcacgccactgcactccagcctgggtgacagagtgagactccgtctcaaaaaataaaaaaaattaaaaaaaagaatttcatatttccttcagggtctgctgtcatatgatactataccccagccaggttggagtgggtatcttattctacaaagagtctgttttgtgaatcttatgaactatattttaatattaatgctggttaatcgttgcgcctaagttccaaagggagtgaagtgtaatgagatatatcagacctcccttcctgtcatggcctgaacttttcaggttttctttgggatcccctgggccaagaggggggttcactcagtcagtgggggggcttaaaattttatttttgatttacaggcttgatgtttgttaagcattctgaaaattgtaaatacttagcacaaagtgggacaatggatgtctcaaaaacatctttctgcatatagctttgcaatccatcactacatctttattttatgtcacctctaatatcatagaaattcattattgagtagagctaatattctcttgattgaattaataagtgtacgattgaagtccacattactctaaacttttttaaactaatagtttaaatttctaccccctcttagcttttaattagaattccagttctgtacaaataaattttcctctgtgtttcctctccccttccttcctgtacaatttctggaagtgtacagatgagcagtgtattagccaaaattctgacagtaaatggaagggggcaagtagggagagaagaaaatatgacaaatgtggaagcttgcactcaattttctacaaggtgtaaaatgtaagatctcagactctggacccaaacagactatcagacttttttttttttttttttttttttgagacagagtcttgctctgtcacccaggttggagtgcagtggcgccatcttggttcactgcaacctccacctcccaggttcaagcaattccttgccgcagcctcccgagtagctgggattacacgtgtggaccgtcacacccagctaatttttgtatttttagtagaaacagggtttcacgttgttggccagactggtctcgaactcctgagctcaagtgatctgcctacctcagcctcctaaagtgcttgggattacaggcgtgagccaccgtgtccagtccagacttggatttatttatttatttatttatttatttatttatttatttatttattttttgtggaggctggggaaacagagtctcgctctgtcaccaggctggagtgcagtggcatgatcttggctcactgcaacctccgcctcccggattcaagcaattctcctgcctcagcctctcaagtagctgggactacaggtgcgtgccaccgtgcccagctaatttttgtatttttagtagagatggagtttcaccatgttggctgggatggttttgatctctcgacctcatgatctgcccgcctgggcctcccaaagtgctgagattacaggcgtgagacaccgcacccagcccaaacttggacttaaatcccggctctgttatttggatgagccaagatccttactgcgtgaccttgactaactcattcctatgctcaatttcctcatcttaaaaataagaataataggccaggcatggtggctcatgcctgtaatctcagcactttgggaggctgaggcaagtggattacttgaggccaggagtatgagatcagtctggccaatgtggcaaaacgctagctctaccaaaaatacaaaaattagccaggcatggtcagtgtcaggcatggttgcagtgagcccagattgcgccactgcactccagcctgggcaacggatcgagactccatataaaagaggggaggggaggggagaagagggaagggaaggagaggggagaggaggggccttcctttaaaaagtaaaaaataaaagaaaaaatgggactaggccaggtgcggtggctcacgcctgtaatcctagcactttgggaggccaagatgggcggatcacgaggtcaggagttcgagatcagcctggccaatatggtgaaaacccatctctactaataatacaaaaattagccgggcgtagtggcaggtgcctgtaatcccagctactcaggaggctgaggcagaagaatcgcttgaacccaggagacggaggttacagtgagccgagatcatggcactgcactccagcctgggtgacagagtgagattatccatcttaaataaaaagaaaaaatgggaataattatctcagtcatacattacttaacaacaaggacacattctgagaaatgcacattaggttattctttcattgcgcaaacatcatagagtgcacttactacagacatagagagtgtagccgactgcacatctaggctctatggtgtagcctattgctcctgggtgacaaaactctatagcatgctcctgaatggaatactgtaggcaattgttacacagtggtgagcatttgcatatctaaacatatgtaaatgtagaaaagtacagtaaaaaaatggtatcataatcttacagggccactatcatttatgcagcctatcattatatattacatgactgtactacctcatggggctgctcctggaattaaatgagttaaagcagtaaattgtttagcacactgcctgatacagagcaagatctcaacttagttgtccttgctgttacttataaggttggaaccagcaagcctgagagaagctccttggttttattgtagagatcagaaaaatcaagaaagaggtgaaatagtaatagcatgcttggtaaagtgctttacagtttctgtgatgtattttcacgtgcactgtctcctttaaaggctagaggactggccccatctctcgccacaccatttatgattgtgtgcatatcatactgagaggagatttggaagttatccagggaatgtgatgtgtatagaccccaaacagaaggaacgttggggactttccatcttagctggagaggagcttgggatggaggataggaaggaggtcaccgggggtcactgctgccttactccttgctatccacagaagaattccacaggaggcagaacagtgtgatggggagttaaagggcagcctcaagcaagagactgcctgttgctgaagcctgacttgccatttctcactttcctcatctgtaaaatggggtcgtcccagtgcccacttcactgagcaaggatgaggatgaaataagctagtgtatgcagaagatacgccacgtggtccagagtaagcactttgcactgagtgagcattagctcaagattcctgacctccagtaaatgtgccggccatagggtgacaggagcacctgcccatttctttgctagacattgccacctagatgccccataggcacttgaaacccaccatgtccaaccctgaactcatcatttttttccaaagcctgtccttcgtacggtgtttccaatcttcaagaattggcaccaagatcagccaggcactggaaccagaaatcaggagtcaatccactttcctattccctcctctcctgcacatacaatcacagaccaaggctgtggagtttagctccttaaaatgtctctggtctgtctaatcttcccatacccactgttgctgcctcttagtaaattaagcccttgaaggaaaatgaaatatttatagcttttcacaaagcttggtttctagaaccttatagaaaaccaggatggccagcccagctggagaggaatccccaagaccatcctaaagggaggagaggccccgactagagatcttgttatgacaatagacacttgctgtttgcagatggtcttttgaaggtatttggggttaaagtgaaatgacagagtccctgaaaatgaattacagtctatcattcttgtgtgtttacctttcaggaaaagctagcagagctgttccctggtgcatattacattgtctgcctgattcaccctaccagacttcattttggccttgtgcaatctctttgttaaaaggctttgtttcatgattcattatacaggtcaaacctcccttgccatttctttgcctagttactgacagctggaacaaattagacccagcctggtgcctaagctgcaacactggtgtgaaaaccatggttgcagtttgccttgaaaactccaggatagcaaaatttacacggtcaggaaaggcaaattgttcatctgaaattggaggtgatttttttcccttctaaatgagccaggaaactattcaaagtatgtttgctgttagcttatcactctccaccctgccattctctcattcaggtatgtacaagggcgtacgcctgtgtatgtgctgaaggacttctgaaatgaaatcctcacacccacaaatactgctgccactgtcctttcattttagagggcttgttgagtagctgaaattgttggtattttcttttgagcttagaaaaagcactgtatttaatacgatatcaatatatttaaaaggcatattacgcaaaaggccttttgagtcgcgtagatgttttaaacccactcacaaaaaatgctttcattaaacaatgtgaatacttttataaaatttcctaagaccatcaaaattctttattagtaccaatactctggatttaattttgcctattgattctgacttcgtaaagaaaagtaaatagaggaaaggaaactggcacttaatcagcatttatggtgtgttgggtacaatattaggcaaaaatcagcatcatttaataccgtcaacttcaaggcaggtactgtgatctccatctaagcaagaggaaactgagattcccaagggccaacttacttgtgcagggctggggtgagctgtctggtcccaaagccagttcttccctctcgtcgactgttctctacaaactcatatcaattattttagagaagaagattgtactacagtcagctctgccacccatttagaagacctgttttccacttccatgctttccataggtatggctccaaaattaactttgtagctttaaaataacccagtaggcccagtgcagtggctcacgcctgtaatcccagcactttgggaggctgaggtgggtagattgcttgagcccaggagttcgagaccagcctaggccacacagcgagaacctctctacaaaaaataaaataattagccgggcatggtggcatgcgcctggggtctcagctactcaggatgctgaggtgggaggatggcttgagcctgagaggtcgaggctgcagtgagtcataactatgctactgcactccagcctgggcagcagagtgagtccctgtctcaaacaaacaaaacgatccaacagtggaatgaaggatccatatgaagacatgtaatggcattatttgccctaagttccttgttctcaagtcaaacctctggcaagttccagctgaagcaaagaaaattagatggaggggccgggcacggtggctcacacctgtaatcccagcactttgggaggccaaggcgggaggatcacgaggtcaagagtacaagaccatcctggccaacgtggtgaaactctgtctctactaaaaatacaaaaattagctgggcatggtggcgcacgcctgtagtcccagctactcagaaggctgaggcaggagaatcacttgaacccaggaaggggaggttgcagtgagccaagatcacaccactgcactccagcctggcgacagagtgagactccatctcaaaaacaaaacaaacaaacaaaaaaagaaaattaggtggaggaaaagtgaaacattcacacaggtagttggaatcagatagaaagcattgagggcttaggaaacgggcaggtaaactcttttgagaggtcagaattgggagaaattttgccccacttagaggtgaggaaagatttggagtgtttctgggaggaaatagcattcgagcagagccttggccttgaaggatggaggaaaattcatttcaagcaaaaaggaaactgggtgaacaaaaacacaacagaggcaggaaagtgagaacattagtgggaaataggttattaatagtgctggattatcaacaacactgctcttcatagccatgtggtggctcaggtgtctggaatccaacagagttcattctgttattacagttgtctattgctggaggatcaatctttcaaatgatgcaacacatctggatgttcttctttctgaatgttattatctatgtgcatagcagcagtcatgttaactgacatcaattttaagatcctgtttcattttgttcttgcagaaggaaactccacttgccaatgctgcattctgggcagccaggagaggaaacctggcgctgctgaagctgctgttgaacagcggccgggtggacgtggactgcagagacagcgtacggtggttcggtagatgcatgcccagcatgcaccattgccctctgtgggcacaggagcacctcaggaatacattcccctttacaatgcttatttactttttcatgtgtttgcttgctttatcctttttaaaacatccaaggtactgtggtgaacttaaaaacatgctgggggaagtcagaaagaaaaggaaacaatgaaatgcataaaacagaaggcaaccacaatagggaaagaggcacttcactgggaatcagaattggcagattacaagaagaaaagcctgtttagtgaaagaattcaagccaaccacttccatgaaaagatggagataatttagagcacaagtgggctgccatggatgtgggcgttatgtttcttctacaaggatgagaaaacaaaaattgaagcctcccccaggattttatcctttcattacctcttgaaaacataaatacactaattggcaatttaaaaagggaaacaaaaatagatactactgcccactggcagataccacttagagagcttttccatccccagctagaggcaatcgtttttctgtcctcagcaagacttctcatctctgggaccaagaggacctccaatgaggaaagggagcgagcaatgatgttttgattttaggatttgaataaaaatgtttcaaaggagctttgttttcctgaaaacagggtgtgccatttccagcttttattgtacaaatttgaaatctaccacaagcccaaaagtgaaatagcagtttgccccagttggccccgtgggggcatcacagtaggatatctttggtttacgggatatctttggttacacctccagacccactccacacccttctcgctcttagtcccacagtctgaattgtatgtactgctccagcagactcgctttcctctggcctccagttgtgtttggcccataggagcatctgcaggagtcagagggtaggaggagagggacatcagggagcccaccgccctccctgtttctgtctggcagcagcgccccactgttctctgcatcctgggagccgctcccttcccccctggcaccttcaggcctcagctggtcatggacccccactgttcctagatcccagtactgtgctgttctttgtagatgccctacacccaggcctcagcttaatagtctctttattacactttcttccaattatcccaatctgaatgtaccatctgttccttgccagaactcgggctgctgtcaagtcttgggcatctgtgaactggccatcttggtcttatttgggttttacggggctggttcctacatcacagtgggaaaactgtagggcagaaacaccagttgtcaccgtggccaacacggagaaacccgcctctactaaaaatacaaaaattagctgggcgtggtggcaggcgcctgtaatcccagctactcaggaggctgaggcaagagaatcacttgaacctgggaggcgggggttgcagtgagctgagatcgtgccatcccactccagcctgggaggcgagacttcgactcaaaaaaaaaaaataccatagagcaccactaagaagccattagctttttgttacttcgttacttcgttactttaccgatactttttacataaagccaacaagactttcacaaaactagcatggccattgacagaagtcaacaaaagccagatgacagcctaacattgaattatcgtaatgttattttaatatctaacacttactgaacgaatatctaccattactatgttaaccatattgcctgacttatctcattcagtaatttaatcaggtggatacttttattattcccccatatttcagatgaagagaatgagacttaagggttacatgatgtgcccaagatcatactgtcagtgactactcagcaatactgccttcctacaaaatcccgtagatgaaaataacacgaagcctccaaaattcacttaattaccctatacctaatgagcctcccctgtgtgcagagtcacctgtctctctcatcatccacttctgagcagcaggttgctgaatatgcagaggtggtagctaagattacaatttcaagtgcttgaaaacaactgtaagtcaaactgcaaatgcccacttcaattagaagggtccatatcacatggtacacctcaggtccttgaatcttaaagctgggacagactttggtgatcatcccatccaaccgctcattttaaaaatgaaataaatgagtccaagtaattgtaagcaacttgcccaggttacactgttggtcagtgacagctacctgggtttagcccccacagctcctgactctcaactctgtagtctctcatttcacctggtgccatacatctttacctgaatcattttgaagatgaagacttttaaatatggaaaatcagatggtaccatttaatttttcttttgcattaatagcaatgttttggctcaggaatcatttaataggaatcataaaatgagagcaatatatcatcgctgccttaaaatgcagtaactatggttcatttggactgtgcttctgaaggtaatggaagtaagtgaatttttacatcgaaaattccaacctcagcaatttgtcactttgctttttcccatctaggctgcatgatgagattattcatgaccacttttatcactgcagggaattttgcccttggatgtgttctgagtggagctgacatctctgcagcatcttctctaggacccttctctctgacatagcagtggcctaactcttcatctgtctctcctccatccagcatggcaccacactcctgatggttgctgcctacgctggccacatagactgtgtgagggaactggttctgcaaggagcagacatcaatctccagagagaggtaggtcaggctttgcacttgaagaaaaatgaccaggctcagagatctgaagttttcatgatagtgaactggtatgggggacaagagccatcattgcttttctcccacattaaagcccattgcagagtttattgtgcctacaatgaggtccagcaacgtactagcagttataatgcatttgagcgtagcctgtcgggcatatctgaggtaaccaaacctcttaccacctgcctataaacactcacacttttttttttatcaagcttaaatcagttctttattactcccttgggatgagatactgtaggatttatagcattttcatatagatcattatatttttagaagagttgagtcaccagcctatttgtaatgaggctcacttgctaggatgtctcaatcatcctccccaaaccatgttttcaaaggactgctctctaactggccatgaattaaataagctctcctggaaaaagccgtatgggtcaacactggacaaaaatgtgagcctgttcccacacttcattcaaggacaatcttgggagtttggtcttgcttgaggatccattcttggtctaatctagagaagcagaagggagtctgggacttttttttaagatggagtctcgccctgtggcccaggctggagtgcaatggcgcaacctcggctcatgcaacctccacctcccaggttcaagtgattctcatgcctcagcctcccgagtagctgggactgcaggtgtgtgccaccacgcccagctaattttctgtatttttagtagacatggggtttcaccatggtggccaagatggtctcgatctcctgacctcgtgatctgcccacatcagcctcccaaagtgccgggattgcctaggctgggacattttaacatactttggggctcaattctgagaaagctccatccatatatttccaagctgacccaggacctggtaaactaatctttatggagacacacgctcaggtcacccctagagtgtatctgacctctcagttcacactgactcagacctgagatgggcttcctgggcaagtccagactgaaccacttggttttccttggtccagccttattttatcccaggtcatgccttgcaacattttagaaagacaattcaccaaccaaactttcatcaagccagtatatcgtatatctcattcttccagcctggaccgtcacctctgagtggagcaaattaagacacatcaggtctcaggactgtgtcaagagttccaggtgtaacataggcctgggcaacatagcaagaccccatctctacaaaaaaatttaaaaatttagccagacatggtggtctacacctatagtaccagttacttgagaggctcaggctagaggctcgtttaagcccagaagttacaggctgcagtgagccatgattgtactaccagcctaggcaatgcagagagaccctgactcaaaaatagagttccaagacacatccagatgtccttcccaccacccgtctgggtgttggaggccttggctgtggaccatgaaagagtgacatgcagaatctgggactgggtctctgtagccctggatcaacaggcctggtctcttgagaggagcagtataaagagactacagcaaatgcagtcttctcacaaacagattctttggtgcaatttccataacactagatcgttgtttgaggtcattttcacttcagcacttaattttcctgtgggatgaaaatatctggacccacttagaattacagtttaaaattactttaatctttttatttttcctctctgctttatggtctttgtttattacaactttaaagacagtttttctctaataaaaacaatatggtccagatctggtttactttaaaaactttatcctgaaggacaaattgcacatgcacaaaaatctctctgaaacaactgagaaaagcagctagaagaggagagaagtatttgatttctagccagtctatggtttctatggttttatatttatccatttggttccaattgctcaactaatcttggagatgaaaactctcgtagcactgagaacaaaagcctttgaagatttaccaaagtgtactcagcttaaaggtaacctgcgtggctcaaatgatggtgctatgtaagttcctggcagtccctgaatttcctgagactgtgtcagtctggggcaagagggctgccaagccaaaggcagacctcagcctcctgtaccagttttggaagctaagagtgccttgcagtgctttgaaacttactcctatggcagacttctgccttgatccattgttagttaatccactttgcaatatcagaatatttgtctcctgaaaaactacctgccactccttgcttaggtcagctctctagatacacagagcttgctagagagacaaactggaaactaatgttcctgaaacactattgctgtaaagaacccacaattggctgatgacacctctcaggcataggagctgcacatacagttggcatgaagccctgaagtaaggcacacatatttaaaacttttattcacattccagactaaggtatagctcctatttatggattgctgcattgaggtacagaatgattaatagtagtatgtatgttctaaaatcagctcaaactgctctaataatgatttatgtaattaatgtaccaagaaagcctattgaaaagcaaattatttatcttactaaagaaacaacttctagaaaagacctttggtagtctctaaaatttaatatctattgagaaggtgagagttttcctattctagccaagtttcttcctccagaactattaattccctaaggtttccggaacccagcatcatcaactgtaataaagcagtgggaggatgcttcccacttatttctgtgggaaccaaggagaaaatcacacctgcattgcaggcagaaaggccctgtgaatggtcacaatgcctgtgccttcctgggacagagtctggctgagggcacagcctgatgtgggttatatctgactaggaaggtgttacatgttctccctcagtggtggtgttatcagcaccctagattcttataatctcccaggatagaagtcaaaagagattgtcagatagcaaagaggaagtttgtttagcttgtgcataagagaaccaggttcccttatggaaaggaaaagggttgcctgctccccaagagaagtatgtgagtttgttttatagggtctttttacagggaagggtttagtcagggcatgtacagcacttgcacagtagctcaatatgctttttaatcattgcatgtaagattagcattttaaatctccaccttcaggtgtgatttttagcattaagataaggaagaggtgactgtaagttgaagtttaagtctaactgtgcatgcagggccccaggaagtccctacccacctaaagtgagaacttctggatagtttcttgggtcttttgttgctgattggctgtcacaggatccttagggtgtcactttgccagctggaaacctccatggctagcagcgccttctgcccaagtgttgctcaggcccgttgggctcattctgcccacttggcccagcaggttgcacttggttcaccctaccagcccaggtcccatgcctgccaagggcaagccaggtgtgtgagcaagcatggggtccagccactgcacacaaccaggcatgccagctgtggcgaggcaggcagctccagccactggcacaggtgccagctctgtgtgaggctgtggctggaccagatgtaccgcaagtggcttccgctgcaggcaccagggaatgtagtggtgcctgggagcttggagatgccaggaaccgcagagccccaaagaggatatcatagccctggctcagggagcccctaggtctgggctccccaaagggctgtagctcctctctcctcattgcctgcaatgtggcaagcagaaggcgtgtttcagccctgtttgtgttataaacagggtcattcgccaggtcctaaattcttgtcccgcatccaagaagaatgaggtatgcaaacaactggagggtgaacaaagtggagaggagcttcattgagtgacagaacacctcccaggagacccaaagtgggtggctcttttctgcaggcaggtcatcctaacaagtgttcagctctcagtggagaggagacccatagtgggtagcgcctttccgcaggcaagtcatcctgatgatctgaggagacccaaaatggatagctcctcccgcagctggtagtcccgatatctgggtccagctctcagcagagaggagacccacagtgtgtagttccttcctgtagctggtagtcctgacctctgtgtcctgctctcagtggacaggagacccacaatgggtagatccttccagcagctggtagtcgggacatctttttgaatctggctgagtcagaggtttttatgggctcagaaaggagggagtgtgtgctgattggtccatgggaagccatgggtgggaacgtgtctgcctctcaccatcaacatgccatccacggcacccaggctgttcctgccaaggggcgcctacaggcccacacctagctgccctcagcccctcagcctccctcctgtgcttgtcagcacccaaagtccggagggggccaaggttggggggcaaggctggcatgtcaacaccacctcaagcatacacacctcaagcatgctctcccctagccaggtcatgacagacagcacccaggctcggctacagctttgctccgcactggagcaggtgccgggagtggggagaggccagggagcaggagcaggcacttccaagcctgtgggggtaatgggggcttcccaggcccagagagcacagggatgcccagaaccggagctgcagctgggcatggctgctcccgcacagccaactcaataggggatggggctcccacctgcttccagctcccactggacctgaggagcatgcagccccagctgcacctcccgtgtggcagcctgcatcttcgcagctgctgctccagacaggccaccactgccatcagtgagaagttaggcaagctacagcttgagtaaggggcttttttttttctagaccacatttaaaaacaggcaaacaagtgggtggatcctgcctgtctcagtgggtcttattgtccccactcccatcccacacatgcatgcacacacgtacatattcacagagacacccaggcccttaagaacaagttttaagcatgatcactagcttataggccaggctgtcctcagcttttcacacatgagtgagacctaccatcttaacagctttgggtaaactatggaaaaagggatttcttttcactgtgtctggtaaggtgtggtattagctttgtcccaagctccaagctcagaagtgaagagtactctataggaaaaatgtatgttgcccacaagaatggttcattattttgctcatattacacagtgatttgggtaccaatctttgagtagacttgtaaaagtagataggaagggaggatgctaaaaactgtgtctcagaatgtcatgatcagtttaaattttagaatcaggatgtttcttgttattatgtcccattttgagaaatgttttgagctcattttgactctgggcttgcaattggagaagtttgtgggtgaattacttattttccttcttgtacaagtagtcttccactctggggcgctaaaatttgtaatttgaattcttccctgtattaaggaatgctagtgtttaccaaacactataccaaatatcttgagtttccaagggctgctgtgacaaattaacacaaactaggtggcttcgaacatcaggaatttattctctcagatctggaggccagaagtccaaaatcaaggtgtgggctgtgccgcactgccactggaggctcctgggggaattcccttccttgcctcttccagcccctggtggctgtcagcactctctcctcaatgccacagctctccagtctctgcctatgtggtcacattggcctctctctgggtcaaatatccctctgcctcacttcaaaaaaaaatttattgttttttattgtggtaaaatacacataatgtagactttaccctcttagccatttttaagtgtacagttcagtcttattaaatgcattcataatgtggtacaaccaacatcatcacccatctataactcttttcattttgtaaaactacacaactctgtatccattaaataataacttcccatactccccttcccccagcccctggcaaccagcatcatactttctggttctataactctgactactttagatatcacagcaggctgggtgcagtggctcatgcctgtaatcccagcactttgggaggccaaggtgggcagctcacttgaggccaggactttgagaccagcctggtcaacatagtgaaaccctgtttctactaaaaatacaaaaaatagccagatgtgggggtgcacgcctgtaatcccagctacttgggaggctgaggcatgagaatcacttgaacctgggaggcagaggttgcagtgagccgagatggcaccactgcactccatccagcctcggtgacagagcaagactctgtctcaaaaaaaaaaaaaaaaaaaatcacagtaaaatcatacatagttgttggccttttatgactagcttatttcacttagcataatgttatcaaggctcatccatgttgtagcatatgtcagaatttcctttctttttagctaaataatagtccattgtatggatacatcacattttgcttgtctcctcatccatagatggacacttcagtgcttccacattttagctgttgtgagtagtgcctctgcctcactcttagaaggacacttgtcattagatttagggcccacccagataacccaggataagctcttctcaaaatccttaacttaatcacgtcttttgccatagaaggtaatattcacaagttttaggatggggacagatcttttgaggagccaccattcatcccatttcactaagaataaagttttcctttccttttgtcacttctctgaccaaaaaataagaatctgttcaaatttagccccttcctaggctagaagttttctatgcaaggatattgttttgttttctttgcagatgttcaaatcaaatgtaagataaccaaatgtcttttaaaactagcctctccctctctcccagtcaggtacaactgccctattctttgccgcccagcaaggccataatgatgtcgtgagatttctctttggatttggagcatccactgaatttaggaccaaagtgagataaccttcttgattttgtattatgttgaagaatttcagcagccatgggtattgcttttctcctcatctatggtacgaatttatgtttccctttttacaagattctcaaacctaagtaagtggatttcctcaaggttacttgtagtggttcaggggtagctctaagggttctattcaaaacgttacatttttactctgggctcacaattggaaaattttatggggaattacttctatcctttcctgaactgatacctttctactgtagaacactaaattttgtaaccaggagggatacagtagcagtggctttctaactttccctgtttccatgttctttttcccactgaagattaattctgatactatgataggaattgttggaagtattaatctgatcctactagatctgagacatttctaaagagggtggtttggcagacagcttactttcatgagctatcctcactgaaatacataatacatagctacagtttacatagttgggaaactatatagtggttcttcctttaaagaagtaattggctaggcgcggtggttcatgcctgtaatcccaacactttgggaggccgaggcagggggatcacgaggttaggagttcgagaccggcctgatcaacatggtgaaaccctgtctctactaaaaatacaaaaaaaaattagccaggcgtgatggcacatgcctgtaatcccagctactcaggaggctgaggtaggagaatcacttgaacccgggaggcagaggttgcagtgagccaagatcacgctactgcactccagcctgggcgacagagtgagactctgtctcaaaaaaaaaaaaaaaaaaaaagaagtaattgattttcatttttgacatatagataagaaagctgagaatgtagaaagattaatttcatgttgacagtatgattttacatgataatattttgtagtagcagaatttgaactgccgtaagatttttgtaattgtcagctcatttctagcctaattataatttttaaattcctgaaaatgtgcgcaagttggaaacttttaggttttcttagttaatcctttttgtggactatttagatatcaagggagtttccagtgggattttttttctgttaaaatggtaactactggagctggccaaggtggctcacacctgtaatcctagcactttgggaagctgaggcaggaggatagtttgagctcaggagttcaagaccagcctgggcaacaaagcgagacctcatctctattaaaaaaaaaaggattcgctgggcatggtggcacatgcctgtagtcccagctatttgggaggctgaggcgggcagatcacttgagcccgagaggtcaaggcggcaatgagccgtgatcatgccactgcactccagcctgggtcacaaaggaagactctgtctcaaaaaaataaatcaaataataaaattctaaccattaagtagatgtgaatttcatataaggttttgtcttttctgaaacctgctattgtactacgtatatgccttcaaacttactgagtataacatacagtaatactatatatttttttacattattagtttattttctattataaaagtgataactaaaaatagaaagtaaagtcctatgaacctaaatctcaactctttgaacgaaggtcaaaatgatcgtgagtgaccatatggctgcttcagtcttcttggttaacgagtgaatactggcttaaagcctttgtacatgagccagtttgtactatctcagaaatccatggaacatggaactcaggatgagcaattccacaggtttccattaggtcagctgcaggtatccaagagctttccatgggaagaagagagggctgagaggctttcagttttaaatgattctgtcatcaaaactttgcttcaacaattgttctcactgctactaaatctatatgccccaaaactgtgttttataaaataaaagaggctgggcatggtggcccacacctagcactttgggaggctgaggcaggcagatcgcttgagcccaggagttcaagaccagcctgggcaatatggcgaaaccccgtctttatcaaaaatacaaaaattagccaggcatggttgcatgtgcctgtagtctcagctacttggaaggctgagatgagaggatcgcttgagcctgggaggtcaaggctgcagtgagtcatgattgcgccactgcactccagcctgggtgagagtgaaaccctgtctaaaaaaaatttttttaattaaatcaaagaggccaggtgggatggctcacacctgtaattccagcactttgggaggccaaggtgaaaggattgcttgagaccaggagttggagaccagcctgggcaatgtagcaagaccctatctctataaaacattttttaaaaaattagtcaggtattgtgatgccagctactcaggaggctagggtgggaggattgcttgagcccaggagttctagaccggcttgggccacatagcaagaccccatctataaaaaagtaaaaaatattttaaaagctggcacagtaacatacacctgtagtcccagctactcaagaggctagggcaggaagatcgcttgagcccaaagttcaaggctgcagtgagccatgattgcacaactgcagccagcctgggcgacagagcaggaccctgacatacatacatacatacatacaaaaataacagcagttcctccataagaatcttcatattttatcttttctgttactttattaggcaggaaaatttattactttattagctaggaaaattgacaggataaagcttagaaatggtgcttattcctgctgttacgcaattctgtgatgcctcctcaccactgccgtctaccaccagcttcagccttcagcctccctcctctccattccccacacttcaaagcccatctcaagcaccctcccccaccacagagcctgcctctggggaagcactacccagccacacgcagccccataggatgttacctgcctacgaattcgagacctcttatagcagtgtttctccacatgaggcccacctgccacctgcctacacaatcaacccacatgactggtcaaaaggcatatttctggatctcaccccagacctactgaaggcagggctgagggtggggatctatgagtaggcattttgaataaacaccttatgcccaaatttagaaactacagtatcttatatttatgattcatgttttagaaccaggttatgtgtttttgaattacttacaattagctcagatgtccagttcagagagccaaacaactcaacaacgctagatgggaaaaaagaatgccttagctgtagcacctgaggaaaacaattaaggattttagttgaccacaaactcaatgagtcagcagtgtgatgtggttggtagaaaagctctaatttaggctgcagagataaaagtagagtagatggaacacaggaatatcccattccacatcagagcatgtgtgctttacagtgccctgcttagttgggtttttttttttttttttactttttttatttgtttgttttgacacagtgtctcgctctgtcacccatgctggggtgcagtggtgtgatcttggctcactgcagcctccacttcctgggctcaattgatcttccgaccccagcctcccaagttgctgggactacaggcgcacaccaccacaccctggctaatttttgttgctcaggcttctgcttagtttttagggccacacttttaaagagccctggacaaattggcacatgttaaaaggaaaatactaagtaggatagtgagagacacacagaatgtgccatagctatccgctcttttaatggcagcagatcttgtcccatgagggcaatggccccagagggttaccccatacaaacaccttaatctcagtggcttaccactgggttacatcacagggagaagacggcgtttccccaggaagtctctggctagaagccctgggaggcttttctgatgattccaagaactgacaagactttctcttctgtgtttctcatattgagaagcaaatagatgatgctgcatttggcataggaattttctaaattaattcacaataaataacttggtcaaaaaactgtaatacatctctagcaagccgcccacatatacaacataatcacgtccttaggatgaactctgccataattataaagaaaaagtaaaagggataaaagagggaaagtaggctggacatggtagctcacacctgtaatcccagcactttgagatgtcgcggtgggcagatcacttgaggtcaggagttcaagaccagcatgaccaacatagtgaaaccccatctcttctaaaaatacaaaaattaactgggcatggtggtgcacgcctgtagtcccagatacttgggaggctgaggcaagagaatcgcttgaacccaggaggcggagattgcagtgagccaagatcgcaccactgcactccagcctgggtgacagagcaagactccatctcaaaaaaaaaaaaaaaaaaaaaaaaaaaaacagggaaagtgagtttgttattatctttgggaaaactctcttcctaaattctatgtatgtgaggaacatctgctggtgaattatgtgcctgcgccacctctaatgtgtttatactttgcatgtccataggacgggggcaccgccctgttggctgccagtcagtacgggcacatgcaggtggtggagaccttgctgaagcacggagcaaacatccatgaccaactttatgtgagtgcatttcagggggacattaggacatttctcatcacatacaaaattgcagtctaaattcagatgccagaaatgccaacttcaaaaatactttaatggacagtaggacttgggtctgagtcaagagaaaaatatatagcggaccagatgggctttttttatatagaaaccacatatctggccgggcgcggtggttcacgcctctaatcccagcactttgggaggccgaggtgggtggatcacaaggtcaggagttcgagaccagcctggccaacatggtgaaaccccggctctactaaaaatacaaaacttagccggggatggtagcgggtgcctgtaatcccagctactcaggaggctgaggcaggagaatcgcttgaacccaggaggtgaaggttgcggtgagctgagatcacaccattgcactccagcctgggtgacatagtgagactctgtcccccaccgacaaaaaatgaaaccatttatcttatttacccatctttgttctcccttttaaatctgttgtgcagatgaaacatttcgtgtacctatgcaattaaggccttcaaaaatcatgtgatacttattcgtaccatgacaaactacaaagcccagcatatggacttgctgaaaaccaaaatatacaaaatttttctaaatgcgctcattggatataaaaatatactgttgtagtatttgtgaggaagggcacaaagaggagaaatctaaggtatttggtagaaaagtgaggttggatggatgaagacctctgtgaaatatacacatgccattgacctgtgaaaggcatccactgctagtgcgggtctgtttgcagctaactgtcaattagtacatcatcacccaagggcctttcaattgattgtcgctataatgccataggatttatggcaaacattactccagttttgtaagcgaaaatagaatatagggagatgaatagacttgacagtctcatggtgaagagtggaaaaattcctacttccaattatctaggaaccgtattttaggctgtcctacaggtaggcatttaacccttatgcctggggcactatactttcatagacatgtaatgagctctgtaggtgtgaacttttccatttgaacaccctttccagagtttacatggttaaccctgacaaatcacaggcctctttgaaattcatagcagctagcctcaccctctgcacttcaaaatctgtaacacactttgagcctgcaacattaccagtagaatgattgaattacttgataatgatctaaagaggcgattctcaactctggctgcccattagaattatctgggaaagtttaaaaaaatactattttgaggcccactccagaccaacaaaactggagtctctgaaggcacagcttgggcaacaggtagttctcacatgtagcctaatctaagaagcacaggtctaaaggttagatatgtctttggctatatataggtagagtatatctgagagtgtgtaatatatatatatatacacacacacacacacacactgaataggaaaagccaaagtgtttggtgaaaagaaaagccccttcccatagtaatttcctctctgttttaaggtgactcaagaaatttcatgcattataacttccattttatattaagacctttacctttacccaaacaatctaaatattttcttaaaaacgattgaaatatggatgggcggggcagaaccaaaacttggaatgcacagtgaaaaattcaatgcatgggtagttcatcttggaaaattcctgagagttaaaaaaaaattaaaaaaagaaaaagaaaaagaaaattgctgagagttttcagcagctaaggacatggtagactttccgaaaatgttatccccatataaaacatctgcttgaaaatctgtacaggctgattaatttcttaatgattgcctggagggcagtttggcagctctgctgacgcccactgaaaatccaggaccctccacgtgacacacgtggctggacttgcagggaaacatgtcttatatttttgcttgaggttagtgttcccaatgggaggtgtggtaattagctgggtttgctaggtgttttcctctagggtgtgctctggttttccaccgtggtctgaaaacaatgaagctcaccctgcgctgcgaatgttgtcaggctgaagggagcatccggggatcatgctctcagctgatccacacgtctgccgaaagcaccgagtgacatgtgtccaagaaaacagaaatgcccagaaggcatagatactcagttaagacgaaaactaaagagcactggaaaaggggcacttgctctgggctttatgcaggagtgcttttttgtgtttataggtgttgttggtgtctgctgggctggcagagagccactttgtggagatggtttctagggcagttgtattgaaaacatctttcagggttcttttgtgttttgtcttgttttgtcttgttttgttttagagacagggtcatctggatatggtggctcatgcctgtaatcctagtgctttgggaggcagaggcaggaggatcgcttgagcccaagagttcgagaccagcctgggcaacatagcaagaccctgtctctactataaatttttttaaaaaattaactggatgtggtgatgcacgcctgtagtcccaacaactcaggaggctgaggtgggaggatcgcttgagctgaggaagttgacgctgcattgagctgtggtcgtaccactacactcaaggtctgagtgacagagggagaccctgtctcaaaaaaaaaaaaaaagaagagagagagagacaaggtcttgctatgtttccagggctggtcttgaactcctgggctcaagcaatccccctgcctcagcctcttgagtagttgggaccacaggtgtatgccatcgtacccagctgcatattgtatcttaattcttgcagaaccctcatgttgggggaacaaggataaggggacaagaaagagaaaagggtaggaaagatctaattaaaaggacaccttttactctcaatttttttttcttttttttctttttttttttttttgagacagggtctcactttgttccctaagcctggagtgcaatggcccaaacatggctcactgtaacctcaacttcccaggctcaagtgatcctcctgcctcagtgcccccaagtagctgggactataagcacatgccacctcgcccagctaattaaaaaaaaaaagaatttttagaaatttaaaaatatattaaaaataaattttttaaaaatgaggtttgggggatttgtatatctaacatttggctcttcattgacaaaaaggtggaaacctacaaagagatggagatggaaaattatattaaatgtgtatattttaaatctaatttattttattttatttattttgagacagagtctcactctgttgcccaggctggaatgcagtgatgcaatcttggctcactgtaacctccacctcctgggttcaagagattcttctgcctcagcctcccgagtacctgggattacaggtatgcagcaccacacctggctaatttttgtatttttatttgttttttgttttttgattttttgttttttgaggaggagttttgctcttttgcccaggctggaatgaagtggcgcgatctcagctcactgcaacctctgcctccaggtgcaagcgattctcctgcctcagcctccggagtagctgggattataggtgcccgccaccacgcctggctaattattttgtatttttagtagagatggggtatcgccctgttggccaggctggtctcgaactccggatgtcaggtgatccacctgcctcggcctcccaaagtgctaggattacaggcgtgagccgccgtgcccagcctaatttttgtgtttttagcagagacgggatttcaccatattggccaggctggtctctatctcctggattcacctacctaggcctcccaaagtgctgtgattacaggcatgagccactgcacccgccctaatttcttttaaaataagtgtgaaagataatgtttttaatgcttttaatttgttctctctcaggatggagccactgccctcttcctagctgcccaaggtggttacttggatgttattcgattactgctggcttcaggagcaaaagtcaaccagccaaggcagg

SEQ ID NO: 15391 - DNA, 47988 bp, Homo sapiens
tggtcatggacccccactgttcctagatcccagtactgtgctgttctttgtagatgccctacacccaggcctcagcttaatagtctctttattacactttcttccaattatcccaatctgaatgtaccatctgttccttgccagaactcgggctgctgtcaagtcttgggcatctgtgaactggccatcttggtcttatttgggttttacggggctggttcctacatcacagtgggaaaactgtagggcagaaacaccagttgtcaccgtggccaacacggagaaacccgcctctactaaaaatacaaaaattagctgggcgtggtggcaggcgcctgtaatcccagctactcaggaggctgaggcaagagaatcacttgaacctgggaggcgggggttgcagtgagctgagatcgtgccatcccactccagcctgggaggcgagacttcgactcaaaaaaaaaaaataccatagagcaccactaagaagccattagctttttgttacttcgttacttcgttactttaccgatactttttacataaagccaacaagactttcacaaaactagcatggccattgacagaagtcaacaaaagccagatgacagcctaacattgaattatcgtaatgttattttaatatctaacacttactgaacgaatatctaccattactatgttaaccatattgcctgacttatctcattcagtaatttaatcaggtggatacttttattattcccccatatttcagatgaagagaatgagacttaagggttacatgatgtgcccaagatcatactgtcagtgactactcagcaatactgccttcctacaaaatcccgtagatgaaaataacacgaagcctccaaaattcacttaattaccctatacctaatgagcctcccctgtgtgcagagtcacctgtctctctcatcatccacttctgagcagcaggttgctgaatatgcagaggtggtagctaagattacaatttcaagtgcttgaaaacaactgtaagtcaaactgcaaatgcccacttcaattagaagggtccatatcacatggtacacctcaggtccttgaatcttaaagctgggacagactttggtgatcatcccatccaaccgctcattttaaaaatgaaataaatgagtccaagtaattgtaagcaacttgcccaggttacactgttggtcagtgacagctacctgggtttagcccccacagctcctgactctcaactctgtagtctctcatttcacctggtgccatacatctttacctgaatcattttgaagatgaagacttttaaatatggaaaatcagatggtaccatttaatttttcttttgcattaatagcaatgttttggctcaggaatcatttaataggaatcataaaatgagagcaatatatcatcgctgccttaaaatgcagtaactatggttcatttggactgtgcttctgaaggtaatggaagtaagtgaatttttacatcgaaaattccaacctcagcaatttgtcactttgctttttcccatctaggctgcatgatgagattattcatgaccacttttatcactgcagggaattttgcccttggatgtgttctgagtggagctgacatctctgcagcatcttctctaggacccttctctctgacatagcagtggcctaactcttcatctgtctctcctccatccagcatggcaccacactcctgatggttgctgcctacgctggccacatagactgtgtgagggaactggttctgcaaggagcagacatcaatctccagagagaggtaggtcaggctttgcacttgaagaaaaatgaccaggctcagagatctgaagttttcatgatagtgaactggtatgggggacaagagccatcattgcttttctcccacattaaagcccattgcagagtttattgtgcctacaatgaggtccagcaacgtactagcagttataatgcatttgagcgtagcctgtcgggcatatctgaggtaaccaaacctcttaccacctgcctataaacactcacacttttttttttatcaagcttaaatcagttctttattactcccttgggatgagatactgtaggatttatagcattttcatatagatcattatatttttagaagagttgagtcaccagcctatttgtaatgaggctcacttgctaggatgtctcaatcatcctccccaaaccatgttttcaaaggactgctctctaactggccatgaattaaataagctctcctggaaaaagccgtatgggtcaacactggacaaaaatgtgagcctgttcccacacttcattcaaggacaatcttgggagtttggtcttgcttgaggatccattcttggtctaatctagagaagcagaagggagtctgggacttttttttaagatggagtctcgccctgtggcccaggctggagtgcaatggcgcaacctcggctcatgcaacctccacctcccaggttcaagtgattctcatgcctcagcctcccgagtagctgggactgcaggtgtgtgccaccacgcccagctaattttctgtatttttagtagacatggggtttcaccatggtggccaagatggtctcgatctcctgacctcgtgatctgcccacatcagcctcccaaagtgccgggattgcctaggctgggacattttaacatactttggggctcaattctgagaaagctccatccatatatttccaagctgacccaggacctggtaaactaatctttatggagacacacgctcaggtcacccctagagtgtatctgacctctcagttcacactgactcagacctgagatgggcttcctgggcaagtccagactgaaccacttggttttccttggtccagccttattttatcccaggtcatgccttgcaacattttagaaagacaattcaccaaccaaactttcatcaagccagtatatcgtatatctcattcttccagcctggaccgtcacctctgagtggagcaaattaagacacatcaggtctcaggactgtgtcaagagttccaggtgtaacataggcctgggcaacatagcaagaccccatctctacaaaaaaatttaaaaatttagccagacatggtggtctacacctatagtaccagttacttgagaggctcaggctagaggctcgtttaagcccagaagttacaggctgcagtgagccatgattgtactaccagcctaggcaatgcagagagaccctgactcaaaaatagagttccaagacacatccagatgtccttcccaccacccgtctgggtgttggaggccttggctgtggaccatgaaagagtgacatgcagaatctgggactgggtctctgtagccctggatcaacaggcctggtctcttgagaggagcagtataaagagactacagcaaatgcagtcttctcacaaacagattctttggtgcaatttccataacactagatcgttgtttgaggtcattttcacttcagcacttaattttcctgtgggatgaaaatatctggacccacttagaattacagtttaaaattactttaatctttttatttttcctctctgctttatggtctttgtttattacaactttaaagacagtttttctctaataaaaacaatatggtccagatctggtttactttaaaaactttatcctgaaggacaaattgcacatgcacaaaaatctctctgaaacaactgagaaaagcagctagaagaggagagaagtatttgatttctagccagtctatggtttctatggttttatatttatccatttggttccaattgctcaactaatcttggagatgaaaactctcgtagcactgagaacaaaagcctttgaagatttaccaaagtgtactcagcttaaaggtaacctgcgtggctcaaatgatggtgctatgtaagttcctggcagtccctgaatttcctgagactgtgtcagtctggggcaagagggctgccaagccaaaggcagacctcagcctcctgtaccagttttggaagctaagagtgccttgcagtgctttgaaacttactcctatggcagacttctgccttgatccattgttagttaatccactttgcaatatcagaatatttgtctcctgaaaaactacctgccactccttgcttaggtcagctctctagatacacagagcttgctagagagacaaactggaaactaatgttcctgaaacactattgctgtaaagaacccacaattggctgatgacacctctcaggcataggagctgcacatacagttggcatgaagccctgaagtaaggcacacatatttaaaacttttattcacattccagactaaggtatagctcctatttatggattgctgcattgaggtacagaatgattaatagtagtatgtatgttctaaaatcagctcaaactgctctaataatgatttatgtaattaatgtaccaagaaagcctattgaaaagcaaattatttatcttactaaagaaacaacttctagaaaagacctttggtagtctctaaaatttaatatctattgagaaggtgagagttttcctattctagccaagtttcttcctccagaactattaattccctaaggtttccggaacccagcatcatcaactgtaataaagcagtgggaggatgcttcccacttatttctgtgggaaccaaggagaaaatcacacctgcattgcaggcagaaaggccctgtgaatggtcacaatgcctgtgccttcctgggacagagtctggctgagggcacagcctgatgtgggttatatctgactaggaaggtgttacatgttctccctcagtggtggtgttatcagcaccctagattcttataatctcccaggatagaagtcaaaagagattgtcagatagcaaagaggaagtttgtttagcttgtgcataagagaaccaggttcccttatggaaaggaaaagggttgcctgctccccaagagaagtatgtgagtttgttttatagggtctttttacagggaagggtttagtcagggcatgtacagcacttgcacagtagctcaatatgctttttaatcattgcatgtaagattagcattttaaatctccaccttcaggtgtgatttttagcattaagataaggaagaggtgactgtaagttgaagtttaagtctaactgtgcatgcagggccccaggaagtccctacccacctaaagtgagaacttctggatagtttcttgggtcttttgttgctgattggctgtcacaggatccttagggtgtcactttgccagctggaaacctccatggctagcagcgccttctgcccaagtgttgctcaggcccgttgggctcattctgcccacttggcccagcaggttgcacttggttcaccctaccagcccaggtcccatgcctgccaagggcaagccaggtgtgtgagcaagcatggggtccagccactgcacacaaccaggcatgccagctgtggcgaggcaggcagctccagccactggcacaggtgccagctctgtgtgaggctgtggctggaccagatgtaccgcaagtggcttccgctgcaggcaccagggaatgtagtggtgcctgggagcttggagatgccaggaaccgcagagccccaaagaggatatcatagccctggctcagggagcccctaggtctgggctccccaaagggctgtagctcctctctcctcattgcctgcaatgtggcaagcagaaggcgtgtttcagccctgtttgtgttataaacagggtcattcgccaggtcctaaattcttgtcccgcatccaagaagaatgaggtatgcaaacaactggagggtgaacaaagtggagaggagcttcattgagtgacagaacacctcccaggagacccaaagtgggtggctcttttctgcaggcaggtcatcctaacaagtgttcagctctcagtggagaggagacccatagtgggtagcgcctttccgcaggcaagtcatcctgatgatctgaggagacccaaaatggatagctcctcccgcagctggtagtcccgatatctgggtccagctctcagcagagaggagacccacagtgtgtagttccttcctgtagctggtagtcctgacctctgtgtcctgctctcagtggacaggagacccacaatgggtagatccttccagcagctggtagtcgggacatctttttgaatctggctgagtcagaggtttttatgggctcagaaaggagggagtgtgtgctgattggtccatgggaagccatgggtgggaacgtgtctgcctctcaccatcaacatgccatccacggcacccaggctgttcctgccaaggggcgcctacaggcccacacctagctgccctcagcccctcagcctccctcctgtgcttgtcagcacccaaagtccggagggggccaaggttggggggcaaggctggcatgtcaacaccacctcaagcatacacacctcaagcatgctctcccctagccaggtcatgacagacagcacccaggctcggctacagctttgctccgcactggagcaggtgccgggagtggggagaggccagggagcaggagcaggcacttccaagcctgtgggggtaatgggggcttcccaggcccagagagcacagggatgcccagaaccggagctgcagctgggcatggctgctcccgcacagccaactcaataggggatggggctcccacctgcttccagctcccactggacctgaggagcatgcagccccagctgcacctcccgtgtggcagcctgcatcttcgcagctgctgctccagacaggccaccactgccatcagtgagaagttaggcaagctacagcttgagtaaggggcttttttttttctagaccacatttaaaaacaggcaaacaagtgggtggatcctgcctgtctcagtgggtcttattgtccccactcccatcccacacatgcatgcacacacgtacatattcacagagacacccaggcccttaagaacaagttttaagcatgatcactagcttataggccaggctgtcctcagcttttcacacatgagtgagacctaccatcttaacagctttgggtaaactatggaaaaagggatttcttttcactgtgtctggtaaggtgtggtattagctttgtcccaagctccaagctcagaagtgaagagtactctataggaaaaatgtatgttgcccacaagaatggttcattattttgctcatattacacagtgatttgggtaccaatctttgagtagacttgtaaaagtagataggaagggaggatgctaaaaactgtgtctcagaatgtcatgatcagtttaaattttagaatcaggatgtttcttgttattatgtcccattttgagaaatgttttgagctcattttgactctgggcttgcaattggagaagtttgtgggtgaattacttattttccttcttgtacaagtagtcttccactctggggcgctaaaatttgtaatttgaattcttccctgtattaaggaatgctagtgtttaccaaacactataccaaatatcttgagtttccaagggctgctgtgacaaattaacacaaactaggtggcttcgaacatcaggaatttattctctcagatctggaggccagaagtccaaaatcaaggtgtgggctgtgccgcactgccactggaggctcctgggggaattcccttccttgcctcttccagcccctggtggctgtcagcactctctcctcaatgccacagctctccagtctctgcctatgtggtcacattggcctctctctgggtcaaatatccctctgcctcacttcaaaaaaaaatttattgttttttattgtggtaaaatacacataatgtagactttaccctcttagccatttttaagtgtacagttcagtcttattaaatgcattcataatgtggtacaaccaacatcatcacccatctataactcttttcattttgtaaaactacacaactctgtatccattaaataataacttcccatactccccttcccccagcccctggcaaccagcatcatactttctggttctataactctgactactttagatatcacagcaggctgggtgcagtggctcatgcctgtaatcccagcactttgggaggccaaggtgggcagctcacttgaggccaggactttgagaccagcctggtcaacatagtgaaaccctgtttctactaaaaatacaaaaaatagccagatgtgggggtgcacgcctgtaatcccagctacttgggaggctgaggcatgagaatcacttgaacctgggaggcagaggttgcagtgagccgagatggcaccactgcactccatccagcctcggtgacagagcaagactctgtctcaaaaaaaaaaaaaaaaaaaatcacagtaaaatcatacatagttgttggccttttatgactagcttatttcacttagcataatgttatcaaggctcatccatgttgtagcatatgtcagaatttcctttctttttagctaaataatagtccattgtatggatacatcacattttgcttgtctcctcatccatagatggacacttcagtgcttccacattttagctgttgtgagtagtgcctctgcctcactcttagaaggacacttgtcattagatttagggcccacccagataacccaggataagctcttctcaaaatccttaacttaatcacgtcttttgccatagaaggtaatattcacaagttttaggatggggacagatcttttgaggagccaccattcatcccatttcactaagaataaagttttcctttccttttgtcacttctctgaccaaaaaataagaatctgttcaaatttagccccttcctaggctagaagttttctatgcaaggatattgttttgttttctttgcagatgttcaaatcaaatgtaagataaccaaatgtcttttaaaactagcctctccctctctcccagtcaggtacaactgccctattctttgccgcccagcaaggccataatgatgtcgtgagatttctctttggatttggagcatccactgaatttaggaccaaagtgagataaccttcttgattttgtattatgttgaagaatttcagcagccatgggtattgcttttctcctcatctatggtacgaatttatgtttccctttttacaagattctcaaacctaagtaagtggatttcctcaaggttacttgtagtggttcaggggtagctctaagggttctattcaaaacgttacatttttactctgggctcacaattggaaaattttatggggaattacttctatcctttcctgaactgatacctttctactgtagaacactaaattttgtaaccaggagggatacagtagcagtggctttctaactttccctgtttccatgttctttttcccactgaagattaattctgatactatgataggaattgttggaagtattaatctgatcctactagatctgagacatttctaaagagggtggtttggcagacagcttactttcatgagctatcctcactgaaatacataatacatagctacagtttacatagttgggaaactatatagtggttcttcctttaaagaagtaattggctaggcgcggtggttcatgcctgtaatcccaacactttgggaggccgaggcagggggatcacgaggttaggagttcgagaccggcctgatcaacatggtgaaaccctgtctctactaaaaatacaaaaaaaaattagccaggcgtgatggcacatgcctgtaatcccagctactcaggaggctgaggtaggagaatcacttgaacccgggaggcagaggttgcagtgagccaagatcacgctactgcactccagcctgggcgacagagtgagactctgtctcaaaaaaaaaaaaaaaaaaaaagaagtaattgattttcatttttgacatatagataagaaagctgagaatgtagaaagattaatttcatgttgacagtatgattttacatgataatattttgtagtagcagaatttgaactgccgtaagatttttgtaattgtcagctcatttctagcctaattataatttttaaattcctgaaaatgtgcgcaagttggaaacttttaggttttcttagttaatcctttttgtggactatttagatatcaagggagtttccagtgggattttttttctgttaaaatggtaactactggagctggccaaggtggctcacacctgtaatcctagcactttgggaagctgaggcaggaggatagtttgagctcaggagttcaagaccagcctgggcaacaaagcgagacctcatctctattaaaaaaaaaaggattcgctgggcatggtggcacatgcctgtagtcccagctatttgggaggctgaggcgggcagatcacttgagcccgagaggtcaaggcggcaatgagccgtgatcatgccactgcactccagcctgggtcacaaaggaagactctgtctcaaaaaaataaatcaaataataaaattctaaccattaagtagatgtgaatttcatataaggttttgtcttttctgaaacctgctattgtactacgtatatgccttcaaacttactgagtataacatacagtaatactatatatttttttacattattagtttattttctattataaaagtgataactaaaaatagaaagtaaagtcctatgaacctaaatctcaactctttgaacgaaggtcaaaatgatcgtgagtgaccatatggctgcttcagtcttcttggttaacgagtgaatactggcttaaagcctttgtacatgagccagtttgtactatctcagaaatccatggaacatggaactcaggatgagcaattccacaggtttccattaggtcagctgcaggtatccaagagctttccatgggaagaagagagggctgagaggctttcagttttaaatgattctgtcatcaaaactttgcttcaacaattgttctcactgctactaaatctatatgccccaaaactgtgttttataaaataaaagaggctgggcatggtggcccacacctagcactttgggaggctgaggcaggcagatcgcttgagcccaggagttcaagaccagcctgggcaatatggcgaaaccccgtctttatcaaaaatacaaaaattagccaggcatggttgcatgtgcctgtagtctcagctacttggaaggctgagatgagaggatcgcttgagcctgggaggtcaaggctgcagtgagtcatgattgcgccactgcactccagcctgggtgagagtgaaaccctgtctaaaaaaaatttttttaattaaatcaaagaggccaggtgggatggctcacacctgtaattccagcactttgggaggccaaggtgaaaggattgcttgagaccaggagttggagaccagcctgggcaatgtagcaagaccctatctctataaaacattttttaaaaaattagtcaggtattgtgatgccagctactcaggaggctagggtgggaggattgcttgagcccaggagttctagaccggcttgggccacatagcaagaccccatctataaaaaagtaaaaaatattttaaaagctggcacagtaacatacacctgtagtcccagctactcaagaggctagggcaggaagatcgcttgagcccaaagttcaaggctgcagtgagccatgattgcacaactgcagccagcctgggcgacagagcaggaccctgacatacatacatacatacatacaaaaataacagcagttcctccataagaatcttcatattttatcttttctgttactttattaggcaggaaaatttattactttattagctaggaaaattgacaggataaagcttagaaatggtgcttattcctgctgttacgcaattctgtgatgcctcctcaccactgccgtctaccaccagcttcagccttcagcctccctcctctccattccccacacttcaaagcccatctcaagcaccctcccccaccacagagcctgcctctggggaagcactacccagccacacgcagccccataggatgttacctgcctacgaattcgagacctcttatagcagtgtttctccacatgaggcccacctgccacctgcctacacaatcaacccacatgactggtcaaaaggcatatttctggatctcaccccagacctactgaaggcagggctgagggtggggatctatgagtaggcattttgaataaacaccttatgcccaaatttagaaactacagtatcttatatttatgattcatgttttagaaccaggttatgtgtttttgaattacttacaattagctcagatgtccagttcagagagccaaacaactcaacaacgctagatgggaaaaaagaatgccttagctgtagcacctgaggaaaacaattaaggattttagttgaccacaaactcaatgagtcagcagtgtgatgtggttggtagaaaagctctaatttaggctgcagagataaaagtagagtagatggaacacaggaatatcccattccacatcagagcatgtgtgctttacagtgccctgcttagttgggtttttttttttttttttactttttttatttgtttgttttgacacagtgtctcgctctgtcacccatgctggggtgcagtggtgtgatcttggctcactgcagcctccacttcctgggctcaattgatcttccgaccccagcctcccaagttgctgggactacaggcgcacaccaccacaccctggctaatttttgttgctcaggcttctgcttagtttttagggccacacttttaaagagccctggacaaattggcacatgttaaaaggaaaatactaagtaggatagtgagagacacacagaatgtgccatagctatccgctcttttaatggcagcagatcttgtcccatgagggcaatggccccagagggttaccccatacaaacaccttaatctcagtggcttaccactgggttacatcacagggagaagacggcgtttccccaggaagtctctggctagaagccctgggaggcttttctgatgattccaagaactgacaagactttctcttctgtgtttctcatattgagaagcaaatagatgatgctgcatttggcataggaattttctaaattaattcacaataaataacttggtcaaaaaactgtaatacatctctagcaagccgcccacatatacaacataatcacgtccttaggatgaactctgccataattataaagaaaaagtaaaagggataaaagagggaaagtaggctggacatggtagctcacacctgtaatcccagcactttgagatgtcgcggtgggcagatcacttgaggtcaggagttcaagaccagcatgaccaacatagtgaaaccccatctcttctaaaaatacaaaaattaactgggcatggtggtgcacgcctgtagtcccagatacttgggaggctgaggcaagagaatcgcttgaacccaggaggcggagattgcagtgagccaagatcgcaccactgcactccagcctgggtgacagagcaagactccatctcaaaaaaaaaaaaaaaaaaaaaaaaaaaaacagggaaagtgagtttgttattatctttgggaaaactctcttcctaaattctatgtatgtgaggaacatctgctggtgaattatgtgcctgcgccacctctaatgtgtttatactttgcatgtccataggacgggggcaccgccctgttggctgccagtcagtacgggcacatgcaggtggtggagaccttgctgaagcacggagcaaacatccatgaccaactttatgtgagtgcatttcagggggacattaggacatttctcatcacatacaaaattgcagtctaaattcagatgccagaaatgccaacttcaaaaatactttaatggacagtaggacttgggtctgagtcaagagaaaaatatatagcggaccagatgggctttttttatatagaaaccacatatctggccgggcgcggtggttcacgcctctaatcccagcactttgggaggccgaggtgggtggatcacaaggtcaggagttcgagaccagcctggccaacatggtgaaaccccggctctactaaaaatacaaaacttagccggggatggtagcgggtgcctgtaatcccagctactcaggaggctgaggcaggagaatcgcttgaacccaggaggtgaaggttgcggtgagctgagatcacaccattgcactccagcctgggtgacatagtgagactctgtcccccaccgacaaaaaatgaaaccatttatcttatttacccatctttgttctcccttttaaatctgttgtgcagatgaaacatttcgtgtacctatgcaattaaggccttcaaaaatcatgtgatacttattcgtaccatgacaaactacaaagcccagcatatggacttgctgaaaaccaaaatatacaaaatttttctaaatgcgctcattggatataaaaatatactgttgtagtatttgtgaggaagggcacaaagaggagaaatctaaggtatttggtagaaaagtgaggttggatggatgaagacctctgtgaaatatacacatgccattgacctgtgaaaggcatccactgctagtgcgggtctgtttgcagctaactgtcaattagtacatcatcacccaagggcctttcaattgattgtcgctataatgccataggatttatggcaaacattactccagttttgtaagcgaaaatagaatatagggagatgaatagacttgacagtctcatggtgaagagtggaaaaattcctacttccaattatctaggaaccgtattttaggctgtcctacaggtaggcatttaacccttatgcctggggcactatactttcatagacatgtaatgagctctgtaggtgtgaacttttccatttgaacaccctttccagagtttacatggttaaccctgacaaatcacaggcctctttgaaattcatagcagctagcctcaccctctgcacttcaaaatctgtaacacactttgagcctgcaacattaccagtagaatgattgaattacttgataatgatctaaagaggcgattctcaactctggctgcccattagaattatctgggaaagtttaaaaaaatactattttgaggcccactccagaccaacaaaactggagtctctgaaggcacagcttgggcaacaggtagttctcacatgtagcctaatctaagaagcacaggtctaaaggttagatatgtctttggctatatataggtagagtatatctgagagtgtgtaatatatatatatatacacacacacacacacacactgaataggaaaagccaaagtgtttggtgaaaagaaaagccccttcccatagtaatttcctctctgttttaaggtgactcaagaaatttcatgcattataacttccattttatattaagacctttacctttacccaaacaatctaaatattttcttaaaaacgattgaaatatggatgggcggggcagaaccaaaacttggaatgcacagtgaaaaattcaatgcatgggtagttcatcttggaaaattcctgagagttaaaaaaaaattaaaaaaagaaaaagaaaaagaaaattgctgagagttttcagcagctaaggacatggtagactttccgaaaatgttatccccatataaaacatctgcttgaaaatctgtacaggctgattaatttcttaatgattgcctggagggcagtttggcagctctgctgacgcccactgaaaatccaggaccctccacgtgacacacgtggctggacttgcagggaaacatgtcttatatttttgcttgaggttagtgttcccaatgggaggtgtggtaattagctgggtttgctaggtgttttcctctagggtgtgctctggttttccaccgtggtctgaaaacaatgaagctcaccctgcgctgcgaatgttgtcaggctgaagggagcatccggggatcatgctctcagctgatccacacgtctgccgaaagcaccgagtgacatgtgtccaagaaaacagaaatgcccagaaggcatagatactcagttaagacgaaaactaaagagcactggaaaaggggcacttgctctgggctttatgcaggagtgcttttttgtgtttataggtgttgttggtgtctgctgggctggcagagagccactttgtggagatggtttctagggcagttgtattgaaaacatctttcagggttcttttgtgttttgtcttgttttgtcttgttttgttttagagacagggtcatctggatatggtggctcatgcctgtaatcctagtgctttgggaggcagaggcaggaggatcgcttgagcccaagagttcgagaccagcctgggcaacatagcaagaccctgtctctactataaatttttttaaaaaattaactggatgtggtgatgcacgcctgtagtcccaacaactcaggaggctgaggtgggaggatcgcttgagctgaggaagttgacgctgcattgagctgtggtcgtaccactacactcaaggtctgagtgacagagggagaccctgtctcaaaaaaaaaaaaaaagaagagagagagagacaaggtcttgctatgtttccagggctggtcttgaactcctgggctcaagcaatccccctgcctcagcctcttgagtagttgggaccacaggtgtatgccatcgtacccagctgcatattgtatcttaattcttgcagaaccctcatgttgggggaacaaggataaggggacaagaaagagaaaagggtaggaaagatctaattaaaaggacaccttttactctcaatttttttttcttttttttctttttttttttttttgagacagggtctcactttgttccctaagcctggagtgcaatggcccaaacatggctcactgtaacctcaacttcccaggctcaagtgatcctcctgcctcagtgcccccaagtagctgggactataagcacatgccacctcgcccagctaattaaaaaaaaaaagaatttttagaaatttaaaaatatattaaaaataaattttttaaaaatgaggtttgggggatttgtatatctaacatttggctcttcattgacaaaaaggtggaaacctacaaagagatggagatggaaaattatattaaatgtgtatattttaaatctaatttattttattttatttattttgagacagagtctcactctgttgcccaggctggaatgcagtgatgcaatcttggctcactgtaacctccacctcctgggttcaagagattcttctgcctcagcctcccgagtacctgggattacaggtatgcagcaccacacctggctaatttttgtatttttatttgttttttgttttttgattttttgttttttgaggaggagttttgctcttttgcccaggctggaatgaagtggcgcgatctcagctcactgcaacctctgcctccaggtgcaagcgattctcctgcctcagcctccggagtagctgggattataggtgcccgccaccacgcctggctaattattttgtatttttagtagagatggggtatcgccctgttggccaggctggtctcgaactccggatgtcaggtgatccacctgcctcggcctcccaaagtgctaggattacaggcgtgagccgccgtgcccagcctaatttttgtgtttttagcagagacgggatttcaccatattggccaggctggtctctatctcctggattcacctacctaggcctcccaaagtgctgtgattacaggcatgagccactgcacccgccctaatttcttttaaaataagtgtgaaagataatgtttttaatgcttttaatttgttctctctcaggatggagccactgccctcttcctagctgcccaaggtggttacttggatgttattcgattactgctggcttcaggagcaaaagtcaaccagccaaggcaggtaatgtccactgttgacatttgcccgagcacatggcgcatggggcagggagggctgggtgtccgctggcagcacatacctgagataaccagtaagctcaaggcatcctttaaacccttctgcttctgtgatgaaaagttaatctttgattagggtatctcctgttctatgctctgagctggcctgaaagcctatgaaaccaagctgacatcacagttcagtactttcaaaacttaagtatttgatgtctgaggtcaagtacacaagtacacactctgccacctcctgtgcaaacaaattatggctgcactgatctaatgagtgcaggctggcctgggacataggtaaacagatgtgggccaagtagcctggcccctgctgataatgctgccttactacctgcccaccacttcttccaccaagccaaagaggagcccatgccgttggaatcattaggaggttctgcaccttcatctctcacaattgttatgctgttgagacttcatttaccaacagcaagctaacagctagcaattcaattaactgaaagtaaaagaacagaaatgtagtctgggagtggtggctcatgcctataatcccagcaccctgggaggccgaggcaggaggatcacttgaggccaggagtttgaggccagcctggccaacatgatgaaaccccgtctctactaaaaatacaaaaattagccaggcgcggtggcgcatgcctgtaatcccagctacttgggaggctgaggcaggagaatcacttgaacctgggaagcagaagttgcaatgagccgagatcgcgcctctgcactccagtcttggcaatagaacaagactctgtctcaaaaaaagagtaatgatttttaaaaagaagaaaaaagaacagaaatgcaagattatacaggcagcactttataaacagtgaagaaccttccaaatgtacagtattataattagcttctcttgtgtaggtactatttttgtccagattaactttttttttttttttttttgagacagcgtcttgctctgtcatccaggctggagtgtggtggcatgatctcgacccattgtaaccttcgcctcctgggttcttgtgcctcagcctcccaaatagctaggattacaggtgcatgccaccatgcccagctaatttttgtatttttagtagagatacattttggtagagagccatgttgcccaggctggtctcgaactcctggcctcaagtgatccacacaccttgggctcccaaagtgctggggttacaagtgtgagccaccatgcctggcaccagattaatttatttttaacaaaacatttcgaattaaggaaacattactataaaggtagtttcctaggaaaaagtcaagctgatttcatacccaggcacatctccactgtactatgacctgatacaggaatgcctctctgtgttcacataatgaatagctatgagaactttaaggttggtctgagctcttggacacaggtttctctggtctttagaagcccaagcacataaggagcctgagaaaaataaagagcctttgggcagagtggtttgaagtcaggaaagcaaagtggttttgaggtcaggaatcccaagttctcaatccatctctgccaataatttgagctgtgtggttttgaacaagtgaatcaacctctctgggcctgactttcatcattgaaaattaggaggctgagcagcatgagcctgatgatctcttcaaatgcccacattttaaataattgttttattcaacattcaatcaatatttcttgagtacttaccatgtgccagacattgtaatcaatgtaatgtatcaatgtaaggttatatttttagaattgtaaagttattcttaggtggccccaggaatactcctgggaaaggaagcagtttcaaaaaaacttttactttcgtcctgctagagttgactttcgaggactggagtttaatattttcgtattggtccttcttattttgttattgttgattgattctgaatcagatgattcattttactaaaattagtaaaaggaattggttatttttagattgcctaagtttgatttgggggccattattgaagataccactgtgaatttagaatgtgaggttatcaagattatcaagtctctctattagtacatccttccaaaataatttctggcactttgaattttattctttatatgcctaaagtactgcttgtaaaaaaccaagtcgatataagagattatatttcaaatgttgcatgagccatgcccacttaaacctaaaatgagtcatgccgtgatgttgaagccaagaagttaaagagtaaaccaacattgcagcagtagccacaacacgccatagctgttttttcttcctcaagagttaggataacctggtcaaagtggatgacctagtctttgagtgcagggatccaccctctggtcaaggagcaagtgctacaacttctaaagactgcatctaatgaaattgttttgaattattttgagttcagccctaaaagaattgttattcaggaaaagggtgtcttataaaataagaattgctttggggaaaaaaggcaatggaatttttcctttttacagagtacactcaccccattgtgccctcaaatcataataatttttattacctactgtgagcttataattagaggttgttatctatccaggtcagactagctcaagttccgtcttctctgaaagtgtaaactctgcatatttattatgttccaagaaaacagtgccatgcctgcacatggcctgcacatggcctacctatattctataggtagagcatttggaaaccaatgttttattctgaaatctcagctgacacattgagtcattattggaaaatccttgaatttacaaaatgaggacaggaatacctgcctggtttaatttcctaatacttttggctaaatctgatttgtaattgttgcactgacattctatgaagccctaccattttattacggtatcctgtaacaggatgttgacaaagttacattgaaattactcagctgacatttgatatgagcttcagggaatctgaacggtagtgggatgacttttctttgtaactctatcactgagaactaaatgaagacctttttagtactttgggatgaggaatcataatcccaaatctagtcatagccagacagtaggaagactatgttcttgatttgaaacttcaaaaaatattttccttccatattgtcctaagccaaaaggtcaagagtcacagagatcattgaaatatagatttcactctaacaattcattttcatttctttccacgtgtcctcaccaagttgagttgctatgagtcagacctttttaatcactagctgagtggctatttctatttttctattaaccaaatgcctcgacatatattttcccaactccactcacccaccttattaaaacaatactttaatagaatgcaaaggtctgatcctgttaacccagagctgaggttagtcagttaactcatctctatctagtctttttcatgtgctaaacagtatttctttgaaggctggaggaaaagtcatctaataaagtgccatctcctaacagaagccttgacttgtacacagagtagctggacccagaaattaaacgttctcccaggtcggaagcttagaggggtgaatccatcaatggcagtgggagaaggagccaaaagattagcgtagaatcctgggggtttggaaatgggaacagacagccataggaagtccttgctgcttggcaagggcagggactctgtcttgtttcgtttgcacatggtacacactcagaaaaagtgtatcgactgccagaagatccccatggctggtgcagagcaggtctggaagcctgcagcatttagtgatcagtgcctgagagttagaagaaggctccagatatagggcccagactcataagcataagccccaggaagactgtaagaggcagctagggagcagacccagattttttgggtggagagcagcttggaaattatggggatatagatatcttaaaatgaaacagaggccccattttgcttattaactgtgtgaccttagcaggttgcctactgtccctgagtctcagtattttaggactactgtgataattaaataaaataatccctgcaaaactcttaatgcagtagctgatacacacccagtgcaatgttaggtattgctgttattatcattcctattccaaccaggcctcattggaacagaaaacccatcagaaatcaaggctgcactttctctagtgagtcgtgtgttctctgtcatctcaaagtctcttcatatctctgtttctccccactcctttctttttttaccagttttgtctgcttacttatcttgtatgtggtccccaggtttatggatcagactgccaacctctgggaatagccatgtcattgtcacagctcatctttgtgcaccaggccacagtgactggctggcctgcctatcctcagtcccatcacccttgactggggaggatagagtcagaccatgggcaatgcagcatctggtaaaatctcttacagacccatttgctgggccaggcacacggtgcaagggacaatcataagaaataggctccagggcagggtagggtgggtaagaaaattatctcaatattgaactccctctgccacgggcaggattcctcacagctcttggactcccaacttcaaatagaattggtccccaagactttctgactggcctaaccctgtaggtagaagtaacccaagtgtgacggctggaaatcgtagaagcaaagagctagtgccgcttcagatactcattcccacagaagaggatggttttagttcttttttccaaatactctcaggagcctacataagaccatacaaggttagtctctaatacaggttgtgtcatatactccatctcatgctgtgatctggctgtaaaagtgatctcgaatgaaatgagggaataacagagttggaggaaactataaaactcactctatttagccatccatcggtactcgaatcctttctatgataatcagctactgttgaacacctctaggcatggagaactcactcctctctgatcagtttctttggtcttagccaacactcattaaacttttatacattgaccccaagtctccatgcagctttcacccatctgtcttctttctatcacttggtctgaaaaattggtctaaatccttttctacttgatatacacacacatagtaaaagacagctatcataaccccatgaatctcattcttcttcaggctaaatgttctattaccttttttttttttttttttttttttttttttttttgagatggagtctcactctgtcgcccaggctggagtgcagaggcatgatcttggctcactgcaacatctgcctcccgggctcaagtgattctcctgcctcagaatcctgagttgctgggactacaggcatgcaccaccacacccggctaacttttgtatttttagttgagacagagttttgccatattggccaggctagtctcaaactccaggcctcaagtgatttgccccacctcggcctcccaaagtgctgggattacaggtgtgaaccaccatgcctggccattacctttttaaaaaaagtgctgtagaggttataacttcacaatgatttctttgatttaatatcaaagtattaaaaatatcaaagtatatggaagtattcaaaagcctatttgaatatttttaaatgttttttcacattttggtacattccaaaactctacaaaaaggagctaaattgacttacttttcatcattttcaaaattatttttatatgtttaatttaaaaaaatatataaaatcgccagacgcggtggctaacacctgtaatcccagcactttgggaggccgaggcgggcagattacaagatcaggagatcgagaccaacctgcctaacacggtgaaaccccatctctactaaaaataaaaaaaaattagccgggcgtggtggtgggcacctgtagtcccagctactcgggaggctgaggcaggagaatggcgtgaacccgggaggcggagcttgcagtgagccaagattgtgccactgcactccagcctgggcgacagagcaagactccgtctcaaaaaaaaaaaacatatgaaatcattgttcttttttttatagagatgggggcctcactgtgttgctgaggctgatcttgaactcctgggctcaagccatcctcccgccttggccccccaaagtgctgggattacaggtgtgagccactgcaccccatcattttcatgatgaaaatgaaggctctaaccattataccagaaggaaaaaataagagaaaacagaaattaaggtgtacaaaagaggaaaacctctcctaattcataaactaaataatcaactgataggtaatctgatttgacaataatgctctaactcacatgcaactccctgggctccaaaatcagatttggagatgtaatgactagtaatgaaatacacaggcggcccccaaatctcattttcccactcattcctacctgctcacagtcagttatctcacagggtcgatggaagaatcaaattaaaaagcatatggaagtattttgtgaacaaaagtacaaattaaggggcgtattgtttctcatgataaatactactcagatgcaattaacatttcctaagcatctgtgagccagtgctcatgctcaccacctttgtatatgttttctcacttatctctgcgaagctaataatttttcctaagaggacactcactcaggctgagatgatttgcctaaggtcttacagccaggaagaactgattgctttttccacctcccatgactattccaattaagatgatatatttgatgagtgttatcattgatgttctaaattgataataataattttttggccaggcacagtggctcatgcttgtaatcccagcactgtgggagaccaaggcgggtggatcacttgaggtcaggagtttgagaccagcctggccaacatggtgaaaccccgtctctacttaaaatacaaaaattagccgggtgtggtggtgcatgcctgtagtctcagcctctcgggaggctgaggcaggaggatctctggaatctgggtggtggaggttgcagtgatctgagatggcaccactgcactccagcctgggcaacagagcaagactccatgataggtaggtaggtaggtagatagatagataatttttcacaatatagcaccttttagcactttcccacatattagtttcaattgttaatacaagtttactaataatgaccaagccattgaaaagcacattgaatagacagctggctgcctctccctgcccgccctctggtggagagagtgacaaagaacaaaacagacccagagcaggcacggagggagaagcgcattagtattggcaccagcttggacccacactcccctcctgccttccagggtcccacccgcacccctctggctacagcagctagatttcccaccctgcatgaaggagccatgcctgtccaagccactgtgactgtagctgcttttccttctccttcaaacgacccttcccctttctcacacctagcaaaatcctggtccttcttcaagacctggatcagatagcactctatccaggacactgagccctcattccccatgcagcagccctcccacctgtttgattttgtgcatttttgtccatactttatgatggcactgcagtcgtatggaaacctccatgtctcttctccaggacttatttttagcactctgcttgagacttagaaggctgggctcacacctgtaatctcagcactttgggaggctgaggtgggaggattgctggaggccaagagttcaagaacaacttaggcaacaaagcaaggccccatctctacaaaaagaaaaaaagaaaaaaaaattagctgggcatggtggtgcacacctgtagtctcagctactaggaaggctgagataggagggtcatttgagcccaggatgttgaggctacagtgagccttgatcatgccactgtactccagtctaggtaacagagtcctgtctcaaataataattatcattattggttgcttgaattattgattaattaaatcctgaattgggaaaatcaaataaagaatatggaagtgcttttaaactaaagtacaaattaaagtacaaattgctcatgataatatttagattcaagaatatttccaccaagaggaccctggaaaaattatgaagtaagttaaagtgtcttccacttccctctatcctttgtttcagcacctcttccactgtctctcccaagacaggtcccaacatcctgtgactgctcttcagcacccccagatcctcctgggctcccaagtcaccagcttccccgacccagctcagatgtcttcatcctctctccctttcctgggacagcagtgggcaacaatcttgtgcctgcttctgctagtaggctaaggttgaaattacacactgcagcagaaaatgtaactttatattctataactgaatcattttgctcttcagccccccttcccccgatgggtaattcagtcttatctggctaaaacagtctcttggggcatattaccataattacctcagaggttacctttagcccattctggatcctgctccctcctgcctttctctccgaagggacctaagagtcagactatcatcctggcattgagatgggggtggagagcctcatgcgtggcccttgtgctggtccacaagcgtcctgcactcttacaccccagggttgcagctggtctcgccattctctgctggcctggccattgtatctactcaggaagtcagggcactgtggccttgccttcccgacaccaggctcactccagccgactgtttctctgtcacttctgatttcccataggcagacgggactcctggatgcctaggtgctaggtggatgtgggccatggggactgggggaccactgactctgaaactcccacggccatttctctcctatctcccgggcaccagcagagagcagaactctaaagggcttgtaactttcctggtttctcacaagaagagaaaatcctttcccatctggaattccccataactgacctgatgtttcttccacaacctaggttacctctcccccacaacacacgcgagattcaacgcagagggggaagaaaacgtggacactctcacgtgacctccgccttccccctccctctctagctccttcacacattggaaggctttcccagtttccatcccatctgctgggaaccaccctactgtcaaatccttccccatcccttgcatgttttacttttttctcctctgaagcaatatatctccacctcatggcccagtgtgcacagagatagcaatattggggaaatactcccaaatatacgcagaggaaatattccccaaaatgctgtcctgccgtaactagtttatgtgcatcacttcctagaagacacaacaacagattccacctaaaattaagccccctaagaaatgaggtggctttggagggttctggacaccagactagaagagtaggagaaatgacttgagttctctgacccgcagaccccacctcaaagaaaactgcctgcgttctatgggaatgaagggtgtattttgtgaacattaaggtgtgacccactgggaaagcaaagaaatggacagtcttgggggaataggccggcttctctctgggtttgtggaatttggttctgctgtggtgtatgtatacaggtcagctgctcccccaagccttcaaagcaaggttcccacgcatctttccatgaagtctgtaccaccctttttggtaaaagatccagccacaaaatggatgattttataagccaaaatttgaatactggcaattattcaagtagcccaggctcagccacgtgccgtctgcgtccgtgggctacacacaccccctcttttctcactgcctcctgggcggtgtggatcagctgcagagtgtgatctgcggtcagggagtgccttcccggagttttcgctttcagacccctggtgttaaagacgttctgtgagcgggtggggccgggcgccccagtcacggcggccgccgcctcctcttcccgcaggacgggacagcgcccctgtggatcgcgtcccagatgggccacagcgaggtggtgcgggtgatgctgctgcgcggagccgaccgcgacgctgcgcggaacgtgagtgcccgagtcgcgcggccaaagagcgaagcctcccggcgcgcctgtgtggagaaaacgggtcttgactgagtctgcagcccacatgggtttcctcccaacctccttccttgagcaggaaaacaaagtcaaggtctgattcggtgctgctcggtctctctcctcctccacccgagatgaccttgggacgcactagagagggtggaatcttagccttaggcctgagggcggtagagacggggcctcccgcctgtcctgggggcctcccgcctgtcctgggggcctcccggctgtcctggggcgtgtcctagggggatcccctggctggtgctgcgcctcctgcaggccctgcctcttgcccctcctccctggagctgcagaccccttgcaccccgtcccctgttggcccgccgtcatccactggcctctgctggtgccacctaatactgcctttgtgtgctgcacagcaggcccttttccccataaggaaggcttgaagagaacctgaccacctatgctgtttgctttttgtgttttactgtggcctttgtataacccttgcttacgtaacccaccttcccctctccaagtctaagctccaaaaaagggaaatcaccagacgcgttcgccaccatttcactgccctctctctcactcttcttcttcccacaatctctgaagccagaaaagacccccaccccccgccccccaattcattcttccttctttctgattacagataaaccctaatggcaggccgaagtggtttcttggctacgggagaattatggactaaatcctccaaacacagcgactgatatgtgaaaatgggagaaaaaggaatttggaaactgtgttcttgagccaaaaaataacgacagaagctaaatattaatttttgaatttggcttttcattctttttagcagattttattttatttttttctgagacagagtctcactctgtcacccaggctggagtgcagtggcacggtctcagctcactgtaacttccgcctctgggttcaagtgattctcgtgcctcagcctcccgagtagctgggactacaggcacgggctaccacacccggctattgtatttttggtagagacggggtttcaagtgaccctcctgccttggccttccaaagtgctagaattacaggcgtgagccactgcacctggccttttagcagattttaatctatcacctctgcccctaagccccactacccacacacgggcggatgcctagagcagactagggcaaggctgtataaatttttttagaaacagtaaatacagctcaacaatgatctaaattattaaagacagttaaccatttctgctaagttatgaacagccgagaatgcctctttggtccaaccatggcctaaaaatatgctcttgaaattccccttgtcccctgcccagtgttctcaggaactgtagaagtatgaattcccaaatggcagagttctaacataatctaagtcactgtttatctgatactctttcatgcagaatttactgcttaatattctctaaaatgctcctagattaagagacattgctgatctgtgcttaatttacacgtcattagtttctgacaacggtactttccagttcccaactgactgctttcaagcaacacagatatatgttaataatcaacttttattttcctctttctgttaaggatggcacaacagcattattgaaagcagccaacaaagggtataatgatgtcataaaagagttgcttaaattctcacccactcttggtattttgaaggtaagacctaaagataaattttactaatctgtaagagagaggttagaaagtaagtcctcacttggggactgtgtcgaatttgggtgcagttagcctggttagttggattcttgaaagaacacacctgcagcttcttgatgctggagatcccaggggctctggtagaagtggggaggtggtagaaagagtgaaccacagtctgtcattacctagttttgcagaaaaaaaaaaatcgacagtagtaatgaaatagctaattggaaagtatgccattttgacaccatttggaggatttgtgaaatcaaggaagaagaacagacacttatgtctgttctcttcattttcttaagcaaagaaccactctgttttgttcccttaagtgaaataaaataagcctcaaacacctggaagcctcagaaaatatgtcagtatggatacctgggtcacctaaaaaacagagccaaaactctttttttaagttttgatctttttgttttgttttgttttgcttttttgagatggagtctccctttgtagcccagactggagtgcaatggcacgatctcggctcactgcaacctctgcctcccaggttcaagtgattctcctgtctcagcctcccaagtaggtgggattacaggcacgctgccaccacacccagctttttgtatttttagtagagacggggtttcaccatattggccaggctggtcttgaactcctgacctcaagtgatccacttgcctcagcctcccaaagtgctgggattactggcatgagccaccctatctggcctaaattttgatcatttttgattaaaatatttctaacctatattatatatcaggagtcagcaaactttttctgtaaagtcttaataaatattagtatttctgtttactaatataattatattattgattatattaattttattatattatattatttattatattaatagtaatgcttactaacattttagtaaatattactaaatagtaaatagtaataaatattactaattactaatatatttactacagtaaagatatatttattaatatataaatattactataggaaatatatactacagaatgtatttactatacactatatatatagtatatatagtatatatatatatatactgtatatatagtgtatatatatatatactatatatatatagtataaatttacattttttcagagacagggtttcactctgttgcccaagcttgagtacagtgatgcaatcatagctcacagtaatcttgaattcttgcgctcaagtaatcctcctgcctcggctgggactacagccacacaccactgcacccatctaatttttaaatttgttgtagagatagggtctcactatattgtccaagctggtctcaaactcccagccttaagcaatcctcctgccttgaccaggaggcatattagtatatggcatatatttactatatatagtaaattatatactgtaaatacatactatataatatatagtacatatagtatggatgtattatatacatacagtatgtatagagtatacatacatacagtatgtgtagagtatacatacatacatacggtatgtgtagagtatgcatacatacatacggtatgtgtagagtatgcatacatacatacggtatgtgtagagtatgcatacatacatacggtatgtgtagagtatgcatacatacatacggtatgtgtagagtatgcatacatacatagtatatatacatacatatagtatgtatatattatatactatataatatatacatactatatagtatatactatataatataaatatatactatatatactatagagtaaatatttatgtctagtaatatttactgaaatgttagtgaatattactgttaccagatagcaaatattttaggctgtgtgggccatacaagtctctcccaactgccccaactctgctgtggtaatccaaaagtaaccatagaaaatacaacaaaaaggcccagtgcggtggctcacacctgtaatcccagcactttgggaggctgaggcaggtggatcgcttgaatccaagagttccaaaccagcctgggcaacatagctagactccatctccacaaaaaatgtttttaaaattaactggtcatgatggcatgcacctgtagtcccagctacttgggaggctgaggtgggaggatggcttgagcctgggaaatgaagctgtgatcgagccactgcactgcagcctaggtgacagagaagctcctgtctcaaaaaaaaaatcttaattcctataaaactttatttatgaacattgttatttgtggaatttcatattttcacatattacaaaatatttttcgtcttttaatctttttaaaatcatttaaaaatgtaaaaacagtctgagtgcagtgatttatccctataatccagcactttgggaggctgaggcaggaagactgcttgaggccaggagttagagaccagcctggagaatatagtaagaccctatctctacaaaagtttaaaaattagatggatgccatggtgtgtggctgtagtcccagctgaggcaggaggattgcttgagcccaggagttcaaggttactgtgagctgtgattgtatctttgcacttctgccagggcaacggagtgaaaccctgcctctgcaaaaatttttaaaagtagaagccgttcttagcttgcaggatttgatttgcaggctgtggtttgctgacccctgagatataatgctcctgttttattacatacaggacaccaaatctgttctaaatggacacagcggcttagctttaggactgtcctctcagagtctatcaatgtatataaaacctacttgcccttgaatgaccccagacactttttggatattttgtgtctgctctttatatttttagattccattcttgctgacagttaatacagaactgctgttgtcaatgtgttggcctctctcccctgccctaatgagctcatgagctactttcatctgccatgagctttttttttttttttttggagacagggtctcgctatgttgcccaggctggtcttgacctttgaactcctgggctcaagtgattctctcatcctcctgcctcagcctcctaaagcgctgggattacaggtgtgagccactgtgtctggcctgccatgagctttagaagccagaaagctgcacttgttaaaattgtttgtaaagtaagaataaaccatctatgaaaatgaattctatgaacaaaaggaataagctttagaaagcttggactttgcaaaatatagtcttgtttcaaacagctcttttttggctttttaaaaactcctggtctggtgtggtggctcacacctgtaatcctagctctttgggaggccaaggtgggcgaatcacctgagattaggagttcaagaccagcttggccaatgtggtgaaaccccgtctctactaaaaatacaaaaataagccaagagtggtggtgtacacctgtaatcccagctactcaggagtttgaggcaggagaacctgggaggcagaggttgcaatgagccgagatcacgccactgcactccagcccaggtgacaagagcaaaactccatctccagaaaaaagaaaaaaaagaggccaaaaagctgcacttgttaaaattgtttgtaaaggccgggcacactggctcacgcttgtaatcccagcactttgggaggcaaaggcgggtggatcacctgaggtcaggagttcaagaccagcctggccaacatgatgaaaccctgtctctacaaaaatacaaaaattagctgggcgtgggggctcatgcctgtaatcccagcactttggaaggccaaggcaggaggatcacgaggtcaggaaatcaagaccatcctggctaacacggtgaaaccctgtctctactaaaaatacaaaaaattagccgggtgtgtggcgggcgcctgtagtgccagctacttggaagactgaggcaggagaatggcgtgaacccgggaggcagagcttgcagtgagccgagatcacaccactgcactcaagcctgggtgacaaagcaagactccgtatcaaaaaaaaaaaaaaaattgtaaagtaaaaataaaccatctatgaaagtgaattctatgaataaaaggaacaagctttagaaagcttgaactttgcaaaatctaatcttgtttcaaatagctcttttttggctttttaaaaactcctggtcaggcatggtggctcacacctgtaatcccagccctttgggaggctgaggtgggcaaaacacctgagctcaggagttggcgaccagcccaggcaacatggcgaaaccctgtctctacaaaaaatacaaaaattagcagagtggctgttacacacctgtagtcccagctactcaggaggctgaggcacgagaatcgtttgagccctggaggcagaggttgcagtgaactgagattgcgccattgcactccagcctgggagacagagcgagacactgtctccaaaaaaaaaaaaaaaaaaaaaaaaattctgacccgtgttgcatgtaggtgaagttgatagattggctaagatttagacaagtaaattgttacaagagtagtgaattatcatacatacttaaaagcaaccatagaaaaatgctactttgtgggaatttttctctgggtatgatattttactcttttacaaaatcagagtggtttttattatgagcaactaattaggaaactaagtttgcattaggtactatttatggacatatgtaccctctagaaccatgtcttatgactgcccactgttcttagttttgttatagtctcctcccctcctctccgtggtccagctacatgctgcatttagctggttccttattttgataaatatttgcagtaaatgtcataaaacattaacaactgacctatgaggcccttctgtgctcaaaaatgctccaactcaaagctccggggcattgcctcaccccacatacccttcctcttaagccctgtagctccacaatcacagtcctgcccacctgagtgctcagagtgtctgtagctggtctgacaggtcagcccgttggctaaacagctcttcctctaacctcgctggaagtggctcagcaaaactacagactgtacgtgttgtccttacgtgttgtccttgaagaacaaaaatgttgggcacggcgttgttgtttcttctgcagcaagttccaaagtatgtaaaacagactgagtgaccatgaagtcatgtgtcccctcagccctattccttatttcacttgtaagagaacattagcaatatttgtactgaccattggttatgtatccaaggacactatactaggggctgatgtgactttgaaaagtacaaggcaagataaggaaggttacgggtatgaggttacagtcttatcacccagatggtttatgatgaaagccatgctgaatgccaatggctgtgagctcactcctgacacacactgtcattttctcttagaatgggacatcagcgctccatgcagcagtgctcagtggaaacattaaaacagttgcgctgctcctagaagcaggggcagacccatccctgagaaacaaggtacccactaagcaatcttttaactcgtttgggcccattgatgtgtcctcctaggccaggaaggataaacatctccctggctccagtcaccatcttcattctttgcatagtaagggcattcaaggttgctgttagtaggtgattagtgagcagtacagttggacccaggaaattctactgttaataaaaaccctgactcatatcaatggtttttttttttcttttttaacaaacccttgtgtcaagggctgactttcaatagatttttgcagcgagggaggtgctctgctatgtacgaaaccctgacccagaagccggtcatttacaaatggtttagcaccaggttccccatggacgtgcgttgtgtgatgggtgagggcgctatcaatggttttctttttttctttgagagggagtctcgctctgtcacccagactggagtgcagtggcgtgatcttggctcactgcaacctccacctcccagcttcaagcaattcttctgcctcagcctcctgagtagctgggattaccggcgcagaccaccatgcccggctaatttttttgtgttttagtagagacggggtttcaccatgttagccaggctggtcttgaactcctgacctcaagtgatccacccacctcggcctcccaaagtgctgggattacacacatgaggcaccacgcccggccagtggttatcaatgaacagtggtgcactctcctggtggaggcgaggaagaaagggagagcagttactatgggagtattgttctgtcatctaagatgtaccctaaaaatgccaaaattctggtagtttatcaccattcccataagttcgatgttcatatcttgaaaattgcttgtgctatatttggttgcttttgtattgttaacaggagtacatgccactgttacaaaacaaacccacttttttctagtcctaaattcttcatttacaattaggccaaacttcgcggtgggtgggtacacaataagaatttttttaaatgattgtcattttacttcctcctcttcaacatctgcttaagctggcacatgtatagattgcagcagaggagagtagcctaggaaaggtcttgagagaatgcatgcgccaggcgcaaaggcccactcctgtaaacccagcactttgggaggctgaggcaggtagattgcttgagcccaggagttcaagaccagcctgggcaacatggcgaagcctgtctccacaaaaaatacaaaaattagccaggtgtggtggtgtgcacctgtagtcccaactactgaggaggctgaggtgggaggattacctgaacccagccaaggaggtcaagggtgcagtgagccatggtcacgccactgcaatccaccctgaacgacggagtagagagaaaatgcactaaactacaacctttatttacttatttattatttatttaaatgtaaatttttttctttttatagagatgtgttcttgctgtgttgcccaggctggtcttgaactcctggtctcaagcaatcctcccaccttggcctaccaaagtgctggtattataggcataagccaccacacctggcctaaactacaaacttttctgttgctattgttgtttttgagacagagtctcactctgttgacaggctggagtgcagtggcacgatctcagctcactgcaacctccacctcccaggttcaagcaattctcctgcctcagcctgcccaatagctggaactacaggtgtgcaccatcatgcccagctaatttttttgtatttttagtagagacagggttttgccacgttgaccaggatggtctccatctcttgaccttgtgatccgcccccctcggcctcccaaagtgctgggattacaggcgtgagccactgcgcccagccataaactacaaacttttggaggagaaagtggtattggtgtttacgaatagaggaggatatgaaaagcaacttttactttatacttaacatactctgaatttttctaagcatatcttactgtgttaaatttttttttaataataaaaacaaaaacatataacatttcatgacattttgaaaagaaaccttaagaagtgccagttaaacaacatgccaggggtcacttttttcatttgactcagcatgtagaagtattacttccccattcccattgaattgcttgtctataacatttctgcttatctctccttagatacttggatttgttttccattagctggcctggctgtgtgataagccagttgaaatcacaattgcctttctttagatcttatctttagaccttgtgcacagacttcctaaagagaccagtctttgttggtgagctatccagtcctgaattaaggcaaggaggaaacattaatacctttacataggaactgaaaaatgcaattccttgtgtgtctcctagaataatggaataactaccaacaataatggttatgagtaatttcaagtgggcaaaatgctggactttggaccctcctgaatccaagcaagtgtaaccgcccaatgggttcaccttgcctgctgcctagacagaaccgatgtatcaggacaggggacttgcagtggagaaagagtaattcacgcagagccagctgtgcgggagataggagttttattattactcaaatcagtatctccgagcatttggggatcagagtttttaaagataatttggcggataggggcttgggaagtagggagtgctgattggtcagattggagatggaatcatagggggtcaaagttaggttttcttaatgttttctgtttctaggtgcgatggcagaactgattgggccagattactggtctgggtggtgtcgctgatccatcaagtgcaaggtctgcaaaatatttcaagcactaatcttaggtcttacaatagtgatgttacccccggagcaaatcggggcagttcaaactcttcgagccagaagctgcatgacccctaaattgaatttttttttttttgaaacagaatttctctcttgttgcccaagctggagtgcaatggtgcgatctcagctcactgcaacctccgcctcccaggttcaaacgattctcctgcctcagccttccgagtagctgggattacaggggcatgccaggctaattttttgtacttttagtagaaacagggtttcaccaactttcactttgagaaacagggtttcccaaagtgctgggattacaggcgtgagccaccgcgcccggccctaaattgtaatttctaatcttgtagctaatttgttagtcctacaaaggcagactggtccccaggcaagaagggggtcttttcgggaaagggctgttatcaattttgtttcagagtcaaaccatgagctgaattccttcccaaagttagtctgacctatgcccagcaatgaacaagcacagcttaaaggttagaagcaagatggagttggttaggtctgatttctttcactgtcttaatttcctcagttataattttgcaaaggcggtttcacagggaggaaatattagtacctgtatatagaaactgaaaaatgcaattccttgtgcatctcctagaataatggaataatcaccagcaataatggttataagtattttccagtgggcagaatgctagactttggaccctcccttaaaaatgacttgaaaacatgtgtgggcactcctgttggaccttcatactgcagaagccctcagacacctgggaggagccgccagggaagtccccagcttcctaccagccactccatagaagccagtcttgctaatagcagctccataggcaagggtgttgggattcctgcagaaggagcattcttggctttcattctttcattcaacaaacactagataccatgcactgtgctatgtgctgggaatgccatagtgaataagattcacagttgctgctttcatgaagctcagagtttagtggggaataaagacaattaaagcaattgcaatatggagtgacagctgtaagcaggggagtaaagaatggtttggaggcttccaggagaaagtgacttctcagctagtacagaacactcttctgctccaggagttccaagacttctgctctggggcttcgagacagatgcctgaggagaaggccaaccagtggccccaacagccattcctcacactatagccattcctcagactgtagccatacccctgggtgcaggggtcttatgttcccaacacccttgactgagcacatcttctcccaggagcagtggggagatttagtggtttaatactgtagtatcatgaatatgggcctatgctcctgctccataatgaacgagatagcctttaggggctagcctggggcactcgccatcacatcaatctgtacaatctcagcaacctgagaatctagtggggactaacggggagggaagagcaattaaaccaggattttagaacagcatggaagacagaatggtgatgtgaatgaccaaaacttgacaacatgatttgaaagtataaagctttttttaatagcagaggatatggacattcatggagatggtcacacaaggcaacacgctggcaggctggtagacagaggtagagcttcttaagctcccttctccttgactgtagaggttcctctaactacctgccagtctgcttaccatggaccagccactgatgtagacagctcagttattcctgagtgtttgctctgagactggatgaagcttaggtctgtttaccaggagcatttctctgcaggcccaggtgttaggcctgtacaatatctgttcctgcaggaactaagctaacagaacttgaccccatagaggagcctctggtctgtagtagcatagcataataatttcctctgtgattgaatccagcatcggcatccagggtcccatgtggtgagaaggggtgcagccacaggacatgctgcacagcagaccacttgtgacaaacttacaattcctaacaagtgaggttccagccagcagatagaggtcagggggcaggatccagctagaagatggggactgcagaagtttcacctaggatcaagtttccagataaagcaactggggttccaggcttggctgctggagaagaaaatatggtgagacaggtaacatctacaaccaagcctccatccccgatactgcctgccgctttaccctttaatggcctcccctgaaattcccagaacatccttctttctttttagagacagagtctctgtcacccaggctggagtgcagtgttgccatcatagctaactgtaaccttgaactcctgtgcttaagtgatactcctgcctcagcctcctgagtagctgaactataggcatgagccaccatgcctggccacaagaaagtccttctgattcctctatacaaacatttctcaaagtgggatccttggacccctgaagatcttcatgacccatacagggggtctaagaagtcaaaacaaggttgggtgtagtggctcatgcctgtaatcccagcactttgggaggcagaggtgggaggatcacttgagcctggaagttcaagaccaacctgggcaatatagcaagaccccctctctacaaaagaaataaaaatctatttacaattttaaaaaagaattcaaaaccatattcttgataataaaaagatgttagccagttgaggtagttcatgcctgtaatcccagcagtatggaaggttgaggcagcaggatcgcttgaagccaaaagttcaagaccagcatgggccatacagcaagacctcatctctttaagaaattaaaaaacaaaaaacatagctgggcatggtggtgtgtgcctgtagtcctaactactagggtggctgaggtggaaagatcacttgaacccaggagttcaaggctgcagtgagctacatgattgtgccactgcactccagccttagcaacagagagaaaacctgtcccctataaaagcaaacaagatcttatctgcctttttcactgtgctgacatttgctctaatggtacaaaagcaaaagcaatggtgggtgaaactgttggggccttagtacacctcaaagcaggaacactaaactgtactggcaaaatattttacaagcctttgtaaattattttacaaattttgtaaattactctacaaaaataccagttgtacttaagaatgtctctgatgaagcagtaaaaatatgtcaattttattaaattttggctcttcctatacatctttttaaaattttgtgtaattggctgggtgcggtggctcatgcctgtaatctcagcactttgggaggccgaggcaggtggatcatgtgaggtcaggagttcgagactagcctggccaacatggtgaaaccccgtctctactaaaaatacaaaaattagccaggcatggtcgcgcatgcctgtaatcccagctactcagggggttgaggcaggagaattgcttgaacccgggaggcggaggttgcagtgagccgagacctcaccactgcactccagcctgggtgacggagcgagactctgtctcaaaaaataatgacaataataataataataaaattctgtgtgatggcggggcaaagtggccaacacctataatctcagcacttcaggaggcctaggtgggaagactgcttgaggccaggagtttaagaccagcctgggcaacatagcaagaccctatctctccagaaaaaaaataagccagggatagtggcacacacctgtagtcccagcttgagcccagagagtttgaggctgtcatgagctatgattgcaccactgcatgccagcctgggtgacacagtgagaccatctgtctaaaaaaataaataaataaaacagaattctgggccgggcatggtggctaacacctgtaatcccagcactttgggaggttaaggcgagtggatcacctgaggtcaggagttcaaaagcagcctgtccaacatggcgaaaccccatctctactaaaaatataaaaattagccaggcacagtggtgggcgcctgtaatcccaactactcaggaggctgaagcaggagaatcacttgaacccgggagacagaggctgtagtgagcagagattgtgccattgcactccagcctgggcgacagaataagactctgtttcaaaataaataaataaaataaaataaaattctgtgtgatgaaatggaaaacatgcctacagcacttctgctgtgtactgaagtatgatgattatctcaagaaaaagcacctggccaggaacggtggctcacgcctgtaattccagcactttgggaggctgaggcaggtggatcatgaggtcaagaaatcgagaccatcctggccaacatggtgaaaccccatctctactacaaatacaaaaattagccaggtgtggtggcacgttcctgtagtcccagctactcgggaggctgaggcaggagaatcgcttgaaccggggaggcggaggttgcagtgagctgagattgcgccactgcagtccagcatggcaacagattgagactccatctcaaaaggaaaaaaaaaagcacctgttgggcggtgagcaggcaaaactgcccccaaaagtctgaagaagctgagaagccaagaaagaagctgacatccagatgatctcagcagaaaagaagaaaaaaataaaaacaggctgacatatccagtttctcagaaagtaacagggacaggagtcatagtctcaggacaccaccccccagacccagggcctaagggaaggaatatacaggacaagtgaagtcaacctctcagggaaaggcaagaacactacgtgactgcctaagggcaggacttatgggcaaggtcgttttgacctatggtcaggattttcagtaggaaacacaaaaaagtagataaaataggaatcttagaggcattcccaaaactagggttaatcacatggcagcctgagtgcggtggctcacacctgtaatcccagcagtttgggaggccgaggcaggcgcatcacttgaggtcaggagttcgagaccagcctggccaacacgatgaaacctcatctctactaaaatacaaaaattagctgggcatggtggtgtgcacctataatcccagctactggggaggctgaggcaggagaatcacttgaactcgggaggtagaggttgcagtgagccgagatggcaccactgcactccagcctgggcaacagagtgagactccgtcttaaaaaaaaaaaaaagaagtaaacatggcagattagcatccaagatggagttgcattagcctccacagtccctgtgcagttgtttgaattgcaaagtgaacctgccacttttttcatagatcactatttttacttgaaagaacaaggtatctaccactatgaccttaacagcttcccaaaacttaaaggcttttctgatggatcagtttttttgtttgtttgtttgtgagatggagtctctctcactatcactcaggctggagtgcagtggcgtgatctcagctcactgcaacctccgcctcccaggttcaagggattctcctgcctcagcctcctgagtagctgggattacaggcatgtgccaccacgcccagctaatttttgtatttttagtggagacaggtttttgccatattggccaggctggtcttaaacttgtgacctcaggtgatccacttgccttggcctcccaaagtgctgggattacaggcgtgagccaccacgcccagccagaatgtgagtttttgatattgcacaatgaaatgtgccaacattctacaaactcagtgaactgatattttccaaatgagcagtgcatgttacaaaccatgcataggtaaaagatccaactataaatagataaacctgtgggttttaaagttcattggtatggtttcaaatcccacattgcatttaacctttaagaaactaccatttgttgagtattgatgtggcatcagagaataatatccacagcaatccaaaaagactgttaaaatactccttccttttccagctacatatctgtgtgaagcttaattttctttatatccttctaccaaaacagcatatcacaatagacaggatacagatggagatatgagaatccaattgtattctgttaagctacacatgaaagaaatatgtaaagctgttgagcagtgctactcttctgagaatttttacttgtttttgaaaatttaatttttcataactatattaacttggatttattatttttagtgaattaataaatatatttttaaaattttctcagttttaatttcttttttttttctttttgaaaatattttctttctaaataatagagatgaggtttcactatgttgcccaggctggtctccaactcctgagctcaagtggtcctctcacctcagcctctcaaagtgctagcattacaggtgtgagccactgcgcatagccctcagctttcatttttaataagttaaaaacaaaatttgttagactcttcagtaatttttgagagtataaagggtcctgaaaccaacaggtttgagagccacttccacatcacacctgttgtcaatggtagggactggttcactagatgcctaatggatgtatctcagcagcaatgtgaaaagaaaggccttcgagtgatactgagtaaggtggaaggtgttagccaccaatgctcttctttcccgggtgtctcttatgctctggaggtttcctatctctgccttctcatcaaaagatatctggcccgggcgcggtggctcacacctgtaatcccagcaccttgggaggcggaggcgggcggatcacttgaggtcaggagttcaagaccagcctggctaaatggcgaaaccccatctctactaaaaatacaaaattcagccgagcatggtggcacatgcctgtagtcccagccactcgggaggctgaggcaggagaattgcttgaacccaggaggcagagattgcagtgagccgaggtcacaccactgcactccagcctgggtgacaaagtgagactccatctcaaaaaacaaaaaaaaagacacctgtgctgagtcctgactcagtcccaagtccttagtgggcagactacctcatgtcatacattaataaatataaggtaggctgggcacggtggctgatgcctgtaatcccaacactttggaagctgaggcagaaggatcacttaaaccgaggagttcaagaccagctggggcaacatggcaaaccccatctctggaaattagccgagcatagtggtgcacatctgtggtcccagctactcgggaggctgaggtgggaggatcatttgagctggggaggtcaacgctgcagtgagccatgattgcaacactgcactccagcctgggtgacagagcaagaccctgtctcaaaaaataataataataaaatacatataaggtataacatttaatttgaccggtacttattgagcacattttagacatgctgggcattgtgctggagataaggatacaatgattaattagatctggacccttccccctaagagattacagtctagtaagggatctggctggaaaatgtctctaagaatgagataaggatataacaagtaatatttatacatttaaagaagatttgtaatacctttatataaaagagtgagtccagtgtggatttttttcattagtgaaggagaaagagtgggtcaaatgcccctctttggagtccctaaaaccacaccagctatggggattcactaatgcccatcttctcttctttcaggccaatgaacttccggcagaactaaccaaaaatgaacgtatattgcgtctcctgagaagtaaagaaggtcccagaaagagctaacttagctccatatttgacagaaagatagaaagcttaaccacattgtccaaaaagaaattgcatttcaagcagtgttggaaattcttttatgaaaaaaaaagatgcccagaatgcccatcctgtgggtccctgacaaagaagagctacgctctgtgcacgaagtcaagaaccaaacagctcagggaccctcttgccccttcaccatggacttctcatggtgtcctgtaactcatctcccggggggcctggcatgttcacagattccacagaaactcattttcaacaatgctaacttggacctgtcagttaaactctaaggtggacagggttctcagtactaagcaaggagacagaatgctttgttcctttaaaagactgaaaagctgaccttcaatggattgaggcacttttgcttttgtgttaaatgtagatgtgctaaaatatatagatctatcatattttacctacatatgtatgtcattccagtataaaacattctcctctacccaagaaccatagccatgattgttataaatcaatgaagtgtaaacatacattattaaaaaaccacttctgacattccattatgtgctattcaaagatggactattgaactatagaaaagacagactgtgcatttgttcgttgatcctcatcttattcctgacatgtaaaaatcaattttacgtagagtcaacattgtaggtaggttaaaataccagtggcaaatttggaaattcagaaacttataaaccacgagaaatatataggcttgtctctttggtcttttattttggctctattgttgggaatctatttcctattctataagtaagtatacctaacatgctgtggaatcttgagtttccaacaccgtgctgcttgatagaatgactttgaggtccttggataaaatgtgatatatgcaagtacagtatgttgctattactattgcaggaatataaataataaaagactgttattagcacttagtaagtcttcatctatgcatgtttttgagttgactgattccaagaatgaaatatgaggtttattgaattattcctttgaaagggatcaaaacttatattcaatgcactttataattaatggtgtctaaatgcctcagtcagtgcctaactgcacatacaaaaataaaaccttctttctgtaatctaccaaaataaacgcaatggtatttctgctatttaaacac

SEQ ID NO: 15392 - DNA, 63986 bp, Homo sapiens; identical to SEQ ID NO: 1133

SEQ ID NO: 15393 - DNA, 37761 bp, Homo sapiens
acttccggggcgggtgccgggggcggtgccccggcgagggagcgtggcggcgagctgtttggggggggttggcgacggcagcccgagggcggcgcaaggcctgaggcccagcacaggtgggttccgcggcggcccggccccagcacttgccggcacctgcagcccgcctagacccggcgctcgggcgtcccgcgctgcacttgctcgccgcgtgactggaggaccgagcccccacattttctttatgtggttgtggtgggggcacagtaatgccctgtgcgccgtagcgttcctgtggggatgtggccggggggcgtcgggaagcgtcactgctgtgagttacgggtttgtcggccagggacccgccccggggccagtgagctacctttgcgatgcggttccacggggcgagagggggtgcctgggtgctttcacagacctcctctgtgggcgtgacagttaccaccagcatcacatttgttaagatttttaaaaattttttaatttttgtgggtacgtagtaggtgtatatatttatggcgtatatgagagattttgatacaggcatgcagttcgtaataatcacatgtaaaatgggggtctccatcccttcaagcatttatcctttgtgttacaaacaatatgattatactctttgaattatttttaaatgtgcagccgggcgcggtggctcactcacgcctgtaatcctagcactttgggaggcaaaggcgggcggatcacctgaagtcaaggatttgagaccagcctggccaacatggggacacttcgtctctactaaacatacgaaaactaggctggcatggtggctcatacctgtaatctcagctactcgggaagctgaggcaggagaatcgcttgaacccaggaggcggaggttgcattgagccgagatcacgccgctgcactctagcctgggtaacagagtgagattatgtctcaaaaaaaataataataaataaataaaatgtgcaattagattatattgactatagtcaccctgttgtgcggtcaaatactagatctttttttttttttttttttttttgagacggagtctcgctttgtcgcccaggctggagtgcagtggcttgatcaaatactagatcttattcattctgttttttttgtatccattaagcatccccaccctccactacccttcccagccttggttacactagaagtaaccatccttctactttctatgtccatgagttcagttgttttgatttttagataaccacaaataattgagaacatgcaatatttatctttctgtgcctggcttatttcactaaacataacgatctccgcttccatccatgtttttgcaaatgataggatctcattctttttttatggctgaatagtactccattgtgtctaagtaccacattttctttaggattcactgtaaaggtaacagatacttagcattttcagaatggacagaaccaaaaagttgaatgaaaactaaaacgtcttatctctaatgctactttacaccacaccactcgggatgggacattttagttttcactttagtgttttttttttgtttttttttttgagacagaatttcgctctgttgcccaggctggagtgcagtggcttgagctcggctcactgcaatcgcctcccaggctcaagcgattctcttgcctcagcctcctgagtactgagactacaggcgcccaccaccacacccagctaatttttgtaattttagtaaagatgggagttcaccattttggccagggtggtctcgaactcctggcctcaagtggtccgtcacgcttggtctggttctcattgtccttcagacctctggggatgtcagatatgcaagtctccagtaaatagagaacacggcctcaccctgcaggaggcctttggcgtggaagagacatgcccagtgaaggcttgagggaggtatggaagggactctgaactgaccctcagctcgtttggtttcttatccaggcttcgttggccagggctgttagggtgggattctcacctgcaaagtgagggaagggcactgcacgatcttgggctctgctagctgaagaggtggtggctccaggaaggagggctttgcttgccccaccgcacctacacacactcttcaccaagggtctgtgaagtgttcgtctcccacattggtggcttgtttctttagccatcttggctgtcacctggggcttggaagcattctttaatagaaactgaggtcctcatcgcatctattaactaccatagcacctgtaggtcatcacaacctgacaaggcctttgttttcgcctttgctccctttcctacccttgtttcctggcactcttgtacctaaggattctactaggaagctgatgaccttgccttgatttggggattcctggtgtgccgttacccatgtaggcccatctcggggaaagtgttacctcaccagttcaccggcctgttatatttccccccatagctctctcttcaaaggatgcctaagtggattcctattcagttgacggttgctgcgtgccaccagtcacatcctggtttgtctgttggggaattgctttctatttttttcagaaaaatttatttttacttttttgaaattttcaatttcataaccattccagaaaaattaatttatatttaaaatttacaggccaggtgcagtggctcacgcctatatttccaggactttgagaggctgaggcgggcggatcacctgaggtgaggagttcgagaccagcctggccaacatggtgaaacccccgtctctactaaaaatacaaaaattagcctaacatgatggcgcacacctgtaatctcagctattcaggtggctgaggctcaagaagcccttaaacccaggaggcagaggttccagtgagctgaaatcatgccactgcactccagcctgggcaacagagcgagactgtctcaaaaaaataaataaaatttacatacagtaaaattcattttggtgttcagttctgtggtttcataaaggcatggagtcacagatccaccgtcacagtcatacaggtctatcgtcccccaaattccctctctgccccaacctccaaccctttaattttgccttttccagaatgtcatgtaagtgaaattatactgtaggcaggcttcttccatttagcgtaaatcatttgaaattcattcacgtgttgcatgtcaactgttggatccttgtgtttaatgctgagtagcatccattatatggatgtgccaccgtttgtttatccattcttttatgtatcataatagcagcctttttagatatgtccccgttagacagtgaggcactagggattggagttgctaagtagcagagctgcttttttgttgttttttttttttgttttgtttttggagacaaagtcttgctctgtttcccaggctggagtgcaatggcgtgatcttggctcaccgcaacctccgcctcctcagttcaagtgatgctcctacctcagcctcccgagtagctggccttcatgcccagctaatttttgtatttttagtagagacaggatttcaccatgttggccaggctggtcttgaactcttgacctcaagtgatctgcccaccttggcctcccaaagtgctgggattacaggtgtgagccaccgcaccgggtccaagctgaattttgatcaaaccccaaatccagggttcttccccaccacatcaaggaactgattgggttaaacaacccaattagcatttcttcactgcccatccaagaggttgtcaggttcctagagttggtggagaattctcttttacctggtgcctgcggttggaaggaggagcaggtactccacagttaatgcctcaccatatgtgctcctctttactggtgtgatagcaggctcaccagatttagcatggttgggactgcccaaagcatacattatttcagcaaataaatttgtctgagttactcccggggttgactgcactgggttatcagtctgctagtgcagtggtgtagcaggggcaggaccagcctgtttcatgccctggaacaaccagccaggaaagatctaacccttgggccttcctcctcagtgatgtccgagctcagcgatgaagccagcgagccggaactcctgaaccgcagcttgtccatgtggcacgggctcgggacacaggtcagcggggaggagctggatgtccccctggatcttcacacagctgcttccattggccagtatgaagtggtgaaggagtgtgtgcagcggtaagagatctcggggaacttcctctcacattttgagcagcgcagtgatggcttcgatcccacgtgatggggctttgcacacagttgtggatgtttaatgcgtgtagaataggttaacctgcttatctcaggcagctgtcagtaagtattgatgctgagccctgacaaagaggccgtttttattcctaggaagaaaaagagggagtaaactttgatcagaagcttataaacagtcattctttaaccagactaattttattcactaattgcagaaatgcccaaacaaacaagcaaaataaaaataaagacagaaagtgatggcctggtgcggtggctcacacttgtaattccagcactttgggaggctgagatgggcgggtcacttgaggtcaggagtttgagaccattctggataacatgatgaaaccccatctctactaaaaatataaaagttagctgggtgtggtggcatgtacctgtaatcccagctactcaggaggctgaggcaggagaatcgcttgaacccgggaggtggaggttacagtgagctgagattgcgccactgcactctagcctgggcaacagagtgagactctgtctcaaaaacaaaaaaaagaaaaaagaaagtgatccctggccttcttttcccggagggttcattcgatccctgtgatccctgttcccctctagcttctgccatggaggaggagagaggctgggctttcagtgcctctggggaatgacctcccgacgtcactgcccacctgccctttgctaatctgtgtacaatagttagagacaatataaagcccctggcagggtccatggctgcgtcttgcccatagtaggatgtgatcatcttgtttttggaaaagggtcgtctcctcacttccacccccttatgttccacacacagcctaactctgtctcctggttctcatttgatattgtggtgcagcgacctctcttcctctctctgcgtgcctcttccagttcccagtgagccaaagcaaagcattgctgaagccccaggtctccggttcccaagttgtggccctcacttagacatacccagcccatggagtgctggtgcaccttggtacagggtggtctgttgcgctccctccacaggaggctctaggcataggcagctgggtatgcagtcagtacggcccctcaaagggtcacgtttggaattctcaggctcttaagtctttgggtgtcctgttaagatgcagagtccataaccgctccatagaggagcagggggaggcgtttgtgttgtgatgggattttgacactagctgaggtggaggcttgctgatagtaagcacaggatggggcctgaggggagctgggggcatcagaaggaaggggtggggctgaacgaggagtggtaagagagccccagggagatgctctgctgttgtgtaaaggaagatagtgttaggacgagctgggtgcattcgagccctgctgcagaggcatctccatgcagcccccctggccaggggctgccactgaaccctggtatcaggaccttctggaatggctgcccaggtgtgcatcccagagtcactgagggctgccaggcaatggaaggtagttgcctgctgtggtctaatatgtgaatcccggctgggcgcggtggctcacgcctgtaatccagcactttgggaggctaaggcgggtggatcacgaggtcaggagatcgagaccatcctggctaacacggtgaaaccccatctctactaaaaatacaaaaaactagctgggcgtagtggcgggcgcctgtagtcccagctacttgggaggctgaggcaggagaatggcgtgaacttgggaggcggagcttgcagtgagccgagatcgcgccactgcactccagcctgggcgacagagcgagactctgtctcaaaaaaacaacaaaaaagtgaatcccgtaaaagggacagatcctggggttcagtcaccagttgttatcccctctgcaggcaagaactggggaagggaaagaaggcctgtgggcgttaaccatgtaggatcccaggtaaccatgcaagtgggtattattttaaatgtgactcccttgtcccaaccccagagtcgcagctaggaagcccacagttttttcccatgggaaaatgcattgccagaattttaacagcaatcagtgagaaagatgggattctttggtcacagatttttcaagaatgtttctttaaggtgaggtgacaaaggatgaatcagtggcggtgggacttgtccacggtggagtcccttctttcctcactgctcctctccacccagcagtgggctagtagatgccaggcctgtggtggtcagggtttttcaactgtggctgtgttgacaatccaggctggatcattctttgctgtgggggctgtcctggacactgtgggatgtttagcggcagccttggcctccagcagcccttccctgcccagttgtgagaaccaaaaatgccttcacacattgccacatattccctggttgagtgccatctgcctatctggtggtgtgaaagagcatagctggccttgggctaggaggatgcgaaatcagagcaaggagacgaaggctcagggcctcacaaggcagtgtacgagcaactgtcagcatttttctgcctgcctgcctccaatccccacaacgtccagggtggcagataacttctgcttcctgtcaactcatcccgcctggcctagcctcgccaccagctttggtgaaccccacatgcgaggcggctggccatgtctagcatatcttgcgtttgtttaggagagagttagatttgaataagaagaatggtggtggctggaccccgctgatgtatgcctcctacattggccacgacacaatcgtgcacctgctgcttgaggcgggggtgagtgtgaatgtgccgaccccagaagggcagactccactgatgctggcctccagctgtggcaacgagagcatcgcctactttcttctccaggtgagctacgagggaactcaggcccagaaacctgaggggctccgtggccaccctgacagagatgcgaaccactgcaggccacggtgttcgtgtgtgctcgtgtaatcacttctgattcttgcagcatggccgcctggagggcgcccgccccacgcagaggagatgaggccgtaacgcacgttctgtgttctcttgaagcaaggtgcagagctagaaatgaaagacatccagggctggacagccctcttccactgtaccagcgccgggcaccagcacatggtcaggttcctcttggacagtggagccaatgccaacgtgaggtgattgccacatctttagtggccacaggagtggcctaggtgtcatctgactctaaggagggtggctctggaggcagctaaccagagtttagggccaccctgcttcggcacgagaggctcaagatgaggggtaggaccagagtccttccaggcacaggccttttcgtacatctgtgagatgcatctcttcaagccctctcagcttccttttctttatctgaaacccacctgggtcatacagttgtaagaattacatgttttattgtatgccaggggcctaacatactgaatggcatttaaatgtcatacattacatgcaaattccttccattttcttgctttttgtatggatgaggtgaggtgatgctttgaaacagtcatgaggccgggcgtggtggctcacgcctgtgatcccagctctttgggaggccgaggtaggcagatcacgaggtcaggagatcgagaccatcctggctaacatggtgaaaccccatctctactaaaaatacgaaaaaattagctgggcatggtgacgggcgcctgtagtcccagctactcgggaggctgaggcaagagaatggtgtgaacccgggaggtggagcttgcagtgagccgagattgcaccactgcactccagcctgggtgacagagcaagactccatctcaaaaaaaaaaaaacaaaaacaacagtcatgagttttggccgggctcagtggctcacacctgtaatcctagcactctgggaggccaaggcgggcagatcatgaggtcaggagttcgagaccagtctggccaacatggtgaaaccccgtctctactaaaaatacaaaaattagctgggcgtggtggcaggtgcctgtaatcccagctactcgggagtctgaggcgggagaatcacttgaaaccagaaggcagaggttgcagtgaactgagagatcgtgccactgcactccagcctgagcaacaagagcaaaactctgtctcaaaaacaaacaaaaaaccagtcatgagttttataagttggaagtgggattgttgtctaaagcttgtcatgataataatcacctttgaacaaacgcagcgggtaccaatgcagcacccaccctggctgtcattcattctaagacacctgataattttgtatgccactaagaaagaaaaaatatgctactaattaacattcaactcgcctgttgatttaaagatgttttctgacttgagagatgttaaaatatgaacactgtgtgtcttaagatggatgaaaaccagcatttcccatgcatggttcctgacttccaaaccagcatgagacaaggagggatttggaagccctctgaagacagtgccgagttagcataaccaagcatgaaaagcaagcttcaggagctaagcgtggcaaagatagcttagatcattagtacttgaacttttcagagtgggttcatggaggacgttgaacttgaagccaggatttggatgaatggatgggagatgctggctttctgtgaggaattagaacagctttttgaatatgattgaggtggagatttcagaggtagccagtgggaatagccaacaggtgggacgacaggcagacatctgtctttaggacaaagaccagccctggggacagacaccagaagagtaaatggagctgatgtgttatattcactgttctcatgtcacctgttaattctggaaagggacagtgttctacgcttagggatcggtgactcgtgcactgctcagggtttatcttcagcagggagtttttgcctggcggaacttgtctcttccaatcatctgactgtggcccacatcttgcagggagccgatatgtggatttactcccttgatggaagcagctgctgctggccatgagataatcgtgcagtattttctgaatcacgtaagtgaccctgattattagcatgtaatgtagtcacggcaaatgaggaatcatattactgaagtataagctattacagaattttcctttgcacagaaataactttcattcatttattcaacacattttcattatctattgacgcccggtgttgagtggtgcttaggcattaaggatacagtggtgagtagaaatagacacctattcctgtaataattttgaaaatactatctgaaaattatggaaaaatattttaaaagtaaatagcactcataatcctgtcacttagaaaaattatatagaataagaaggcagagatcctcctctctttttcaacctccctgatgcccacttggtttgagaaagagctgccctaggacttttcctctgctgtggaaagatgtgtctgtaggcaagtgtgtgcacattgctttgtgttttgaacaaagtgggattctacgtatagtctgtaacttagagacatcttatagacatcttatctttgtacagtattccgtgtacaatctgcctcagttaatttaatgagtttcttattagtagaaacttagtttttaacattttgcaattataaacagtgttccgggaatatccttttacacatagctttaatacatttgcagttatttctgtatgttgtatttctgttttattttattaatttatttttttgagacatggtgttgccctgtatcccaggctggagttcagtggcgagatcgtggctcactgcagcttcagcctcctgggctcaagcgatcctcctgcctcagcccccaagtagctgggactacaggtgcatgctaccatgccccggctaattatttaattttttttttttggtagagttgggggtctcagtatgttgtgcaggctagtcttgaattcctgagctcaagcgatcacctcagcctcccaaagtgctgggatcacaggtgcaagcctgtccacacagaaccttgtacataaatattcatagcagtattattcataattgccaaaaagtagaaaaacccacaagtccatctactgaggaattgataaacaaaatatatatctgtatagcaggatattattcggccctacaaagtaatgcagtactgctgcatgctgcggcaggggtgaaccctgatgcgttaggctgggctgggtgcggtggcgcacgccggtaatcccaacactttgggaggctgaggccagagggtcgcttcagccctggagttggaggttgcagtgagctatgattgcgccgccacactccattctgggtcacagagtggatcctgcctcaaaaagaaaaagaaaaggaaaacattcggctcagtgaaagaagccagacacaacaggccacacactaggtgatttcactcataggaaatgtccagaataagcaaatacatagacagaaaatagatgagtggtttcctgggtcttggggaatgggaagattggggtgataaaaatgtgctaaaattgtttgtggtgatggttgaacaactgtgaatatacgagaagccgttgaattgtacattgtaagtgggtgacttgttggtatgtggattatatctttataaggctgttaaacccaatggggggaagtgcaggcggtcctgatgaattcccactaccaaggttgtctgttgtcctgcccaccagtcatagacaaaggtgtccattttctcttgtcctcaccagtcctgatgtcagtcaaccttttgtcaatctggcgggtgaattgtagcgtctcattttagtttgtccttgttagagtagttgaaatttttttctttttttttttttttggagacagaagtcttgtgctgtgtcgcccaggctggaaggctggagtgcagtggcgtgatctcggctcactgcaacctctacctcccaagttcaagcagttcttctgcctcagcctcccgagtagctgggactgcaggcacccgcccgcacacctggctaattttttgtattttagtagagatgaggtttcaccatgttgcccaggctgctcttgaactcctgaactcaggcaatccacccaccttagcctcccaaagtgctaggattacaggcataagccactgcgcccagccagttgaacatttttaaattgatttcttagccatttgtatttcttttttttttttttttttgagactgagtctcactcagtcgcccaggctggagtacagtggcatgatctcagctcactgcaacctccacctcccaggtttaagagattgtcctgcctcagcctcccgagtagctgggactaaaaatacaaaaaatcccggctaattttttgtatttttagtagagacaaggtttcaccgtgttagccaggatggtctcgatctcctgacctcatgatctgcccgccctggcctcccaaagtgctgggattacaggtgtgagccactgtgcccggctggccatttgtatttctcttacgagctgtctatgtttattgcccaattttctattggatagtttgtttttttctcacttattggtgggaatttcttaaatagtgaaaaattcacatggtatctctttttaacaaagaattttgggacacaacatgcacatggtacacatgcagaccagaaggtgggtgcaccgcaggcctgtcccccaccctgcctgcgtctccttggcaccctccccacgggcgactctgggaatacacccacacatgctcatggtcctgccccatgtgcagctgctcccatcttgcattttttaaaaaacttaatcatgaagatttttctatattggtgtataaagagacggggccaggtgcattgtctcgctcctgtaatcccagcactttgagaggccaaggcagacagatcacttgaggtcaggagtttgagaccagcttggccaaggtggtgaaacccgcctctaccaaaaatacaaaaatacaaaatacaggtggctgacgctgtaatcccagctacttgggaggctgagacaggagaatcacttgaacctgggaggcagaggttgcgatgagccaagatgttgccactgcactccagcctgggtgacagagtgagactatctctaaataaataaataaataaataaataaataaatcaataaatcaataaagagatggggtcttgctctgtccctcaggctggagtggagtggtgcagtctcagctcactgcagccttgacctcctggtctcaagtgatcctcctgcctcagcctcccaagtagctgggattacaggtgcgtgccaccacgcccagccaatttttgtattttttttgtagagatggggttttgccacgttgcccaggctggtcttgaactcctgagctcaggcagttcgcctgcctcggtctcccaaagtgctgggattacaggcacgagccaacgcacccagcccctctcttttttttttttttttgagatggcgtcttgctctgttgcccaggctagagtgcagtggcacgatctcggctcactgcaacctcagacttccgggttcacaccattctcctgcctcagcctcccgagtagctgggaccacaggcgcccgccaccatgcccagctaatttttcatatttttagtagagacggggtttcaccgcgttagccaggatggtctcgatctcctgacctcgtgatccgcccaccttggcctcccaaagtgctgggattacaggcgtgagccaccgtgcctggcctctcttttttttttttttttttatggtggcatggtattccctgtagggatgaatcagagtttttttgtttgtttgtttgtttgttttgagatggagtctcgctctgtagccctggctggagtgcagtggcgcaatctcggctcattgcaacctctgcctcccaggttcaagcgattctcctgcctcagcctcctgagtagctgggattacaggcgtgtgccaccacgcccagctaattttgtatttttagtagacagggtttcggcatgttggtcaggatggtcttgaactcctgacctcaagtgatctaccactttggcctcccaaagtgctgagattacaggcatgagccactgcgcctggcctaccgttgacatttcttacacgtctttttaagcacatatgggaatttcttcaggagcttaggatgtgttcttcaaagtagagtctttgttgtgtgaggtgggttcagtcggtagtgggtagtgtaaacttgctttgttccatagtggtcctggttcacacccctccccttagggtgttagacttcttttttttttttgagatggagtctctctctgtcacccaggctggagtgcagtggcgcgatctcggctcactgcaacctctgcctcccaggttcaagcgattttcctgcctcagcctcccgagtagctgggactgtaggcactcgccaccatgcccagctaatttttgtatttttagtagagacagggtttcaccatgttggccaggatggtctcaatctcttgaccttgtgacccgcccgccttggtcttccaaagtgctgggattacaggcgtgagccaccgtgcctggccttttttttttttttttttttggggtggggtcttgctctgtccccaaggctggagtacagtggtgtgatctcagctcagtgcaacttctgactcccaggctcaagcaattcgcctggctcagcctcccgagtagctgggattccaggtgtgtgccaccatatccagctaatttttgtatttttagtggagacagggtttcaccatgttggccaggctggtctcgaactcctgacctcatgatctgtctgcctcagcctcccaaagtgctgggattacaggcgtgagccactgtgcctggccaggatgttagactttttggctccctggccatttgggtttctttttctgcaaataattatttttgtattttttatttattttttttatatagggtcttgctttgtcaccacactagagtgcagtggcctgatcatgggtcattgtagtctcaacctcctgggctgaagtaatccttctgcctcagcctcctcagtagctgggactacaggcacgcactaccacgcctggctgttttttttttgtagagacaaaaatctcactatgttgcccaggctggtcttgaactcctggcctcaagcaatcttcccaccttggcctcccaaagtgctggagttacagacctgagccaccatgcccggccagataattctttgacagataatcctgctgacatgaactagacttccttaagacacatcatagaatcaatagcccagaaccataaagagcctctacttgtaagtttagagtcattttaagtaaggtagaactggagatcataagagatatgtactcttataatttttgattgtatgtttgtttctttttgagacagagtctcactctgtttgcccatgctggagcacagtggcgcgatcatagtttgttgcagcctcaacctcccaggttcaagggatccttgcaactcagcctcctgagtagctgagaccacaagcgcatgctatcacactagctgatttgatttttttgtagagttggggtctcactaagttgcttaggctggtctcaaactcctggctgcaagtggtcctcccaccttggcctcccaaagcgctgggattacaggcaggaaccacggtgcttggccaacaatttgcatgcctttaccacattccccaaatgttaacatttcacctcattttcttatcagtctctttatgtataacatgcatatgttttctgaatcatttaaatgtaaattgtgacataatgccccttttcccctaaatatgtatttcctgagagtaagaatttcattatgtatttcctaaaagcaaaaatgttctctttcccagtcacacaaaattatcagactcaggaactcaacactgagttcttcctccagcacttgacaagaatcaaagtgttggttagtgactgctttgggggatggggcaggactggcagcaggtggcccgatggcctgggtggtttgcctgccagcgatgctggtgggcaagccctgcctggaagctcctctctcccacgtttttcctgccgcccagtagttagaccacctggagccagaggagggggcccacccggtttcccagcctgtccctccagagctgggctccatttctggaggtagagaatggggcaagtctgggcatcttgtgctctttgctaggggaggaaagggctgtggctgctttccttgtcccccatttcccttctgccagtggggccaagccccagcagctcagtcaggagaagaggatatggatctgtctgggcctctctctttaagagaaagttgattcgtgccttccggatagtcttgttccagggtttctaaactttctgatcccaccttcatgttaaaatgagttttgatcatgtgtctctttagtaatatggacattataaaataggaaaaaaaagtctcttaaagcctaagtagttaaaaatttattttcacatcaggcatagtggctcatgccagtaatcccagcacttttagaggccaaagtgggaagatcgcttgaggctggagttggagaccagtctgggcaatacagtgagaccttgtctctaaattaaaaaaaaaaaaaaaaaaaaaattggccaggcatggtggctcatgcctgtaatcccagcactttgggatgccaaggcaggtggatcacctgaggtcaggagttcaagaccagcctggccaacatggtgaaaccccattagcggggcgtggtggcgtgcccctgtagtcccagctacttgggaggctgaggcgggagaatcacttgaacccggaaggcagaggttgcagtgagccgagattgcgccattgcactccagcctgggtgacagagtgagactccgtctcaaaaaaaaaaagccagttgtggtgtgtgtttgtaatcccagggaggctgagaagggaggatcacttgagctggggaggtcagggttgcaatgagccagtgtaatccagcgtgggccacagagtgagattctgcctcaaaaacaaaaccaaaaatatataacgagttaaaatcctacagtaaagaggctactgttttattctggttaaaccttagggttccttctatcaaacttaaactagaattttttttttttcttgagatggagtcgccctctgtcgcccaggctggagtgcagcagcttactgcaatctctgcctcccgtgttgaagcgattctcctgcctcagcctcccgagtagctgggattacaggtgtgtgccaccactcccagctaacttttgtgtttttagtagatacaggctggtctcaaactcctgaccaggctggttgttggccaggctggtctcaaactcctgacctcaagtgatccgcccacctcagcctccaaaagtgctgggattacaggtgtgagcctctgtgcccagccaagaaattattttttatttttgagatagagtcttgcttcgtctgttgcccaggctggtgtgcagtggcgtgatcttggctcattgcaacttccacctcctggactcaggcaattctccttcctcagcttcctgagtagctgggagtacagacgtgtgccaccacgcccggctaatttttgtatttttagtagagatggggttttaccacgttttcccacattggccaggctggtcttgaactcctgacctcaggtgatccacccgtctcggcctaccaaagtgctgggattacaggcttgagccaccgtgcccagcttataaattattgttattatttattattatttttttgagatggaatctcagtctgtcgtcgaggctgtagtgcagtggcgcgatctcagctcactgcaacctccgcctcctggattcaaggatttctcctccctcagcctcctgagtagctgggatacaggcacgcaccaccacacctggctaatttttgtattttttagtagagacggggtttcaccacattgcccaggctggtctcgaactcatgacctatgatccacccaccttggtcccccaaagtgctgggattacaggcgtgagccactgtgcccggcctataaattattttttaaggcacaaagtctcataggtaatttttaatcagagtcaaaagtaggatggggggcactctagaaagtaaaactccttatactttgtgaaaacacagttttttgtcctgtatccctgcccagagaccacctctgcctcccccaccaactacatatgggggtcaaggttgaggccccctggtctaacgggagagacagttgccgtatgggtggtagcaaaactccttaagggttgtgatttttttttttttttttttttttgagttggagtctccgtgtgtcgcccaggctggagtccagtggtgcgatcttggctcactgcaacctccacctcctgggttcaagcgattctcctgcctcagccccccggagtagctgggactgcaggtgcccaccaccacgcccggctaatttctttttgtatttgtagtagagatgaggattcaccctgttggccaggctggtatggaactcctgaccttgtgctccgtccacctcggcctcccaaagtgctgggattacaggcatgagccacggcgcctggctgtgccttttttctcttaatgatgttttgtgcaccctagtccgtgtcaccgcaggtactcccacccaccacgtaaatgggcgggaggcgctctgttttctggatatgctctcacgtagctcattaatctcttattttaagttccttctgattctcactatgctgaatgccacagtgaaaattctaaattgtagtgtatgtcctgcattatttccttaggcgccgctgcacttcagcctgggtaacagagcaagatcctattaaaaaaaaaaaagcaaacatgcttatggtagtacattttaaaaacatagaagattggaaaattggaaaaatccccatcaaaaatagtaaataacttaaaaatagcaacattttgggtatgttaccttccaatattgttttctgtgtaatttttttggtctcattttgccggagttgtaatgtatatgtagttttgtatcatgatccttttttatttttttgagacaaggtctcgctctattgcccaggctggagtacagtggtgcgatctcagctcgctgcagcgtcaagctctgggacttaagtgatcctcctgcctcagcctcctgagtagctgggactacaggcatgtgccgccacaccctgctaattttttattaaagatgctccccctttccggggtcccgcctcctcctctgagctttggctctggcttccctgcctcccccagctgcctggtctgacaggagagaaggacagttacagtgtacagtgacaccaaaaacatgctgtattgattatagtttatttttttttcttgtagaggtgggttcatgctgtgttgcccaggttgttgtccaactcctgagccgagcgatccacctgccttggcctgtcaaatgctgggattacaggcatgagccacctcacttggccatgatcctttttcaacttgatcatacagctgtttgtaaatatcaccatctatggcaataacagaactgactgcttatccccctgagcattcaagttttctctaggtaggttttcattattgtgaatatgctgtgccaaacatcctttttttttttttttttttttttttgagacagagtctcactctgtcttcaggctggagtgcagtggcatgatctcagctcactgcagcctccgcttcccgggttcaagcaattctcctgcctcagcctcccgagtagctgagactataggcgttcaccaccacgcccggctaatttttgtatttttagtagagacggggtttcaccatgttggccaggatggtctcaatctcctgacctcgtgatctgcccacctcggcctcccaaagtgctgggattacaggcatgagccaccgcacccggcctgtgccaaacatctttgtgcactaaagccttttctgtatttagggttatttccttagggtcatggaagtggaattgttgcgctgcaagacctgtaaatacattatagagctttggatcaaagttacgaattctgcttcagaggatggtgctttcattctgactggtttaaaaggctgctttctttgaagacaagcgaagtgagtgggacacagcccaggcgcagaaggtgaaggctgggatctccgcatggtggctgccagccccctgcaagggaggtcatgagcgtgggagatgactccccagcccccagccctcctcatccttgtccctaagaagagagtgagagcaaaacttgtggctgcggtgcagacaagcctgcctctttctcatgcagatgtgatgtttcccacacagggaggcagtcagaaaccagcatatgcccttctgtcttcccagccagcagcccaggaagggcaggtgctttgaaggagaggcccctaaccccctttcacggacattcacagggagtcaaggtggacgcgagagaccacagtggagccacagcccggatgctggccaagcagtacggacacatgaagatcgtggccttgatggacacttactcgccctctctgcccaagagcctctatcggagcccaggtacccacacctgccagccgcgccctgctggggtctctggttgccttgagctttaggtgacctggcagagaaagatgtcccccgcttccccggctcccaccttctctgagatttggctctgcctcccccagctgcttacatgtcaaggttgaggcccctgctctaacaggagataaggatggttacgatggagagtggtacaaaaccaggctgttgtgaatgtagaggctttctgtagtatgcttgactaccgagtaggggcaggcccctcttagttttctgttttcactgtttcctgagctatggcttgttcattcttctatatgaacttgaatatcaacttgtctagctccttaaaaacagtattgatatttttactgagattgtgacaatgtataaattaactatatctttgtgttgttgtcttatccaagaacaagggatgacttcttgttccaatgtacttttgggtcttgcaggagggttttaaatttttcttcatctacattttgcatgtgacttaagtttattcctaagtgtttgatcatctttgtcgctattgtaaatggggttttccctatcattatatcctttttttccccccaactctcagggtattaattattcagtgctatttattttttatttcagtaggtttttggagaacaggtggtggttggatacgtgaataagtcctttagtggtgtcattatatcgtttcactgcatattgtcagtgcatttgaaggcagtggatttctgcaaacttttgttttttttttgatacgggagtttcgctcttgttgctcaggctggagtgcaatgaagcgatcttgcctcaccgcaacctcttcctcccaggttcaagcaattttgcctcagcctcccaggtagctgggattacaggcgtgcaccaccatgcccggctaattttttgtattttcagtagagatggggtttctccatgttggtcaggctggtctagaactcgcaacctcaggtgatccacccatctcagcctcccaaagtgctgggattacaggtgtgagccactgcactcagccctgcaaactaattttatattctgctaccttacagaattcttacattgttcaggttagttttgttattgattctttagggctttacaggtgtactaacatataatctttaagtatcgatggatacactgcttcctgctgattctcatgactctgactttgttgaattgcaccgttcttttgtttagttgctaacacctctagctcattgttcaacatagtggagatagtgagcctccttaccttggtcctgatcttagtggaaatgccacgttacatgagaggctgactgtaaaagggaaggcatatgttattttagcttattaacaaagtattcctcagttcttctattcctgagtggtgttttacaggagtaactattgaattgtgttcccatatctttggagacgatggtgaattttcatatggtagattgtcttcatgaacctcctaataatgaatcaaccttacattcttggcataaatcccacatgttgtactattttaatgtgtttttgaattctgtttattaatatttagtatttttctatggatattcagtcataagtgatactggtctatagttttctttcttctttttttttgtttttgaaatggagtcttgctctgttgcccaggctggactggagtggcgagatctcagctcactgcaacctccgcaacctccgcctcctgagttcaagcaattcttctgcctcagcctcccgagtagctgggatcacaggcgtgcaccactacacccagctaatttttgtatttttagtagagacggggtttcaccatgttggccaggctggtctcgaactcctgatctccagtgatccgcctgcctcagcctcccaaagtgctgggattacaggcgtgagccaccgctcccggcgtggtctatacttttctatttttgttctgtctatcaggtatgggtatcagtgtttacttcataaaaataatttggaagttttccttccttttttgtgttctaggacaatacacgtagcattagtgctacctggtcttagaagttttgatagaatcctcccatgaaaccatctggtctctttctgtgaggtggttcctcgataacagtttttctatttcttctatagagattggcctcctcatactttcttttcttatggggtcagttttggtaaattatattttcctgagagatcacttcatctaggatttcagacttatctgcagaggtctacaagataatattttctccctttttttttttttttttttgagacagagtttcactcttgttccccaggctggagtgcagtggctcgatcttgactcaccgcaacctctgcctcccgggttcaagtgattctcctgcctcagcgtcccaagtagatgggattacaggcatgcgctaccatgcctggataattttatgtttttagtagagacagggtttctccatgttggccgggctggtctcaaactcccgacctcaggtggtctgcccacctgggcctcccaaagtactgggattataggtgtgagccaccgcacccggccaatttttttctccttttaaaatattctgtttcagggccaggcgcggtggcttatgcctataatctcagcactttggaaggccgagttgggcggatcacctgaggtcgggagttcgagaccagcctgatcagtatggagaaaccccatctctactaaaaatataaaattagctgggcgtagtggtgcatgcctgtaatcccagctactcgggaggctgaggtgggagaatcccttgaacccgggaggcagaggttgaggtgagccgagatcgtgccattgcagtccagcctaggcaacaagagcgaaactctgtctcaaaaaaaaaaaaaaaaaaaaaattctgtttcaggctgggtgcagtggctcatgcctgtaatctcagcactttgggaggctgaggcgtgtggatcacttgaggtcaggagttcaagaccagcctggccaacatggtgaaaccccgtctccactaaaaatacaaaaataagccaatgtggtggtgtgcgccagctactctggaggctgaggcaggagaatcacttgaacccgggagggggagattgcagtaagccaaaatcacgccactgcactccagcttggcgacagagcgagactccatctcaaagaaaagtaaatagataaaataaaacaaaataaaatactctgtttcagtggttattttctcctgttattatctttttttggcatggaaaatattgatttattttttgtgacagggtcttgctttgtcacccaggctggagtccagtgacccaatctcgactcaatgcaacctccgcctcccaggctcaaaacgatccttctacctcagctctacgagtagctaggactgtaggtgcaccctaccacgcccagcttacgtttgtattttttgtagagaggtggttttgccatgttgaccaggctggtctcaagagtcctgagctcaagcaatccacccgcctcagcctcccaaagtgctgggactacaggcatgagctactgcacctgacctggaaaatatttatctcatttttaattgacacaaaataactacatatttatggggtacagtgtgtgatgttttgatacatgtatacactgtgtaatgatcaaattaaggtgattagcttatccatcacctcaaacatttatcatttcgaggtgagaacatttaaaatcatgtcttctagtagctattttgaggtataagctgttgttccgtatagtcactctactgtgaacaccagaacttctttcttcgatctgtaattttacacctattgaccaatctctcccactacctccccacccccaacctctgataatcactattctactctacatgtttgacatgagcttttaaaaatcctgtaaatgggtgacatcatgtagtcatgtagtcttttttgttgtttgtttggtttttgagacaggttctcgctttgtcacccaggctggagtgtggtggcataatcttggctcactgcagcctccaattcctgggctcaagtgatcctcctatctcagcctcccgagtagctggcactacaggcacctaccaccacacctggctaatgttttatttttttgtagagacggggtcttgctatactgaccaggttggttttgaactcctgggctcaagtgatcctctcgccttggcctcccagagtgttgggattacaagtgtgagtcaccacaacagctggcatttgtctttcttttctatgtctggcttattttactgaacatagtctcttccaggcttattcatgttgccacaaatgatcagatttcattctttatgtctgaataatattcaattgtgtatataaactcattttctgtcttcgttcatccactgatggacacaggttgattctctatctaggctactgtgaatactgcggcagtaaacatgagggtgtagacatctctttggtatactgatttcctttcttttggataaatacccagtagtggaattgctggatctcatttcttatattttttaatttttttttttttttgagatggagtttcgctcttgtttcctaggctggagtgcaatggcacgatcttggctcactgcaacctccacctcccgggttcaagcgattctcctgcctcagcctccctagtagctgggattacaggcatgtgccaccacgtctggctaattttgcatttttgggagagacagggtttctccatgttggtcagggtggtctcgaactcccgacataaggtggtccacccgactcggcctcccaaagtgctgggattacaggcatgaaccgctgcacccggcaaaaatttcttctattaaaaaaaatagagacagtgtctcagtatgttgcccaggctggtctcaaactcctgggcccaagcgatcctcccacctcagtctcccacagtgctgagattataggcatgagccactgcgcccggcctcacttcttattttgaatatttgtgtttgttctttttttttttttgagacagagtctcgctctgttgcccaggctggagtgcagtggcgcgatctcggctcactgcaacccccgcctcccaggttcaagcgattctcctgcctcagccttttgagtagctgggactacagggtgcccaccaccacacctggctaattttttttttgtatttttagtagagacagggtttcactgtgttagccaggatggtctcgatctcctcacctcgtgatctgcccacctcggcctcccaaactgctagaattacaggtgtgagccaccgtgcgcagcctcttcctttttttcttaagttaaatactagtactttgtctgtttagtggaaaaacaagaaaaacccatcggattttgatttattaatgagacctactgattgtctgtttaatttctgcttttatttttatttggcttactttgttgttctagttttttgagttggaaacttctttcattttcattgttgcccttttgttgctaaatgttagaggctgtgaatttttgctgattgctgctttaagtgtattctgggggttctgtatttaatactttccttgttatttttagaaattctgtaatttttatttatattttctccttcacccaggagttgtctaatagaagtattatgattgtttttgtttgttaatttctagatggaagggcctttttgatcttgcaattaatttctcatgttattctgattaactttaatgtgtctgatcagagagtgtttataattcttacatttacataacttccttgtcatcttatttatcatctactgatctatctatatatatatatatttttttcagatgtagtctcactctgtcacccaggctggagtgcccaagtgcgatcttgactcactgcaacctctgcctcccaggttcaagcgactctcctgcctcagcctcccgagtagttgggattccaggcatctgccaccacgcctggctcatttttttttgtatttttagtagggacagggtttcaccatgttggccaggttggtcttgaagtcctgacctcaagtgatccgcccacctcggcctcccaaagtgctgggattacaggcgtgagccaccgcgcccggccctgatcaatattttttagtgttccgtgttttgcttgagaagttgtattctctattatctgtatacagtttagcatatctgtgagtctatcttatttaggattatgtactcttagttcattttctacaaaattacctattagcgtgtttctgatttatgaaggaagttggtgcattttttggtgacagattttcataacttgttatagattcactgtgaattatggcttttagtattagaagtgtccttctggctgggcatggcccatacctgtaatccgagcactttgggaggccaaggcgggcagatcccctgaggtcaggagttcgagaccagtccagcctacatggtgaaaccttgtctctactcaaaatacacaaattagccaggcatggtggcacatacttacaatcccagctactcgggaggctgaggcaggagaatcacttgaacccgggaggcggaggttacaatgagccgagattgtgccactgcactccagcctaggtgacggagtgaaactctgtttcaaaaaaaaaaaaaaaaaagtgtccttccgtgtcatatttaatgtgttttgccctgaattccacgttgatagcaggattgcagccctggctcttttgtggtttccatctgcctgttctttttaagctgctctgagggtgtgttgggtgctgagattcacgcagctgccgttcccttgcttattgctgcctctttgcatttgtcttacagctccctccccttcagcttggatggaagcacagtctccctggagtgctatagatctttgagtgtgaggaggtgtgtgtccatatggctagctcagtcgccagagcttgagcctcgtcatggggaaggacagagtggcccacgttcagggcctgagctctccctctttgctggcctgccctgagttgtcctgtcagtttgcacctgagcgagcagctcctttctcagtgtcaggctcagcccagcctcttccctggcattgggattgtttcataataaacacagctcaggtggtaatgcaaaggacctttcccttcatttctgccccagcttacccactccacaaggagatctcatcatttcctcctgtatacaactcacgtatctcttaaaagtagaatcagatcagagccttatacaaatcaaatatgaaaaactgaaaagctacaaaataataaaagctctggtttgagctctgaaagctcagactgggaagtgatttgaaacagtttataatcatagcaaacacatgccatgctttagaaaatacaaaattgtggctgggcgctgtggctcactcctgtgatgccagcactttgtgggaggccaaggtgggcggatcacaaggtcaggagatcgagaccagcctggccaacatggtgaaaccccgtctctactaaaaatacaaaaacaagattagctgggcatggtggccgggtgcctgtagtcccagctacttgggagcctgaggcaggagagtggcgtgaacccaggaggtggagcttgcagtgagccgtgatcgcaccattgcactcctgcctgggtgacagagcaagactccgtctcaaaaaaataaagaaaaaaaaaagaaaatacagaattgcttaataagttgtttccagccgggcacagtggtaacgtgcctataatcccagcactttgcgaggctgaggtgggtggatcacctgaggtcaggagttcaagaccagcctaatatgatgaaaccccatctctactaaaatataaaaattagctgggtatggtggcatctgcctataattcccaactactcgggaggctgagataggagaattgcttgaacccaggaggcggaagttccagcctgggcagcaagagcaaaactccttctcaaaagaaaaaaaaaaaagttgtttccaaaggaagggattaggaaaaagtagttgtgacttatattaccatatattttaatgaagagatgggttttacttattcaaattagaacagaatttctgattatgaacaatacagacttatgaacaatttggcaaaccccaacagagataataaactcctggctgggcatggtggctcatgcctgtaatcccagcactttgggaggccaaggcaggcagatcaggagtttgagaccagcctggccaacatggcaaaagcctgtgtctactgaaaaagaaaagaaaaaaaacactgggcatggtggcacgcatctgtaaccgcagctacttggaagggtgaggcgtgagaatcgctagaacccaggaggcggaggttgcagtgagtgagccaagatcatgccattacacttcagctcgggggacagagtgagactctgtctcaagaaaaatgaaacttcccatcctcactaactttgcagctccctgtggcccattggagcagcgccccggcctgttagggcatttctcagaagtgatgccctggcagatacccttctccttaatttaacaaaaccggcgacagtcactttctttcagtttgccgtaaggattagtaaatgagtccattactgaacacactatcttaatcttggtgtttgatcacagaaaagtacgaagatctgagctcttctgacgagtcctgccctgctcctcagagacagaggccttgccggaagaagggtgtcagcatccacgagggaccgcgagccctggccaggatcacaggcattggcctgggcggcagagccccacggcctcgctatggtgagtggcccgcgtttcccgagggctctttctcattgcataccaggattttgtgttggcaagaatggaatagctcttaggctcctgaaatgtgggtcgctggacctcaggtggcagcgggacaggtggcccagctttcatgctcagggagactcaggattgagtcctgtgatggaaatgcattggtcacggactagctcttgttttttgctttatctcctggagtttccttttcgttggttaaatttaggaatagaactttctctcctgcagcagaaatgtagctaaggtcagatttcattcatcacataggtgggttggctcatacagggaggaggcaaagcgtgaagttcacttccctgccctgcccataccagctgggtcgggtgcgctgctgggggcaggaggccaagaaaacaggccctgctgttttctcagggcgatgaagttgtactcagaccctcctgagagagggcccgcttgttgacttgctggtgaagaatcctagcctttgggttttccagtctcgttcattctcagattcccagccccagggtgttgagcgttttgctcttggggagtgctggggtttctttttaggggagttgggtttggtgcctactctctattgctgtggtctgtcccagagctcagctggaggtgtgagttatgtcttcctttgatggctgtcacccactcatagccaggccaaggctgctggtctcacaggcctggtggctggtccttctcgggagcaaggcctctttgaggccaggacttggaagagtgagagtagacagtgtttcagccaggggtccaccagtaattgaattcccttctagaccccaggaacaagcagatgtgcagacttctgtcttcccaagcctgggtgctgggttgggaactggagacccaccttctcccatcatcctgggaagggtgagctgactgggccactgggaaggcctctctcgagctgctggccagccccaccacagcatgagggcccgcccgtgtcccgtccgctgagctgtgagcactggctctgggacaccgggctggtcgttctgagtggcagagtctcttccttccaaaaggtccctgccacctgctacagcctgaggtgtggtggggacaggaaggaagctgtcatcctggggctgagttggtaattaatctatatagctgtacaacaaatgctttaacaaaatcatacatgtctgaagccgcttgtgtgcggttctttgtatgtatccacagagaagtaatcatggtggtggtctcaggtgtggtatttcaggggatttttgttttctcataccttgtgaaatttaaattttctataagtgcatatattttatttgccagtaattaagaaatttggggccgggcgcagtggctcacgcctgtaatcccagcactttgggaggccgaggcaggtggatcaagagatccagaccatcctggccaacatggtgaaatcccatctttactaaaaatgcaaaaattagctgggcatggtagtacgtgcctataatcccagctactcgggaggctgaggcaggagaatcggttgaacccgggaggcggaggttgcagtgagccgagattgtgccactgcactccagtctggtgacagagcaagactccgtctcaaaaaaaaaaaaaaaaaattgggggggccaggtgcagtggcttatacctgtaatcccagcactttggaaggctgaggtaggaagattgcttgggctcaggagttgtgagaccagcctgggcaatgtagcaagaccctatctctacaaaaaattttgaaaattagccagatatggtggcccatgcctgtagccccagttacatgagaggctgaggtggaaggattgcttgagcccaggaggtcaaggctgtagtgacccatgatggtgccattgcattccagtctggataacacagcaagaccctgtctcaaaaacagtttagggggcaatgataaatagcatgtgctgattagaaaaacttctccataactaggaaaatacgtaaagaggaaagtaagttccccatggtcccatcaaccagtcctttgggttcttttttgagacagggtttcactgtagcccaggctggagtgcagtggcacgatcatagctcactgaaggctccagttcctgagctcaagcgatcctcctgtctcagcctcccaagtagctgagattacagacatgtgccaccgtgactggtcaagtcagtctttttatgtaaaggggcaaaactggagtgaaattgcctggtatacatgcccctttttctgcttggttttagaggcaggtagagttaggtaatttcatattattgttgttaatttttacctcaaggcctttttccttcctgctcagccaggtctctttttcgccggggttgactgaccagaggaggcccgctaagcgcctgtggttaaaggtcacagggacataaagacacgtggtcgatgggtgtctgtgtgaggtcattagctacctcctgctaaaaggaacactcatggtatagttttctctggtcaggcatctgtaaatacagctgaccatttgctacgttttccccttggaaaagaaatggagagggcccaggcttgacctggctgccagccctcgccccaccaggcacttgcttgggccactgactgaccctcagagcatcttttccacccacacaccacagatagagccatgccaggtcgcaggggcaagtaggtgaggtcatgactgggaagtcacctgcctccatcctgggcctcggcctctgaggaggtttcactttggagttccctgggcttatgggccccattctgtacacagagcaggctcctccccgtggctatgtcaccttcaacagcagtggcgagaaccccctggaagaagagggcctctgctgccgggatgtcacctcccccatcaatgagcgggatgtggagagcagcagcagcagcagcagtcggggtacgtgcacccccacccatccggcccgtggctcaggcaggtcctggagctcctgtgtgcccatccccacttatcccctgggcctggcgctggacacagccatccagcagaggacaggaaaggggtaggtgtggacggccctggttcttgtgaggaatgggagaagcttctggtccagcatccccgtgcggcttaagggagccgttccacagcaacaggtttagctccttgcttgggagcccctgaggctttcagggcaggccccagtaggaatgtctgttataactgcacctccgtgcagcagctgtttccatagtgcccaccgtgtgccaagcactgctccgggtgcttgggatttatcagtgaacaaaaaagacagaagccctgcccgtctgtatagaggggagggtttaggacaggcaggaagtttgaaatataaggaagcaaccgctgcaggccccaaggagtgccctggtggaggcggctcagcccggggcacgcccatgcgcagcacctcggtgagggctgcaggcggacgccctgtcttcccgccctcagaggaacatgctttctgtgccaacctggggcccgtccagagcagcagcagcagcgagggcctggccagagcccaggggctcagcagcgaagcttctgtggagagcaacgaggtacggattctttctttcttggtctcccatagccggtccctggctgggatgcctgacatcccccagttactttaagatgagcatgtatgtaagaagcagctgctgcacgtgtgtgctgcactgggacgtgctgtgtccagggtctggcttctcagacgacagcgaacgcaccggaagcccctgtgtggcgggtggggggtttcacgaagcctctcaagcccctgtgtggcgggtgggggtttcaccaaggctctcaagttagcccgcgcactctttcagatgcacgcctctcactgcaggactcggatcatgcctgtaaaagctcagctcgcaaacaagctaaaagttacatgaagaccaagaatcctgacagccagtggcctccccgcgctgcaactgacagggaaggctttctcgctgagtccagcccccagactcagagggccccctactcaggaccccaggtaagaccgcttgtgaaactggaggttacactcagagacggcactttttgtgacttaggaggcatgtgttgtgtatatgacgtgccaggcgctgctaggagaacagaatggcggtggcatccccatggcctgttaggctccacaggctcacagccggctccatggctggcagccccgctgcagcgcttctactctgttcctctccacggaaaggacctgtctccctgctttccatactggagttggcctccctgagcctggggagaagaaaagcacacttgacctcagagctgcctgcaggagtctgacaagatgtggttgaagcagagacaggaactacacacagtgtgtgcttggtgatggttacagctgccaccatcctcctcctttctgtggtccctctgaccacacattaccttagggatcagaggtgtgactcacagctcagctgtctcacctgtgtctgctgagttctcctaccctgtgtgggcagaagaggcacggagaggagaggcagagggaagctctggttggttatttggtttgtttgttcgagacggagtctcgcactgtcatctgggctggagtgcagtggcgcgatctcggctcactgcaacctcctcctcctgggttcaagcgattctcctgcctcagcctcccaagtagctgggattacaggcacccgccaccatgcccatctaattttttgtatttttagtagagacgggatttcactatgttggccaggctggtctcaaattcctgacatcgtgatccgcccgcctcgacctcccaaagtgctgggattacaggcgtgagccaccacacctggcctggtgccatgcccggcctggctggttatttgttaaagcactggctttgctgttcagtagagccttggatttgccggcttctccctgcagcccctggctcagtgagcaggcacacgtctcggtcccttcaacatacgttgagtggagtctggtcagggtagtgtcctaagtatgtttctttcagaaaatagcttgaagaaaatgtcagagtaacatttgtttgtccattaaaagcaataaactctcaaaagtaggatttctggagttgaaaagtaaatgaaatgaaaatatcactagacgagctcacagcagaattgagcaggcagaagagtcagacaacttgtgaacacaggtcacctgagatcatctcgcttgaggaacagaaagaatgagtaaaaaaaattaacagaaatctgtgatcccctcaagcacaccgacaccaccccatacagtggcattccagaaggagagcagaaacgatgggtgagaaacagcctgaccatctcagtggatcagaaacacggatcttacatccagggagctcggtgaactccagacaggtgaactcggagaagagctgcgcttagacaagtggaaatcagaacatccgacactgagactctagaattagagggcagcgctctccgcctacaaagcattgtcgagatcagcagctccatggtcccttcacagaactgagcatgtgtgggaggaggaggccagtttctggtgatgaacatacattgtccccacgtggccgaccatagtgtgaggactcacctgcctgcaacatcctgccctgcctgagccaccagagtaggaggggacagcctgggcgccacacacaaggcactgtcttggttctgagcctggggaagtggtggggctccgagtggaggaaaacgtctctgcttcgtcgtcagccactacctcccccaacctgtcccctgtgcctgccaggaccttgccgcactgctggagcagatcgggtgtctgaagtacctgcaggtgtttgaggagcaggacgtggacctccgcatctttctgaccctcactgagagcgacctgaaggaaattggcatcacgtgcgtccagaagggccgctctggccctcagcccggggttggggcaaactcccactcatgtaagcgctcttgggacgctgaggcatatcctggtcacattccccccgcaggctgtttgggcccaagaggaagatgacgtccgccattgcccgctggcacagcagtgcccgcccacccggggatgccctggagctggcctacgccgaccggctggaggctgagatgcaggagctcgccatccagctgcacaaggtgagtggctgggtgggggatgggggggcagggtgacacccgtgagttggctccatctctgacagaaaaggtgggtgctgtgtggaggggtcaggtggatgcagtggggagagggccccacacacaggacagggccgtggccaagggtctggcttgaccggccacctcccagcctccccgcgccccccacccccctgcagcgctgcgaggaggtagaggccacgcggggccaggtgtgtcaggagcaggagctgcgcgccgtggtggagagctgcctgctggagcaggaccgcgcccgcgaggacctccaggcccggctgcgggagacgtgggccctggcccgggatgctgccctcgtcctggaccagctgcggtgagtggctctgagctgccctgggctgggtctccagtggtcagccacctggcccctgggcccccacacatcctttcctcctgattttgtaactgaggggtggatttcagggtctggagccaccccacccccatttcatcaggcccttccttcctgcaggcagacccaggcaggagttgggtccgggaatctgcaccggtcgccctcctgctctttagtgcagcctcatggggcactggcccagcccatgagggccagctgcaaggacagggctgagcccctccctcccctagaaggtctgaggtgggggctctgcagcggccaggcctctgctctcaccaatatttgtttctgtgtctggcagagcctgtcaagctgagctgtcatctcgagtgaggcaggaccagccccctggtgcagccactctgggcctagccgtccccccagctggtaagagcagtggcctgactccgcactgggcagaggggaaggtgggggagccctgaagccaggtttgacccagtgggcttggcctggttctccggccggcagccactctcccaggtccctgtgtgcacatgatcccagagtccaaggaaaagagggggccctggggacccaagcccacttcctcacctgtgacaggaaaactgcctatcccccaggggtaggaggtactcgagaaaggccctgtgccttggctggctgtgctgtgctgagaccgccagtgacttctgtagcctccagccagggcccagacccgggtccccaccggcagagctttgccttctctcgggctgacccgggcctcgtagtgtttgctcagcctgtgggaggaagggcacaacagggcttccctgcctcggccttgggaggttgcttagacactgtcaggcgggtagggaggttctgatccaagcaggttctcctggttgcatgggctcagaataaagcagggcctgtggggacgcagacccccagctaactcggtccctgcacctgcaccacagactccaagggctggcaagcgtccctgcaggccatgagcctccccgagctctcgggagccctggaggaccgtgtccgtgagatgggtgagtctccggggaccagacgactgagcgctccttttgtttccgagggaggcaaagggacccctttccagggaaagcgggtttgtgtctctctaccccaaggctgacctcggggctggggccataacgggtgaggggcaggtcacatcctgcagctgagaccccggggcagcaccacccagccctcctgagcctggccgggagaggctcaaggtcatcattcctcagggcaagcactgtgcttagtgacccagagcctggagaagctgcaggtgctgaacgggaagaagtggcgggagacctagcctgcgggccggtgagtgtctgccagcctggatcccgcgtggtgggagcagcagggcctgtctgggcggctgcaggtgtgggtatgcacccacctgtccccctcccttctcaccggggctttttctttcagaatctgacgttgggtgattggtccaccctgaagctgtgtgccagggagtgaggaggacagtgagcaggtagctgccatgtgcagcccaggcccagtgggggccagaggatcaggccccgggagcagccggcagacagaggcaagacgggggctgcggccctggctcggcagctcgggccagcactgaggcgggacgagggcctcacccagaacctcgtggtgaggcccagagttcatgggctgccctggcccataccaggcagggccctggggggaaagtgtatccatatacacgcacaggtgccaactgaggtgggaccttaggaatgaggactggggcacctggaaaatgccattttttggaaaataaaatttaagaacagcta

SEQ ID NO: 15394 - DNA, 33735 bp, Homo sapiens
gctagtgcagtggtgtagcaggggcaggaccagcctgtttcatgccctggaacaaccagccaggaaagatctaacccttgggccttcctcctcagtgatgtccgagctcagcgatgaagccagcgagccggaactcctgaaccgcagcttgtccatgtggcacgggctcgggacacaggtcagcggggaggagctggatgtccccctggatcttcacacagctgcttccattggccagtatgaagtggtgaaggagtgtgtgcagcggtaagagatctcggggaacttcctctcacattttgagcagcgcagtgatggcttcgatcccacgtgatggggctttgcacacagttgtggatgtttaatgcgtgtagaataggttaacctgcttatctcaggcagctgtcagtaagtattgatgctgagccctgacaaagaggccgtttttattcctaggaagaaaaagagggagtaaactttgatcagaagcttataaacagtcattctttaaccagactaattttattcactaattgcagaaatgcccaaacaaacaagcaaaataaaaataaagacagaaagtgatggcctggtgcggtggctcacacttgtaattccagcactttgggaggctgagatgggcgggtcacttgaggtcaggagtttgagaccattctggataacatgatgaaaccccatctctactaaaaatataaaagttagctgggtgtggtggcatgtacctgtaatcccagctactcaggaggctgaggcaggagaatcgcttgaacccgggaggtggaggttacagtgagctgagattgcgccactgcactctagcctgggcaacagagtgagactctgtctcaaaaacaaaaaaaagaaaaaagaaagtgatccctggccttcttttcccggagggttcattcgatccctgtgatccctgttcccctctagcttctgccatggaggaggagagaggctgggctttcagtgcctctggggaatgacctcccgacgtcactgcccacctgccctttgctaatctgtgtacaatagttagagacaatataaagcccctggcagggtccatggctgcgtcttgcccatagtaggatgtgatcatcttgtttttggaaaagggtcgtctcctcacttccacccccttatgttccacacacagcctaactctgtctcctggttctcatttgatattgtggtgcagcgacctctcttcctctctctgcgtgcctcttccagttcccagtgagccaaagcaaagcattgctgaagccccaggtctccggttcccaagttgtggccctcacttagacatacccagcccatggagtgctggtgcaccttggtacagggtggtctgttgcgctccctccacaggaggctctaggcataggcagctgggtatgcagtcagtacggcccctcaaagggtcacgtttggaattctcaggctcttaagtctttgggtgtcctgttaagatgcagagtccataaccgctccatagaggagcagggggaggcgtttgtgttgtgatgggattttgacactagctgaggtggaggcttgctgatagtaagcacaggatggggcctgaggggagctgggggcatcagaaggaaggggtggggctgaacgaggagtggtaagagagccccagggagatgctctgctgttgtgtaaaggaagatagtgttaggacgagctgggtgcattcgagccctgctgcagaggcatctccatgcagcccccctggccaggggctgccactgaaccctggtatcaggaccttctggaatggctgcccaggtgtgcatcccagagtcactgagggctgccaggcaatggaaggtagttgcctgctgtggtctaatatgtgaatcccggctgggcgcggtggctcacgcctgtaatccagcactttgggaggctaaggcgggtggatcacgaggtcaggagatcgagaccatcctggctaacacggtgaaaccccatctctactaaaaatacaaaaaactagctgggcgtagtggcgggcgcctgtagtcccagctacttgggaggctgaggcaggagaatggcgtgaacttgggaggcggagcttgcagtgagccgagatcgcgccactgcactccagcctgggcgacagagcgagactctgtctcaaaaaaacaacaaaaaagtgaatcccgtaaaagggacagatcctggggttcagtcaccagttgttatcccctctgcaggcaagaactggggaagggaaagaaggcctgtgggcgttaaccatgtaggatcccaggtaaccatgcaagtgggtattattttaaatgtgactcccttgtcccaaccccagagtcgcagctaggaagcccacagttttttcccatgggaaaatgcattgccagaattttaacagcaatcagtgagaaagatgggattctttggtcacagatttttcaagaatgtttctttaaggtgaggtgacaaaggatgaatcagtggcggtgggacttgtccacggtggagtcccttctttcctcactgctcctctccacccagcagtgggctagtagatgccaggcctgtggtggtcagggtttttcaactgtggctgtgttgacaatccaggctggatcattctttgctgtgggggctgtcctggacactgtgggatgtttagcggcagccttggcctccagcagcccttccctgcccagttgtgagaaccaaaaatgccttcacacattgccacatattccctggttgagtgccatctgcctatctggtggtgtgaaagagcatagctggccttgggctaggaggatgcgaaatcagagcaaggagacgaaggctcagggcctcacaaggcagtgtacgagcaactgtcagcatttttctgcctgcctgcctccaatccccacaacgtccagggtggcagataacttctgcttcctgtcaactcatcccgcctggcctagcctcgccaccagctttggtgaaccccacatgcgaggcggctggccatgtctagcatatcttgcgtttgtttaggagagagttagatttgaataagaagaatggtggtggctggaccccgctgatgtatgcctcctacattggccacgacacaatcgtgcacctgctgcttgaggcgggggtgagtgtgaatgtgccgaccccagaagggcagactccactgatgctggcctccagctgtggcaacgagagcatcgcctactttcttctccaggtgagctacgagggaactcaggcccagaaacctgaggggctccgtggccaccctgacagagatgcgaaccactgcaggccacggtgttcgtgtgtgctcgtgtaatcacttctgattcttgcagcatggccgcctggagggcgcccgccccacgcagaggagatgaggccgtaacgcacgttctgtgttctcttgaagcaaggtgcagagctagaaatgaaagacatccagggctggacagccctcttccactgtaccagcgccgggcaccagcacatggtcaggttcctcttggacagtggagccaatgccaacgtgaggtgattgccacatctttagtggccacaggagtggcctaggtgtcatctgactctaaggagggtggctctggaggcagctaaccagagtttagggccaccctgcttcggcacgagaggctcaagatgaggggtaggaccagagtccttccaggcacaggccttttcgtacatctgtgagatgcatctcttcaagccctctcagcttccttttctttatctgaaacccacctgggtcatacagttgtaagaattacatgttttattgtatgccaggggcctaacatactgaatggcatttaaatgtcatacattacatgcaaattccttccattttcttgctttttgtatggatgaggtgaggtgatgctttgaaacagtcatgaggccgggcgtggtggctcacgcctgtgatcccagctctttgggaggccgaggtaggcagatcacgaggtcaggagatcgagaccatcctggctaacatggtgaaaccccatctctactaaaaatacgaaaaaattagctgggcatggtgacgggcgcctgtagtcccagctactcgggaggctgaggcaagagaatggtgtgaacccgggaggtggagcttgcagtgagccgagattgcaccactgcactccagcctgggtgacagagcaagactccatctcaaaaaaaaaaaaacaaaaacaacagtcatgagttttggccgggctcagtggctcacacctgtaatcctagcactctgggaggccaaggcgggcagatcatgaggtcaggagttcgagaccagtctggccaacatggtgaaaccccgtctctactaaaaatacaaaaattagctgggcgtggtggcaggtgcctgtaatcccagctactcgggagtctgaggcgggagaatcacttgaaaccagaaggcagaggttgcagtgaactgagagatcgtgccactgcactccagcctgagcaacaagagcaaaactctgtctcaaaaacaaacaaaaaaccagtcatgagttttataagttggaagtgggattgttgtctaaagcttgtcatgataataatcacctttgaacaaacgcagcgggtaccaatgcagcacccaccctggctgtcattcattctaagacacctgataattttgtatgccactaagaaagaaaaaatatgctactaattaacattcaactcgcctgttgatttaaagatgttttctgacttgagagatgttaaaatatgaacactgtgtgtcttaagatggatgaaaaccagcatttcccatgcatggttcctgacttccaaaccagcatgagacaaggagggatttggaagccctctgaagacagtgccgagttagcataaccaagcatgaaaagcaagcttcaggagctaagcgtggcaaagatagcttagatcattagtacttgaacttttcagagtgggttcatggaggacgttgaacttgaagccaggatttggatgaatggatgggagatgctggctttctgtgaggaattagaacagctttttgaatatgattgaggtggagatttcagaggtagccagtgggaatagccaacaggtgggacgacaggcagacatctgtctttaggacaaagaccagccctggggacagacaccagaagagtaaatggagctgatgtgttatattcactgttctcatgtcacctgttaattctggaaagggacagtgttctacgcttagggatcggtgactcgtgcactgctcagggtttatcttcagcagggagtttttgcctggcggaacttgtctcttccaatcatctgactgtggcccacatcttgcagggagccgatatgtggatttactcccttgatggaagcagctgctgctggccatgagataatcgtgcagtattttctgaatcacgtaagtgaccctgattattagcatgtaatgtagtcacggcaaatgaggaatcatattactgaagtataagctattacagaattttcctttgcacagaaataactttcattcatttattcaacacattttcattatctattgacgcccggtgttgagtggtgcttaggcattaaggatacagtggtgagtagaaatagacacctattcctgtaataattttgaaaatactatctgaaaattatggaaaaatattttaaaagtaaatagcactcataatcctgtcacttagaaaaattatatagaataagaaggcagagatcctcctctctttttcaacctccctgatgcccacttggtttgagaaagagctgccctaggacttttcctctgctgtggaaagatgtgtctgtaggcaagtgtgtgcacattgctttgtgttttgaacaaagtgggattctacgtatagtctgtaacttagagacatcttatagacatcttatctttgtacagtattccgtgtacaatctgcctcagttaatttaatgagtttcttattagtagaaacttagtttttaacattttgcaattataaacagtgttccgggaatatccttttacacatagctttaatacatttgcagttatttctgtatgttgtatttctgttttattttattaatttatttttttgagacatggtgttgccctgtatcccaggctggagttcagtggcgagatcgtggctcactgcagcttcagcctcctgggctcaagcgatcctcctgcctcagcccccaagtagctgggactacaggtgcatgctaccatgccccggctaattatttaattttttttttttggtagagttgggggtctcagtatgttgtgcaggctagtcttgaattcctgagctcaagcgatcacctcagcctcccaaagtgctgggatcacaggtgcaagcctgtccacacagaaccttgtacataaatattcatagcagtattattcataattgccaaaaagtagaaaaacccacaagtccatctactgaggaattgataaacaaaatatatatctgtatagcaggatattattcggccctacaaagtaatgcagtactgctgcatgctgcggcaggggtgaaccctgatgcgttaggctgggctgggtgcggtggcgcacgccggtaatcccaacactttgggaggctgaggccagagggtcgcttcagccctggagttggaggttgcagtgagctatgattgcgccgccacactccattctgggtcacagagtggatcctgcctcaaaaagaaaaagaaaaggaaaacattcggctcagtgaaagaagccagacacaacaggccacacactaggtgatttcactcataggaaatgtccagaataagcaaatacatagacagaaaatagatgagtggtttcctgggtcttggggaatgggaagattggggtgataaaaatgtgctaaaattgtttgtggtgatggttgaacaactgtgaatatacgagaagccgttgaattgtacattgtaagtgggtgacttgttggtatgtggattatatctttataaggctgttaaacccaatggggggaagtgcaggcggtcctgatgaattcccactaccaaggttgtctgttgtcctgcccaccagtcatagacaaaggtgtccattttctcttgtcctcaccagtcctgatgtcagtcaaccttttgtcaatctggcgggtgaattgtagcgtctcattttagtttgtccttgttagagtagttgaaatttttttctttttttttttttttggagacagaagtcttgtgctgtgtcgcccaggctggaaggctggagtgcagtggcgtgatctcggctcactgcaacctctacctcccaagttcaagcagttcttctgcctcagcctcccgagtagctgggactgcaggcacccgcccgcacacctggctaattttttgtattttagtagagatgaggtttcaccatgttgcccaggctgctcttgaactcctgaactcaggcaatccacccaccttagcctcccaaagtgctaggattacaggcataagccactgcgcccagccagttgaacatttttaaattgatttcttagccatttgtatttcttttttttttttttttttgagactgagtctcactcagtcgcccaggctggagtacagtggcatgatctcagctcactgcaacctccacctcccaggtttaagagattgtcctgcctcagcctcccgagtagctgggactaaaaatacaaaaaatcccggctaattttttgtatttttagtagagacaaggtttcaccgtgttagccaggatggtctcgatctcctgacctcatgatctgcccgccctggcctcccaaagtgctgggattacaggtgtgagccactgtgcccggctggccatttgtatttctcttacgagctgtctatgtttattgcccaattttctattggatagtttgtttttttctcacttattggtgggaatttcttaaatagtgaaaaattcacatggtatctctttttaacaaagaattttgggacacaacatgcacatggtacacatgcagaccagaaggtgggtgcaccgcaggcctgtcccccaccctgcctgcgtctccttggcaccctccccacgggcgactctgggaatacacccacacatgctcatggtcctgccccatgtgcagctgctcccatcttgcattttttaaaaaacttaatcatgaagatttttctatattggtgtataaagagacggggccaggtgcattgtctcgctcctgtaatcccagcactttgagaggccaaggcagacagatcacttgaggtcaggagtttgagaccagcttggccaaggtggtgaaacccgcctctaccaaaaatacaaaaatacaaaatacaggtggctgacgctgtaatcccagctacttgggaggctgagacaggagaatcacttgaacctgggaggcagaggttgcgatgagccaagatgttgccactgcactccagcctgggtgacagagtgagactatctctaaataaataaataaataaataaataaataaatcaataaatcaataaagagatggggtcttgctctgtccctcaggctggagtggagtggtgcagtctcagctcactgcagccttgacctcctggtctcaagtgatcctcctgcctcagcctcccaagtagctgggattacaggtgcgtgccaccacgcccagccaatttttgtattttttttgtagagatggggttttgccacgttgcccaggctggtcttgaactcctgagctcaggcagttcgcctgcctcggtctcccaaagtgctgggattacaggcacgagccaacgcacccagcccctctcttttttttttttttttgagatggcgtcttgctctgttgcccaggctagagtgcagtggcacgatctcggctcactgcaacctcagacttccgggttcacaccattctcctgcctcagcctcccgagtagctgggaccacaggcgcccgccaccatgcccagctaatttttcatatttttagtagagacggggtttcaccgcgttagccaggatggtctcgatctcctgacctcgtgatccgcccaccttggcctcccaaagtgctgggattacaggcgtgagccaccgtgcctggcctctcttttttttttttttttttatggtggcatggtattccctgtagggatgaatcagagtttttttgtttgtttgtttgtttgttttgagatggagtctcgctctgtagccctggctggagtgcagtggcgcaatctcggctcattgcaacctctgcctcccaggttcaagcgattctcctgcctcagcctcctgagtagctgggattacaggcgtgtgccaccacgcccagctaattttgtatttttagtagacagggtttcggcatgttggtcaggatggtcttgaactcctgacctcaagtgatctaccactttggcctcccaaagtgctgagattacaggcatgagccactgcgcctggcctaccgttgacatttcttacacgtctttttaagcacatatgggaatttcttcaggagcttaggatgtgttcttcaaagtagagtctttgttgtgtgaggtgggttcagtcggtagtgggtagtgtaaacttgctttgttccatagtggtcctggttcacacccctccccttagggtgttagacttcttttttttttttgagatggagtctctctctgtcacccaggctggagtgcagtggcgcgatctcggctcactgcaacctctgcctcccaggttcaagcgattttcctgcctcagcctcccgagtagctgggactgtaggcactcgccaccatgcccagctaatttttgtatttttagtagagacagggtttcaccatgttggccaggatggtctcaatctcttgaccttgtgacccgcccgccttggtcttccaaagtgctgggattacaggcgtgagccaccgtgcctggccttttttttttttttttttttggggtggggtcttgctctgtccccaaggctggagtacagtggtgtgatctcagctcagtgcaacttctgactcccaggctcaagcaattcgcctggctcagcctcccgagtagctgggattccaggtgtgtgccaccatatccagctaatttttgtatttttagtggagacagggtttcaccatgttggccaggctggtctcgaactcctgacctcatgatctgtctgcctcagcctcccaaagtgctgggattacaggcgtgagccactgtgcctggccaggatgttagactttttggctccctggccatttgggtttctttttctgcaaataattatttttgtattttttatttattttttttatatagggtcttgctttgtcaccacactagagtgcagtggcctgatcatgggtcattgtagtctcaacctcctgggctgaagtaatccttctgcctcagcctcctcagtagctgggactacaggcacgcactaccacgcctggctgttttttttttgtagagacaaaaatctcactatgttgcccaggctggtcttgaactcctggcctcaagcaatcttcccaccttggcctcccaaagtgctggagttacagacctgagccaccatgcccggccagataattctttgacagataatcctgctgacatgaactagacttccttaagacacatcatagaatcaatagcccagaaccataaagagcctctacttgtaagtttagagtcattttaagtaaggtagaactggagatcataagagatatgtactcttataatttttgattgtatgtttgtttctttttgagacagagtctcactctgtttgcccatgctggagcacagtggcgcgatcatagtttgttgcagcctcaacctcccaggttcaagggatccttgcaactcagcctcctgagtagctgagaccacaagcgcatgctatcacactagctgatttgatttttttgtagagttggggtctcactaagttgcttaggctggtctcaaactcctggctgcaagtggtcctcccaccttggcctcccaaagcgctgggattacaggcaggaaccacggtgcttggccaacaatttgcatgcctttaccacattccccaaatgttaacatttcacctcattttcttatcagtctctttatgtataacatgcatatgttttctgaatcatttaaatgtaaattgtgacataatgccccttttcccctaaatatgtatttcctgagagtaagaatttcattatgtatttcctaaaagcaaaaatgttctctttcccagtcacacaaaattatcagactcaggaactcaacactgagttcttcctccagcacttgacaagaatcaaagtgttggttagtgactgctttgggggatggggcaggactggcagcaggtggcccgatggcctgggtggtttgcctgccagcgatgctggtgggcaagccctgcctggaagctcctctctcccacgtttttcctgccgcccagtagttagaccacctggagccagaggagggggcccacccggtttcccagcctgtccctccagagctgggctccatttctggaggtagagaatggggcaagtctgggcatcttgtgctctttgctaggggaggaaagggctgtggctgctttccttgtcccccatttcccttctgccagtggggccaagccccagcagctcagtcaggagaagaggatatggatctgtctgggcctctctctttaagagaaagttgattcgtgccttccggatagtcttgttccagggtttctaaactttctgatcccaccttcatgttaaaatgagttttgatcatgtgtctctttagtaatatggacattataaaataggaaaaaaaagtctcttaaagcctaagtagttaaaaatttattttcacatcaggcatagtggctcatgccagtaatcccagcacttttagaggccaaagtgggaagatcgcttgaggctggagttggagaccagtctgggcaatacagtgagaccttgtctctaaattaaaaaaaaaaaaaaaaaaaaaattggccaggcatggtggctcatgcctgtaatcccagcactttgggatgccaaggcaggtggatcacctgaggtcaggagttcaagaccagcctggccaacatggtgaaaccccattagcggggcgtggtggcgtgcccctgtagtcccagctacttgggaggctgaggcgggagaatcacttgaacccggaaggcagaggttgcagtgagccgagattgcgccattgcactccagcctgggtgacagagtgagactccgtctcaaaaaaaaaaagccagttgtggtgtgtgtttgtaatcccagggaggctgagaagggaggatcacttgagctggggaggtcagggttgcaatgagccagtgtaatccagcgtgggccacagagtgagattctgcctcaaaaacaaaaccaaaaatatataacgagttaaaatcctacagtaaagaggctactgttttattctggttaaaccttagggttccttctatcaaacttaaactagaattttttttttttcttgagatggagtcgccctctgtcgcccaggctggagtgcagcagcttactgcaatctctgcctcccgtgttgaagcgattctcctgcctcagcctcccgagtagctgggattacaggtgtgtgccaccactcccagctaacttttgtgtttttagtagatacaggctggtctcaaactcctgaccaggctggttgttggccaggctggtctcaaactcctgacctcaagtgatccgcccacctcagcctccaaaagtgctgggattacaggtgtgagcctctgtgcccagccaagaaattattttttatttttgagatagagtcttgcttcgtctgttgcccaggctggtgtgcagtggcgtgatcttggctcattgcaacttccacctcctggactcaggcaattctccttcctcagcttcctgagtagctgggagtacagacgtgtgccaccacgcccggctaatttttgtatttttagtagagatggggttttaccacgttttcccacattggccaggctggtcttgaactcctgacctcaggtgatccacccgtctcggcctaccaaagtgctgggattacaggcttgagccaccgtgcccagcttataaattattgttattatttattattatttttttgagatggaatctcagtctgtcgtcgaggctgtagtgcagtggcgcgatctcagctcactgcaacctccgcctcctggattcaaggatttctcctccctcagcctcctgagtagctgggatacaggcacgcaccaccacacctggctaatttttgtattttttagtagagacggggtttcaccacattgcccaggctggtctcgaactcatgacctatgatccacccaccttggtcccccaaagtgctgggattacaggcgtgagccactgtgcccggcctataaattattttttaaggcacaaagtctcataggtaatttttaatcagagtcaaaagtaggatggggggcactctagaaagtaaaactccttatactttgtgaaaacacagttttttgtcctgtatccctgcccagagaccacctctgcctcccccaccaactacatatgggggtcaaggttgaggccccctggtctaacgggagagacagttgccgtatgggtggtagcaaaactccttaagggttgtgatttttttttttttttttttttttgagttggagtctccgtgtgtcgcccaggctggagtccagtggtgcgatcttggctcactgcaacctccacctcctgggttcaagcgattctcctgcctcagccccccggagtagctgggactgcaggtgcccaccaccacgcccggctaatttctttttgtatttgtagtagagatgaggattcaccctgttggccaggctggtatggaactcctgaccttgtgctccgtccacctcggcctcccaaagtgctgggattacaggcatgagccacggcgcctggctgtgccttttttctcttaatgatgttttgtgcaccctagtccgtgtcaccgcaggtactcccacccaccacgtaaatgggcgggaggcgctctgttttctggatatgctctcacgtagctcattaatctcttattttaagttccttctgattctcactatgctgaatgccacagtgaaaattctaaattgtagtgtatgtcctgcattatttccttaggcgccgctgcacttcagcctgggtaacagagcaagatcctattaaaaaaaaaaaagcaaacatgcttatggtagtacattttaaaaacatagaagattggaaaattggaaaaatccccatcaaaaatagtaaataacttaaaaatagcaacattttgggtatgttaccttccaatattgttttctgtgtaatttttttggtctcattttgccggagttgtaatgtatatgtagttttgtatcatgatccttttttatttttttgagacaaggtctcgctctattgcccaggctggagtacagtggtgcgatctcagctcgctgcagcgtcaagctctgggacttaagtgatcctcctgcctcagcctcctgagtagctgggactacaggcatgtgccgccacaccctgctaattttttattaaagatgctccccctttccggggtcccgcctcctcctctgagctttggctctggcttccctgcctcccccagctgcctggtctgacaggagagaaggacagttacagtgtacagtgacaccaaaaacatgctgtattgattatagtttatttttttttcttgtagaggtgggttcatgctgtgttgcccaggttgttgtccaactcctgagccgagcgatccacctgccttggcctgtcaaatgctgggattacaggcatgagccacctcacttggccatgatcctttttcaacttgatcatacagctgtttgtaaatatcaccatctatggcaataacagaactgactgcttatccccctgagcattcaagttttctctaggtaggttttcattattgtgaatatgctgtgccaaacatcctttttttttttttttttttttttttgagacagagtctcactctgtcttcaggctggagtgcagtggcatgatctcagctcactgcagcctccgcttcccgggttcaagcaattctcctgcctcagcctcccgagtagctgagactataggcgttcaccaccacgcccggctaatttttgtatttttagtagagacggggtttcaccatgttggccaggatggtctcaatctcctgacctcgtgatctgcccacctcggcctcccaaagtgctgggattacaggcatgagccaccgcacccggcctgtgccaaacatctttgtgcactaaagccttttctgtatttagggttatttccttagggtcatggaagtggaattgttgcgctgcaagacctgtaaatacattatagagctttggatcaaagttacgaattctgcttcagaggatggtgctttcattctgactggtttaaaaggctgctttctttgaagacaagcgaagtgagtgggacacagcccaggcgcagaaggtgaaggctgggatctccgcatggtggctgccagccccctgcaagggaggtcatgagcgtgggagatgactccccagcccccagccctcctcatccttgtccctaagaagagagtgagagcaaaacttgtggctgcggtgcagacaagcctgcctctttctcatgcagatgtgatgtttcccacacagggaggcagtcagaaaccagcatatgcccttctgtcttcccagccagcagcccaggaagggcaggtgctttgaaggagaggcccctaaccccctttcacggacattcacagggagtcaaggtggacgcgagagaccacagtggagccacagcccggatgctggccaagcagtacggacacatgaagatcgtggccttgatggacacttactcgccctctctgcccaagagcctctatcggagcccaggtacccacacctgccagccgcgccctgctggggtctctggttgccttgagctttaggtgacctggcagagaaagatgtcccccgcttccccggctcccaccttctctgagatttggctctgcctcccccagctgcttacatgtcaaggttgaggcccctgctctaacaggagataaggatggttacgatggagagtggtacaaaaccaggctgttgtgaatgtagaggctttctgtagtatgcttgactaccgagtaggggcaggcccctcttagttttctgttttcactgtttcctgagctatggcttgttcattcttctatatgaacttgaatatcaacttgtctagctccttaaaaacagtattgatatttttactgagattgtgacaatgtataaattaactatatctttgtgttgttgtcttatccaagaacaagggatgacttcttgttccaatgtacttttgggtcttgcaggagggttttaaatttttcttcatctacattttgcatgtgacttaagtttattcctaagtgtttgatcatctttgtcgctattgtaaatggggttttccctatcattatatcctttttttccccccaactctcagggtattaattattcagtgctatttattttttatttcagtaggtttttggagaacaggtggtggttggatacgtgaataagtcctttagtggtgtcattatatcgtttcactgcatattgtcagtgcatttgaaggcagtggatttctgcaaacttttgttttttttttgatacgggagtttcgctcttgttgctcaggctggagtgcaatgaagcgatcttgcctcaccgcaacctcttcctcccaggttcaagcaattttgcctcagcctcccaggtagctgggattacaggcgtgcaccaccatgcccggctaattttttgtattttcagtagagatggggtttctccatgttggtcaggctggtctagaactcgcaacctcaggtgatccacccatctcagcctcccaaagtgctgggattacaggtgtgagccactgcactcagccctgcaaactaattttatattctgctaccttacagaattcttacattgttcaggttagttttgttattgattctttagggctttacaggtgtactaacatataatctttaagtatcgatggatacactgcttcctgctgattctcatgactctgactttgttgaattgcaccgttcttttgtttagttgctaacacctctagctcattgttcaacatagtggagatagtgagcctccttaccttggtcctgatcttagtggaaatgccacgttacatgagaggctgactgtaaaagggaaggcatatgttattttagcttattaacaaagtattcctcagttcttctattcctgagtggtgttttacaggagtaactattgaattgtgttcccatatctttggagacgatggtgaattttcatatggtagattgtcttcatgaacctcctaataatgaatcaaccttacattcttggcataaatcccacatgttgtactattttaatgtgtttttgaattctgtttattaatatttagtatttttctatggatattcagtcataagtgatactggtctatagttttctttcttctttttttttgtttttgaaatggagtcttgctctgttgcccaggctggactggagtggcgagatctcagctcactgcaacctccgcaacctccgcctcctgagttcaagcaattcttctgcctcagcctcccgagtagctgggatcacaggcgtgcaccactacacccagctaatttttgtatttttagtagagacggggtttcaccatgttggccaggctggtctcgaactcctgatctccagtgatccgcctgcctcagcctcccaaagtgctgggattacaggcgtgagccaccgctcccggcgtggtctatacttttctatttttgttctgtctatcaggtatgggtatcagtgtttacttcataaaaataatttggaagttttccttccttttttgtgttctaggacaatacacgtagcattagtgctacctggtcttagaagttttgatagaatcctcccatgaaaccatctggtctctttctgtgaggtggttcctcgataacagtttttctatttcttctatagagattggcctcctcatactttcttttcttatggggtcagttttggtaaattatattttcctgagagatcacttcatctaggatttcagacttatctgcagaggtctacaagataatattttctccctttttttttttttttttttgagacagagtttcactcttgttccccaggctggagtgcagtggctcgatcttgactcaccgcaacctctgcctcccgggttcaagtgattctcctgcctcagcgtcccaagtagatgggattacaggcatgcgctaccatgcctggataattttatgtttttagtagagacagggtttctccatgttggccgggctggtctcaaactcccgacctcaggtggtctgcccacctgggcctcccaaagtactgggattataggtgtgagccaccgcacccggccaatttttttctccttttaaaatattctgtttcagggccaggcgcggtggcttatgcctataatctcagcactttggaaggccgagttgggcggatcacctgaggtcgggagttcgagaccagcctgatcagtatggagaaaccccatctctactaaaaatataaaattagctgggcgtagtggtgcatgcctgtaatcccagctactcgggaggctgaggtgggagaatcccttgaacccgggaggcagaggttgaggtgagccgagatcgtgccattgcagtccagcctaggcaacaagagcgaaactctgtctcaaaaaaaaaaaaaaaaaaaaaattctgtttcaggctgggtgcagtggctcatgcctgtaatctcagcactttgggaggctgaggcgtgtggatcacttgaggtcaggagttcaagaccagcctggccaacatggtgaaaccccgtctccactaaaaatacaaaaataagccaatgtggtggtgtgcgccagctactctggaggctgaggcaggagaatcacttgaacccgggagggggagattgcagtaagccaaaatcacgccactgcactccagcttggcgacagagcgagactccatctcaaagaaaagtaaatagataaaataaaacaaaataaaatactctgtttcagtggttattttctcctgttattatctttttttggcatggaaaatattgatttattttttgtgacagggtcttgctttgtcacccaggctggagtccagtgacccaatctcgactcaatgcaacctccgcctcccaggctcaaaacgatccttctacctcagctctacgagtagctaggactgtaggtgcaccctaccacgcccagcttacgtttgtattttttgtagagaggtggttttgccatgttgaccaggctggtctcaagagtcctgagctcaagcaatccacccgcctcagcctcccaaagtgctgggactacaggcatgagctactgcacctgacctggaaaatatttatctcatttttaattgacacaaaataactacatatttatggggtacagtgtgtgatgttttgatacatgtatacactgtgtaatgatcaaattaaggtgattagcttatccatcacctcaaacatttatcatttcgaggtgagaacatttaaaatcatgtcttctagtagctattttgaggtataagctgttgttccgtatagtcactctactgtgaacaccagaacttctttcttcgatctgtaattttacacctattgaccaatctctcccactacctccccacccccaacctctgataatcactattctactctacatgtttgacatgagcttttaaaaatcctgtaaatgggtgacatcatgtagtcatgtagtcttttttgttgtttgtttggtttttgagacaggttctcgctttgtcacccaggctggagtgtggtggcataatcttggctcactgcagcctccaattcctgggctcaagtgatcctcctatctcagcctcccgagtagctggcactacaggcacctaccaccacacctggctaatgttttatttttttgtagagacggggtcttgctatactgaccaggttggttttgaactcctgggctcaagtgatcctctcgccttggcctcccagagtgttgggattacaagtgtgagtcaccacaacagctggcatttgtctttcttttctatgtctggcttattttactgaacatagtctcttccaggcttattcatgttgccacaaatgatcagatttcattctttatgtctgaataatattcaattgtgtatataaactcattttctgtcttcgttcatccactgatggacacaggttgattctctatctaggctactgtgaatactgcggcagtaaacatgagggtgtagacatctctttggtatactgatttcctttcttttggataaatacccagtagtggaattgctggatctcatttcttatattttttaatttttttttttttttgagatggagtttcgctcttgtttcctaggctggagtgcaatggcacgatcttggctcactgcaacctccacctcccgggttcaagcgattctcctgcctcagcctccctagtagctgggattacaggcatgtgccaccacgtctggctaattttgcatttttgggagagacagggtttctccatgttggtcagggtggtctcgaactcccgacataaggtggtccacccgactcggcctcccaaagtgctgggattacaggcatgaaccgctgcacccggcaaaaatttcttctattaaaaaaaatagagacagtgtctcagtatgttgcccaggctggtctcaaactcctgggcccaagcgatcctcccacctcagtctcccacagtgctgagattataggcatgagccactgcgcccggcctcacttcttattttgaatatttgtgtttgttctttttttttttttgagacagagtctcgctctgttgcccaggctggagtgcagtggcgcgatctcggctcactgcaacccccgcctcccaggttcaagcgattctcctgcctcagccttttgagtagctgggactacagggtgcccaccaccacacctggctaattttttttttgtatttttagtagagacagggtttcactgtgttagccaggatggtctcgatctcctcacctcgtgatctgcccacctcggcctcccaaactgctagaattacaggtgtgagccaccgtgcgcagcctcttcctttttttcttaagttaaatactagtactttgtctgtttagtggaaaaacaagaaaaacccatcggattttgatttattaatgagacctactgattgtctgtttaatttctgcttttatttttatttggcttactttgttgttctagttttttgagttggaaacttctttcattttcattgttgcccttttgttgctaaatgttagaggctgtgaatttttgctgattgctgctttaagtgtattctgggggttctgtatttaatactttccttgttatttttagaaattctgtaatttttatttatattttctccttcacccaggagttgtctaatagaagtattatgattgtttttgtttgttaatttctagatggaagggcctttttgatcttgcaattaatttctcatgttattctgattaactttaatgtgtctgatcagagagtgtttataattcttacatttacataacttccttgtcatcttatttatcatctactgatctatctatatatatatatatttttttcagatgtagtctcactctgtcacccaggctggagtgcccaagtgcgatcttgactcactgcaacctctgcctcccaggttcaagcgactctcctgcctcagcctcccgagtagttgggattccaggcatctgccaccacgcctggctcatttttttttgtatttttagtagggacagggtttcaccatgttggccaggttggtcttgaagtcctgacctcaagtgatccgcccacctcggcctcccaaagtgctgggattacaggcgtgagccaccgcgcccggccctgatcaatattttttagtgttccgtgttttgcttgagaagttgtattctctattatctgtatacagtttagcatatctgtgagtctatcttatttaggattatgtactcttagttcattttctacaaaattacctattagcgtgtttctgatttatgaaggaagttggtgcattttttggtgacagattttcataacttgttatagattcactgtgaattatggcttttagtattagaagtgtccttctggctgggcatggcccatacctgtaatccgagcactttgggaggccaaggcgggcagatcccctgaggtcaggagttcgagaccagtccagcctacatggtgaaaccttgtctctactcaaaatacacaaattagccaggcatggtggcacatacttacaatcccagctactcgggaggctgaggcaggagaatcacttgaacccgggaggcggaggttacaatgagccgagattgtgccactgcactccagcctaggtgacggagtgaaactctgtttcaaaaaaaaaaaaaaaaaagtgtccttccgtgtcatatttaatgtgttttgccctgaattccacgttgatagcaggattgcagccctggctcttttgtggtttccatctgcctgttctttttaagctgctctgagggtgtgttgggtgctgagattcacgcagctgccgttcccttgcttattgctgcctctttgcatttgtcttacagctccctccccttcagcttggatggaagcacagtctccctggagtgctatagatctttgagtgtgaggaggtgtgtgtccatatggctagctcagtcgccagagcttgagcctcgtcatggggaaggacagagtggcccacgttcagggcctgagctctccctctttgctggcctgccctgagttgtcctgtcagtttgcacctgagcgagcagctcctttctcagtgtcaggctcagcccagcctcttccctggcattgggattgtttcataataaacacagctcaggtggtaatgcaaaggacctttcccttcatttctgccccagcttacccactccacaaggagatctcatcatttcctcctgtatacaactcacgtatctcttaaaagtagaatcagatcagagccttatacaaatcaaatatgaaaaactgaaaagctacaaaataataaaagctctggtttgagctctgaaagctcagactgggaagtgatttgaaacagtttataatcatagcaaacacatgccatgctttagaaaatacaaaattgtggctgggcgctgtggctcactcctgtgatgccagcactttgtgggaggccaaggtgggcggatcacaaggtcaggagatcgagaccagcctggccaacatggtgaaaccccgtctctactaaaaatacaaaaacaagattagctgggcatggtggccgggtgcctgtagtcccagctacttgggagcctgaggcaggagagtggcgtgaacccaggaggtggagcttgcagtgagccgtgatcgcaccattgcactcctgcctgggtgacagagcaagactccgtctcaaaaaaataaagaaaaaaaaaagaaaatacagaattgcttaataagttgtttccagccgggcacagtggtaacgtgcctataatcccagcactttgcgaggctgaggtgggtggatcacctgaggtcaggagttcaagaccagcctaatatgatgaaaccccatctctactaaaatataaaaattagctgggtatggtggcatctgcctataattcccaactactcgggaggctgagataggagaattgcttgaacccaggaggcggaagttccagcctgggcagcaagagcaaaactccttctcaaaagaaaaaaaaaaaagttgtttccaaaggaagggattaggaaaaagtagttgtgacttatattaccatatattttaatgaagagatgggttttacttattcaaattagaacagaatttctgattatgaacaatacagacttatgaacaatttggcaaaccccaacagagataataaactcctggctgggcatggtggctcatgcctgtaatcccagcactttgggaggccaaggcaggcagatcaggagtttgagaccagcctggccaacatggcaaaagcctgtgtctactgaaaaagaaaagaaaaaaaacactgggcatggtggcacgcatctgtaaccgcagctacttggaagggtgaggcgtgagaatcgctagaacccaggaggcggaggttgcagtgagtgagccaagatcatgccattacacttcagctcgggggacagagtgagactctgtctcaagaaaaatgaaacttcccatcctcactaactttgcagctccctgtggcccattggagcagcgccccggcctgttagggcatttctcagaagtgatgccctggcagatacccttctccttaatttaacaaaaccggcgacagtcactttctttcagtttgccgtaaggattagtaaatgagtccattactgaacacactatcttaatcttggtgtttgatcacagaaaagtacgaagatctgagctcttctgacgagtcctgccctgctcctcagagacagaggccttgccggaagaagggtgtcagcatccacgagggaccgcgagccctggccaggatcacaggcattggcctgggcggcagagccccacggcctcgctatggtgagtggcccgcgtttcccgagggctctttctcattgcataccaggattttgtgttggcaagaatggaatagctcttaggctcctgaaatgtgggtcgctggacctcaggtggcagcgggacaggtggcccagctttcatgctcagggagactcaggattgagtcctgtgatggaaatgcattggtcacggactagctcttgttttttgctttatctcctggagtttccttttcgttggttaaatttaggaatagaactttctctcctgcagcagaaatgtagctaaggtcagatttcattcatcacataggtgggttggctcatacagggaggaggcaaagcgtgaagttcacttccctgccctgcccataccagctgggtcgggtgcgctgctgggggcaggaggccaagaaaacaggccctgctgttttctcagggcgatgaagttgtactcagaccctcctgagagagggcccgcttgttgacttgctggtgaagaatcctagcctttgggttttccagtctcgttcattctcagattcccagccccagggtgttgagcgttttgctcttggggagtgctggggtttctttttaggggagttgggtttggtgcctactctctattgctgtggtctgtcccagagctcagctggaggtgtgagttatgtcttcctttgatggctgtcacccactcatagccaggccaaggctgctggtctcacaggcctggtggctggtccttctcgggagcaaggcctctttgaggccaggacttggaagagtgagagtagacagtgtttcagccaggggtccaccagtaattgaattcccttctagaccccaggaacaagcagatgtgcagacttctgtcttcccaagcctgggtgctgggttgggaactggagacccaccttctcccatcatcctgggaagggtgagctgactgggccactgggaaggcctctctcgagctgctggccagccccaccacagcatgagggcccgcccgtgtcccgtccgctgagctgtgagcactggctctgggacaccgggctggtcgttctgagtggcagagtctcttccttccaaaaggtccctgccacctgctacagcctgaggtgtggtggggacaggaaggaagctgtcatcctggggctgagttggtaattaatctatatagctgtacaacaaatgctttaacaaaatcatacatgtctgaagccgcttgtgtgcggttctttgtatgtatccacagagaagtaatcatggtggtggtctcaggtgtggtatttcaggggatttttgttttctcataccttgtgaaatttaaattttctataagtgcatatattttatttgccagtaattaagaaatttggggccgggcgcagtggctcacgcctgtaatcccagcactttgggaggccgaggcaggtggatcaagagatccagaccatcctggccaacatggtgaaatcccatctttactaaaaatgcaaaaattagctgggcatggtagtacgtgcctataatcccagctactcgggaggctgaggcaggagaatcggttgaacccgggaggcggaggttgcagtgagccgagattgtgccactgcactccagtctggtgacagagcaagactccgtctcaaaaaaaaaaaaaaaaaattgggggggccaggtgcagtggcttatacctgtaatcccagcactttggaaggctgaggtaggaagattgcttgggctcaggagttgtgagaccagcctgggcaatgtagcaagaccctatctctacaaaaaattttgaaaattagccagatatggtggcccatgcctgtagccccagttacatgagaggctgaggtggaaggattgcttgagcccaggaggtcaaggctgtagtgacccatgatggtgccattgcattccagtctggataacacagcaagaccctgtctcaaaaacagtttagggggcaatgataaatagcatgtgctgattagaaaaacttctccataactaggaaaatacgtaaagaggaaagtaagttccccatggtcccatcaaccagtcctttgggttcttttttgagacagggtttcactgtagcccaggctggagtgcagtggcacgatcatagctcactgaaggctccagttcctgagctcaagcgatcctcctgtctcagcctcccaagtagctgagattacagacatgtgccaccgtgactggtcaagtcagtctttttatgtaaaggggcaaaactggagtgaaattgcctggtatacatgcccctttttctgcttggttttagaggcaggtagagttaggtaatttcatattattgttgttaatttttacctcaaggcctttttccttcctgctcagccaggtctctttttcgccggggttgactgaccagaggaggcccgctaagcgcctgtggttaaaggtcacagggacataaagacacgtggtcgatgggtgtctgtgtgaggtcattagctacctcctgctaaaaggaacactcatggtatagttttctctggtcaggcatctgtaaatacagctgaccatttgctacgttttccccttggaaaagaaatggagagggcccaggcttgacctggctgccagccctcgccccaccaggcacttgcttgggccactgactgaccctcagagcatcttttccacccacacaccacagatagagccatgccaggtcgcaggggcaagtaggtgaggtcatgactgggaagtcacctgcctccatcctgggcctcggcctctgaggaggtttcactttggagttccctgggcttatgggccccattctgtacacagagcaggctcctccccgtggctatgtcaccttcaacagcagtggcgagaaccccctggaagaagagggcctctgctgccgggatgtcacctcccccatcaatgagcgggatgtggagagcagcagcagcagcagcagtcggggtacgtgcacccccacccatccggcccgtggctcaggcaggtcctggagctcctgtgtgcccatccccacttatcccctgggcctggcgctggacacagccatccagcagaggacaggaaaggggtaggtgtggacggccctggttcttgtgaggaatgggagaagcttctggtccagcatccccgtgcggcttaagggagccgttccacagcaacaggtttagctccttgcttgggagcccctgaggctttcagggcaggccccagtaggaatgtctgttataactgcacctccgtgcagcagctgtttccatagtgcccaccgtgtgccaagcactgctccgggtgcttgggatttatcagtgaacaaaaaagacagaagccctgcccgtctgtatagaggggagggtttaggacaggcaggaagtttgaaatataaggaagcaaccgctgcaggccccaaggagtgccctggtggaggcggctcagcccggggcacgcccatgcgcagcacctcggtgagggctgcaggcggacgccctgtcttcccgccctcagaggaacatgctttctgtgccaacctggggcccgtccagagcagcagcagcagcgagggcctggccagagcccaggggctcagcagcgaagcttctgtggagagcaacgaggtacggattctttctttcttggtctcccatagccggtccctggctgggatgcctgacatcccccagttactttaagatgagcatgtatgtaagaagcagctgctgcacgtgtgtgctgcactgggacgtgctgtgtccagggtctggcttctcagacgacagcgaacgcaccggaagcccctgtgtggcgggtggggggtttcacgaagcctctcaagcccctgtgtggcgggtgggggtttcaccaaggctctcaagttagcccgcgcactctttcagatgcacgcctctcactgcaggactcggatcatgcctgtaaaagctcagctcgcaaacaagctaaaagttacatgaagaccaagaatcctgacagccagtggcctccccgcgctgcaactgacagggaaggctttctcgctgagtccagcccccagactcagagggccccctactcaggaccccaggtaagaccgcttgtgaaactggaggttacactcagagacggcactttttgtgacttaggaggcatgtgttgtgtatatgacgtgccaggcgctgctaggagaacagaatggcggtggcatccccatggcctgttaggctccacaggctcacagccggctccatggctggcagccccgctgcagcgcttctactctgttcctctccacggaaaggacctgtctccctgctttccatactggagttggcctccctgagcctggggagaagaaaagcacacttgacctcagagctgcctgcaggagtctgacaagatgtggttgaagcagagacaggaactacacacagtgtgtgcttggtgatggttacagctgccaccatcctcctcctttctgtggtccctctgaccacacattaccttagggatcagaggtgtgactcacagctcagctgtctcacctgtgtctgctgagttctcctaccctgtgtgggcagaagaggcacggagaggagaggcagagggaagctctggttggttatttggtttgtttgttcgagacggagtctcgcactgtcatctgggctggagtgcagtggcgcgatctcggctcactgcaacctcctcctcctgggttcaagcgattctcctgcctcagcctcccaagtagctgggattacaggcacccgccaccatgcccatctaattttttgtatttttagtagagacgggatttcactatgttggccaggctggtctcaaattcctgacatcgtgatccgcccgcctcgacctcccaaagtgctgggattacaggcgtgagccaccacacctggcctggtgccatgcccggcctggctggttatttgttaaagcactggctttgctgttcagtagagccttggatttgccggcttctccctgcagcccctggctcagtgagcaggcacacgtctcggtcccttcaacatacgttgagtggagtctggtcagggtagtgtcctaagtatgtttctttcagaaaatagcttgaagaaaatgtcagagtaacatttgtttgtccattaaaagcaataaactctcaaaagtaggatttctggagttgaaaagtaaatgaaatgaaaatatcactagacgagctcacagcagaattgagcaggcagaagagtcagacaacttgtgaacacaggtcacctgagatcatctcgcttgaggaacagaaagaatgagtaaaaaaaattaacagaaatctgtgatcccctcaagcacaccgacaccaccccatacagtggcattccagaaggagagcagaaacgatgggtgagaaacagcctgaccatctcagtggatcagaaacacggatcttacatccagggagctcggtgaactccagacaggtgaactcggagaagagctgcgcttagacaagtggaaatcagaacatccgacactgagactctagaattagagggcagcgctctccgcctacaaagcattgtcgagatcagcagctccatggtcccttcacagaactgagcatgtgtgggaggaggaggccagtttctggtgatgaacatacattgtccccacgtggccgaccatagtgtgaggactcacctgcctgcaacatcctgccctgcctgagccaccagagtaggaggggacagcctgggcgccacacacaaggcactgtcttggttctgagcctggggaagtggtggggctccgagtggaggaaaacgtctctgcttcgtcgtcagccactacctcccccaacctgtcccctgtgcctgccaggaccttgccgcactgctggagcagatcgggtgtctgaagtacctgcaggtgtttgaggagcaggacgtggacctccgcatctttctgaccctcactgagagcgacctgaaggaaattggcatcacgtgcgtccagaagggccgctctggccctcagcccggggttggggcaaactcccactcatgtaagcgctcttgggacgctgaggcatatcctggtcacattccccccgcaggctgtttgggcccaagaggaagatgacgtccgccattgcccgctggcacagcagtgcccgcccacccggggatgccctggagctggcctacgccgaccggctggaggctgagatgcaggagctcgccatccagctgcacaaggtgagtggctgggtgggggatgggggggcagggtgacacccgtgagttggctccatctctgacagaaaaggtgggtgctgtgtggaggggtcaggtggatgcagtggggagagggccccacacacaggacagggccgtggccaagggtctggcttgaccggccacctcccagcctccccgcgccccccacccccctgcagcgctgcgaggaggtagaggccacgcggggccaggtgtgtcaggagcaggagctgcgcgccgtggtggagagctgcctgctggagcaggaccgcgcccgcgaggacctccaggcccggctgcgggagacgtgggccctggcccgggatgctgccctcgtcctggaccagctgcggtgagtggctctgagctgccctgggctgggtctccagtggtcagccacctggcccctgggcccccacacatcctttcctcctgattttgtaactgaggggtggatttcagggtctggagccaccccacccccatttcatcaggcccttccttcctgcaggcagacccaggcaggagttgggtccgggaatctgcaccggtcgccctcctgctctttagtgcagcctcatggggcactggcccagcccatgagggccagctgcaaggacagggctgagcccctccctcccctagaaggtctgaggtgggggctctgcagcggccaggcctctgctctcaccaatatttgtttctgtgtctggcagagcctgtcaagctgagctgtcatctcgagtgaggcaggaccagccccctggtgcagccactctgggcctagccgtccccccagctggtaagagcagtggcctgactccgcactgggcagaggggaaggtgggggagccctgaagccaggtttgacccagtgggcttggcctggttctccggccggcagccactctcccaggtccctgtgtgcacatgatcccagagtccaaggaaaagagggggccctggggacccaagcccacttcctcacctgtgacaggaaaactgcctatcccccaggggtaggaggtactcgagaaaggccctgtgccttggctggctgtgctgtgctgagaccgccagtgacttctgtagcctccagccagggcccagacccgggtccccaccggcagagctttgccttctctcgggctgacccgggcctcgtagtgtttgctcagcctgtgggaggaagggcacaacagggcttccctgcctcggccttgggaggttgcttagacactgtcaggcgggtagggaggttctgatccaagcaggttctcctggttgcatgggctcagaataaagcagggcctgtggggacgcagacccccagctaactcggtccctgcacctgcaccacagactccaagggctggcaagcgtccctgcaggccatgagcctccccgagctctcgggagccctggaggaccgtgtccgtgagatgggtgagtctccggggaccagacgactgagcgctccttttgtttccgagggaggcaaagggacccctttccagggaaagcgggtttgtgtctctctaccccaaggctgacctcggggctggggccataacgggtgaggggcaggtcacatcctgcagctgagaccccggggcagcaccacccagccctcctgagcctggccgggagaggctcaaggtcatcattcctcagggcaagcactgtgcttagtgacccagagcctggagaagctgcaggtgctgaacgggaagaagtggcgggagacctagcctgcgggccggtgagtgtctgccagcctggatcccgcgtggtgggagcagcagggcctgtctgggcggctgcaggtgtgggtatgcacccacctgtccccctcccttctcaccggggctttttctttcagaatctgacgttgggtgattggtccaccctgaagctgtgtgccagggagtgaggaggacagtgagcaggtagctgccatgtgcagcccaggcccagtgggggccagaggatcaggccccgggagcagccggcagacagaggcaagacgggggctgcggccctggctcggcagctcgggccagcactgaggcgggacgagggcctcacccagaacctcgtggtgaggcccagagttcatgggctgccctggcccataccaggcagggccctggggggaaagtgtatccatatacacgcacaggtgccaactgaggtgggaccttaggaatgaggactggggcacctggaaaatgccattttttggaaaataaaatttaagaacagct

SEQ ID NO: 15395 - DNA, 37868 bp, Homo sapiens
ctgaccggaaggtccgggtgcgggacgtgtgcattccacggcgcccgggagctgtcccggtgccgacccgcgagcttcccggcgtgctccgcgccctcccgcaactacttccggggcgggtgccgggggcggtgccccggcgagggagcgtggcggcgagctgtttggggggggttggcgacggcagcccgagggcggcgcaaggcctgaggcccagcacaggtgggttccgcggcggcccggccccagcacttgccggcacctgcagcccgcctagacccggcgctcgggcgtcccgcgctgcacttgctcgccgcgtgactggaggaccgagcccccacattttctttatgtggttgtggtgggggcacagtaatgccctgtgcgccgtagcgttcctgtggggatgtggccggggggcgtcgggaagcgtcactgctgtgagttacgggtttgtcggccagggacccgccccggggccagtgagctacctttgcgatgcggttccacggggcgagagggggtgcctgggtgctttcacagacctcctctgtgggcgtgacagttaccaccagcatcacatttgttaagatttttaaaaattttttaatttttgtgggtacgtagtaggtgtatatatttatggcgtatatgagagattttgatacaggcatgcagttcgtaataatcacatgtaaaatgggggtctccatcccttcaagcatttatcctttgtgttacaaacaatatgattatactctttgaattatttttaaatgtgcagccgggcgcggtggctcactcacgcctgtaatcctagcactttgggaggcaaaggcgggcggatcacctgaagtcaaggatttgagaccagcctggccaacatggggacacttcgtctctactaaacatacgaaaactaggctggcatggtggctcatacctgtaatctcagctactcgggaagctgaggcaggagaatcgcttgaacccaggaggcggaggttgcattgagccgagatcacgccgctgcactctagcctgggtaacagagtgagattatgtctcaaaaaaaataataataaataaataaaatgtgcaattagattatattgactatagtcaccctgttgtgcggtcaaatactagatctttttttttttttttttttttttgagacggagtctcgctttgtcgcccaggctggagtgcagtggcttgatcaaatactagatcttattcattctgttttttttgtatccattaagcatccccaccctccactacccttcccagccttggttacactagaagtaaccatccttctactttctatgtccatgagttcagttgttttgatttttagataaccacaaataattgagaacatgcaatatttatctttctgtgcctggcttatttcactaaacataacgatctccgcttccatccatgtttttgcaaatgataggatctcattctttttttatggctgaatagtactccattgtgtctaagtaccacattttctttaggattcactgtaaaggtaacagatacttagcattttcagaatggacagaaccaaaaagttgaatgaaaactaaaacgtcttatctctaatgctactttacaccacaccactcgggatgggacattttagttttcactttagtgttttttttttgtttttttttttgagacagaatttcgctctgttgcccaggctggagtgcagtggcttgagctcggctcactgcaatcgcctcccaggctcaagcgattctcttgcctcagcctcctgagtactgagactacaggcgcccaccaccacacccagctaatttttgtaattttagtaaagatgggagttcaccattttggccagggtggtctcgaactcctggcctcaagtggtccgtcacgcttggtctggttctcattgtccttcagacctctggggatgtcagatatgcaagtctccagtaaatagagaacacggcctcaccctgcaggaggcctttggcgtggaagagacatgcccagtgaaggcttgagggaggtatggaagggactctgaactgaccctcagctcgtttggtttcttatccaggcttcgttggccagggctgttagggtgggattctcacctgcaaagtgagggaagggcactgcacgatcttgggctctgctagctgaagaggtggtggctccaggaaggagggctttgcttgccccaccgcacctacacacactcttcaccaagggtctgtgaagtgttcgtctcccacattggtggcttgtttctttagccatcttggctgtcacctggggcttggaagcattctttaatagaaactgaggtcctcatcgcatctattaactaccatagcacctgtaggtcatcacaacctgacaaggcctttgttttcgcctttgctccctttcctacccttgtttcctggcactcttgtacctaaggattctactaggaagctgatgaccttgccttgatttggggattcctggtgtgccgttacccatgtaggcccatctcggggaaagtgttacctcaccagttcaccggcctgttatatttccccccatagctctctcttcaaaggatgcctaagtggattcctattcagttgacggttgctgcgtgccaccagtcacatcctggtttgtctgttggggaattgctttctatttttttcagaaaaatttatttttacttttttgaaattttcaatttcataaccattccagaaaaattaatttatatttaaaatttacaggccaggtgcagtggctcacgcctatatttccaggactttgagaggctgaggcgggcggatcacctgaggtgaggagttcgagaccagcctggccaacatggtgaaacccccgtctctactaaaaatacaaaaattagcctaacatgatggcgcacacctgtaatctcagctattcaggtggctgaggctcaagaagcccttaaacccaggaggcagaggttccagtgagctgaaatcatgccactgcactccagcctgggcaacagagcgagactgtctcaaaaaaataaataaaatttacatacagtaaaattcattttggtgttcagttctgtggtttcataaaggcatggagtcacagatccaccgtcacagtcatacaggtctatcgtcccccaaattccctctctgccccaacctccaaccctttaattttgccttttccagaatgtcatgtaagtgaaattatactgtaggcaggcttcttccatttagcgtaaatcatttgaaattcattcacgtgttgcatgtcaactgttggatccttgtgtttaatgctgagtagcatccattatatggatgtgccaccgtttgtttatccattcttttatgtatcataatagcagcctttttagatatgtccccgttagacagtgaggcactagggattggagttgctaagtagcagagctgcttttttgttgttttttttttttgttttgtttttggagacaaagtcttgctctgtttcccaggctggagtgcaatggcgtgatcttggctcaccgcaacctccgcctcctcagttcaagtgatgctcctacctcagcctcccgagtagctggccttcatgcccagctaatttttgtatttttagtagagacaggatttcaccatgttggccaggctggtcttgaactcttgacctcaagtgatctgcccaccttggcctcccaaagtgctgggattacaggtgtgagccaccgcaccgggtccaagctgaattttgatcaaaccccaaatccagggttcttccccaccacatcaaggaactgattgggttaaacaacccaattagcatttcttcactgcccatccaagaggttgtcaggttcctagagttggtggagaattctcttttacctggtgcctgcggttggaaggaggagcaggtactccacagttaatgcctcaccatatgtgctcctctttactggtgtgatagcaggctcaccagatttagcatggttgggactgcccaaagcatacattatttcagcaaataaatttgtctgagttactcccggggttgactgcactgggttatcagtctgctagtgcagtggtgtagcaggggcaggaccagcctgtttcatgccctggaacaaccagccaggaaagatctaacccttgggccttcctcctcagtgatgtccgagctcagcgatgaagccagcgagccggaactcctgaaccgcagcttgtccatgtggcacgggctcgggacacaggtcagcggggaggagctggatgtccccctggatcttcacacagctgcttccattggccagtatgaagtggtgaaggagtgtgtgcagcggtaagagatctcggggaacttcctctcacattttgagcagcgcagtgatggcttcgatcccacgtgatggggctttgcacacagttgtggatgtttaatgcgtgtagaataggttaacctgcttatctcaggcagctgtcagtaagtattgatgctgagccctgacaaagaggccgtttttattcctaggaagaaaaagagggagtaaactttgatcagaagcttataaacagtcattctttaaccagactaattttattcactaattgcagaaatgcccaaacaaacaagcaaaataaaaataaagacagaaagtgatggcctggtgcggtggctcacacttgtaattccagcactttgggaggctgagatgggcgggtcacttgaggtcaggagtttgagaccattctggataacatgatgaaaccccatctctactaaaaatataaaagttagctgggtgtggtggcatgtacctgtaatcccagctactcaggaggctgaggcaggagaatcgcttgaacccgggaggtggaggttacagtgagctgagattgcgccactgcactctagcctgggcaacagagtgagactctgtctcaaaaacaaaaaaaagaaaaaagaaagtgatccctggccttcttttcccggagggttcattcgatccctgtgatccctgttcccctctagcttctgccatggaggaggagagaggctgggctttcagtgcctctggggaatgacctcccgacgtcactgcccacctgccctttgctaatctgtgtacaatagttagagacaatataaagcccctggcagggtccatggctgcgtcttgcccatagtaggatgtgatcatcttgtttttggaaaagggtcgtctcctcacttccacccccttatgttccacacacagcctaactctgtctcctggttctcatttgatattgtggtgcagcgacctctcttcctctctctgcgtgcctcttccagttcccagtgagccaaagcaaagcattgctgaagccccaggtctccggttcccaagttgtggccctcacttagacatacccagcccatggagtgctggtgcaccttggtacagggtggtctgttgcgctccctccacaggaggctctaggcataggcagctgggtatgcagtcagtacggcccctcaaagggtcacgtttggaattctcaggctcttaagtctttgggtgtcctgttaagatgcagagtccataaccgctccatagaggagcagggggaggcgtttgtgttgtgatgggattttgacactagctgaggtggaggcttgctgatagtaagcacaggatggggcctgaggggagctgggggcatcagaaggaaggggtggggctgaacgaggagtggtaagagagccccagggagatgctctgctgttgtgtaaaggaagatagtgttaggacgagctgggtgcattcgagccctgctgcagaggcatctccatgcagcccccctggccaggggctgccactgaaccctggtatcaggaccttctggaatggctgcccaggtgtgcatcccagagtcactgagggctgccaggcaatggaaggtagttgcctgctgtggtctaatatgtgaatcccggctgggcgcggtggctcacgcctgtaatccagcactttgggaggctaaggcgggtggatcacgaggtcaggagatcgagaccatcctggctaacacggtgaaaccccatctctactaaaaatacaaaaaactagctgggcgtagtggcgggcgcctgtagtcccagctacttgggaggctgaggcaggagaatggcgtgaacttgggaggcggagcttgcagtgagccgagatcgcgccactgcactccagcctgggcgacagagcgagactctgtctcaaaaaaacaacaaaaaagtgaatcccgtaaaagggacagatcctggggttcagtcaccagttgttatcccctctgcaggcaagaactggggaagggaaagaaggcctgtgggcgttaaccatgtaggatcccaggtaaccatgcaagtgggtattattttaaatgtgactcccttgtcccaaccccagagtcgcagctaggaagcccacagttttttcccatgggaaaatgcattgccagaattttaacagcaatcagtgagaaagatgggattctttggtcacagatttttcaagaatgtttctttaaggtgaggtgacaaaggatgaatcagtggcggtgggacttgtccacggtggagtcccttctttcctcactgctcctctccacccagcagtgggctagtagatgccaggcctgtggtggtcagggtttttcaactgtggctgtgttgacaatccaggctggatcattctttgctgtgggggctgtcctggacactgtgggatgtttagcggcagccttggcctccagcagcccttccctgcccagttgtgagaaccaaaaatgccttcacacattgccacatattccctggttgagtgccatctgcctatctggtggtgtgaaagagcatagctggccttgggctaggaggatgcgaaatcagagcaaggagacgaaggctcagggcctcacaaggcagtgtacgagcaactgtcagcatttttctgcctgcctgcctccaatccccacaacgtccagggtggcagataacttctgcttcctgtcaactcatcccgcctggcctagcctcgccaccagctttggtgaaccccacatgcgaggcggctggccatgtctagcatatcttgcgtttgtttaggagagagttagatttgaataagaagaatggtggtggctggaccccgctgatgtatgcctcctacattggccacgacacaatcgtgcacctgctgcttgaggcgggggtgagtgtgaatgtgccgaccccagaagggcagactccactgatgctggcctccagctgtggcaacgagagcatcgcctactttcttctccaggtgagctacgagggaactcaggcccagaaacctgaggggctccgtggccaccctgacagagatgcgaaccactgcaggccacggtgttcgtgtgtgctcgtgtaatcacttctgattcttgcagcatggccgcctggagggcgcccgccccacgcagaggagatgaggccgtaacgcacgttctgtgttctcttgaagcaaggtgcagagctagaaatgaaagacatccagggctggacagccctcttccactgtaccagcgccgggcaccagcacatggtcaggttcctcttggacagtggagccaatgccaacgtgaggtgattgccacatctttagtggccacaggagtggcctaggtgtcatctgactctaaggagggtggctctggaggcagctaaccagagtttagggccaccctgcttcggcacgagaggctcaagatgaggggtaggaccagagtccttccaggcacaggccttttcgtacatctgtgagatgcatctcttcaagccctctcagcttccttttctttatctgaaacccacctgggtcatacagttgtaagaattacatgttttattgtatgccaggggcctaacatactgaatggcatttaaatgtcatacattacatgcaaattccttccattttcttgctttttgtatggatgaggtgaggtgatgctttgaaacagtcatgaggccgggcgtggtggctcacgcctgtgatcccagctctttgggaggccgaggtaggcagatcacgaggtcaggagatcgagaccatcctggctaacatggtgaaaccccatctctactaaaaatacgaaaaaattagctgggcatggtgacgggcgcctgtagtcccagctactcgggaggctgaggcaagagaatggtgtgaacccgggaggtggagcttgcagtgagccgagattgcaccactgcactccagcctgggtgacagagcaagactccatctcaaaaaaaaaaaaacaaaaacaacagtcatgagttttggccgggctcagtggctcacacctgtaatcctagcactctgggaggccaaggcgggcagatcatgaggtcaggagttcgagaccagtctggccaacatggtgaaaccccgtctctactaaaaatacaaaaattagctgggcgtggtggcaggtgcctgtaatcccagctactcgggagtctgaggcgggagaatcacttgaaaccagaaggcagaggttgcagtgaactgagagatcgtgccactgcactccagcctgagcaacaagagcaaaactctgtctcaaaaacaaacaaaaaaccagtcatgagttttataagttggaagtgggattgttgtctaaagcttgtcatgataataatcacctttgaacaaacgcagcgggtaccaatgcagcacccaccctggctgtcattcattctaagacacctgataattttgtatgccactaagaaagaaaaaatatgctactaattaacattcaactcgcctgttgatttaaagatgttttctgacttgagagatgttaaaatatgaacactgtgtgtcttaagatggatgaaaaccagcatttcccatgcatggttcctgacttccaaaccagcatgagacaaggagggatttggaagccctctgaagacagtgccgagttagcataaccaagcatgaaaagcaagcttcaggagctaagcgtggcaaagatagcttagatcattagtacttgaacttttcagagtgggttcatggaggacgttgaacttgaagccaggatttggatgaatggatgggagatgctggctttctgtgaggaattagaacagctttttgaatatgattgaggtggagatttcagaggtagccagtgggaatagccaacaggtgggacgacaggcagacatctgtctttaggacaaagaccagccctggggacagacaccagaagagtaaatggagctgatgtgttatattcactgttctcatgtcacctgttaattctggaaagggacagtgttctacgcttagggatcggtgactcgtgcactgctcagggtttatcttcagcagggagtttttgcctggcggaacttgtctcttccaatcatctgactgtggcccacatcttgcagggagccgatatgtggatttactcccttgatggaagcagctgctgctggccatgagataatcgtgcagtattttctgaatcacgtaagtgaccctgattattagcatgtaatgtagtcacggcaaatgaggaatcatattactgaagtataagctattacagaattttcctttgcacagaaataactttcattcatttattcaacacattttcattatctattgacgcccggtgttgagtggtgcttaggcattaaggatacagtggtgagtagaaatagacacctattcctgtaataattttgaaaatactatctgaaaattatggaaaaatattttaaaagtaaatagcactcataatcctgtcacttagaaaaattatatagaataagaaggcagagatcctcctctctttttcaacctccctgatgcccacttggtttgagaaagagctgccctaggacttttcctctgctgtggaaagatgtgtctgtaggcaagtgtgtgcacattgctttgtgttttgaacaaagtgggattctacgtatagtctgtaacttagagacatcttatagacatcttatctttgtacagtattccgtgtacaatctgcctcagttaatttaatgagtttcttattagtagaaacttagtttttaacattttgcaattataaacagtgttccgggaatatccttttacacatagctttaatacatttgcagttatttctgtatgttgtatttctgttttattttattaatttatttttttgagacatggtgttgccctgtatcccaggctggagttcagtggcgagatcgtggctcactgcagcttcagcctcctgggctcaagcgatcctcctgcctcagcccccaagtagctgggactacaggtgcatgctaccatgccccggctaattatttaattttttttttttggtagagttgggggtctcagtatgttgtgcaggctagtcttgaattcctgagctcaagcgatcacctcagcctcccaaagtgctgggatcacaggtgcaagcctgtccacacagaaccttgtacataaatattcatagcagtattattcataattgccaaaaagtagaaaaacccacaagtccatctactgaggaattgataaacaaaatatatatctgtatagcaggatattattcggccctacaaagtaatgcagtactgctgcatgctgcggcaggggtgaaccctgatgcgttaggctgggctgggtgcggtggcgcacgccggtaatcccaacactttgggaggctgaggccagagggtcgcttcagccctggagttggaggttgcagtgagctatgattgcgccgccacactccattctgggtcacagagtggatcctgcctcaaaaagaaaaagaaaaggaaaacattcggctcagtgaaagaagccagacacaacaggccacacactaggtgatttcactcataggaaatgtccagaataagcaaatacatagacagaaaatagatgagtggtttcctgggtcttggggaatgggaagattggggtgataaaaatgtgctaaaattgtttgtggtgatggttgaacaactgtgaatatacgagaagccgttgaattgtacattgtaagtgggtgacttgttggtatgtggattatatctttataaggctgttaaacccaatggggggaagtgcaggcggtcctgatgaattcccactaccaaggttgtctgttgtcctgcccaccagtcatagacaaaggtgtccattttctcttgtcctcaccagtcctgatgtcagtcaaccttttgtcaatctggcgggtgaattgtagcgtctcattttagtttgtccttgttagagtagttgaaatttttttctttttttttttttttggagacagaagtcttgtgctgtgtcgcccaggctggaaggctggagtgcagtggcgtgatctcggctcactgcaacctctacctcccaagttcaagcagttcttctgcctcagcctcccgagtagctgggactgcaggcacccgcccgcacacctggctaattttttgtattttagtagagatgaggtttcaccatgttgcccaggctgctcttgaactcctgaactcaggcaatccacccaccttagcctcccaaagtgctaggattacaggcataagccactgcgcccagccagttgaacatttttaaattgatttcttagccatttgtatttcttttttttttttttttttgagactgagtctcactcagtcgcccaggctggagtacagtggcatgatctcagctcactgcaacctccacctcccaggtttaagagattgtcctgcctcagcctcccgagtagctgggactaaaaatacaaaaaatcccggctaattttttgtatttttagtagagacaaggtttcaccgtgttagccaggatggtctcgatctcctgacctcatgatctgcccgccctggcctcccaaagtgctgggattacaggtgtgagccactgtgcccggctggccatttgtatttctcttacgagctgtctatgtttattgcccaattttctattggatagtttgtttttttctcacttattggtgggaatttcttaaatagtgaaaaattcacatggtatctctttttaacaaagaattttgggacacaacatgcacatggtacacatgcagaccagaaggtgggtgcaccgcaggcctgtcccccaccctgcctgcgtctccttggcaccctccccacgggcgactctgggaatacacccacacatgctcatggtcctgccccatgtgcagctgctcccatcttgcattttttaaaaaacttaatcatgaagatttttctatattggtgtataaagagacggggccaggtgcattgtctcgctcctgtaatcccagcactttgagaggccaaggcagacagatcacttgaggtcaggagtttgagaccagcttggccaaggtggtgaaacccgcctctaccaaaaatacaaaaatacaaaatacaggtggctgacgctgtaatcccagctacttgggaggctgagacaggagaatcacttgaacctgggaggcagaggttgcgatgagccaagatgttgccactgcactccagcctgggtgacagagtgagactatctctaaataaataaataaataaataaataaataaatcaataaatcaataaagagatggggtcttgctctgtccctcaggctggagtggagtggtgcagtctcagctcactgcagccttgacctcctggtctcaagtgatcctcctgcctcagcctcccaagtagctgggattacaggtgcgtgccaccacgcccagccaatttttgtattttttttgtagagatggggttttgccacgttgcccaggctggtcttgaactcctgagctcaggcagttcgcctgcctcggtctcccaaagtgctgggattacaggcacgagccaacgcacccagcccctctcttttttttttttttttgagatggcgtcttgctctgttgcccaggctagagtgcagtggcacgatctcggctcactgcaacctcagacttccgggttcacaccattctcctgcctcagcctcccgagtagctgggaccacaggcgcccgccaccatgcccagctaatttttcatatttttagtagagacggggtttcaccgcgttagccaggatggtctcgatctcctgacctcgtgatccgcccaccttggcctcccaaagtgctgggattacaggcgtgagccaccgtgcctggcctctcttttttttttttttttttatggtggcatggtattccctgtagggatgaatcagagtttttttgtttgtttgtttgtttgttttgagatggagtctcgctctgtagccctggctggagtgcagtggcgcaatctcggctcattgcaacctctgcctcccaggttcaagcgattctcctgcctcagcctcctgagtagctgggattacaggcgtgtgccaccacgcccagctaattttgtatttttagtagacagggtttcggcatgttggtcaggatggtcttgaactcctgacctcaagtgatctaccactttggcctcccaaagtgctgagattacaggcatgagccactgcgcctggcctaccgttgacatttcttacacgtctttttaagcacatatgggaatttcttcaggagcttaggatgtgttcttcaaagtagagtctttgttgtgtgaggtgggttcagtcggtagtgggtagtgtaaacttgctttgttccatagtggtcctggttcacacccctccccttagggtgttagacttcttttttttttttgagatggagtctctctctgtcacccaggctggagtgcagtggcgcgatctcggctcactgcaacctctgcctcccaggttcaagcgattttcctgcctcagcctcccgagtagctgggactgtaggcactcgccaccatgcccagctaatttttgtatttttagtagagacagggtttcaccatgttggccaggatggtctcaatctcttgaccttgtgacccgcccgccttggtcttccaaagtgctgggattacaggcgtgagccaccgtgcctggccttttttttttttttttttttggggtggggtcttgctctgtccccaaggctggagtacagtggtgtgatctcagctcagtgcaacttctgactcccaggctcaagcaattcgcctggctcagcctcccgagtagctgggattccaggtgtgtgccaccatatccagctaatttttgtatttttagtggagacagggtttcaccatgttggccaggctggtctcgaactcctgacctcatgatctgtctgcctcagcctcccaaagtgctgggattacaggcgtgagccactgtgcctggccaggatgttagactttttggctccctggccatttgggtttctttttctgcaaataattatttttgtattttttatttattttttttatatagggtcttgctttgtcaccacactagagtgcagtggcctgatcatgggtcattgtagtctcaacctcctgggctgaagtaatccttctgcctcagcctcctcagtagctgggactacaggcacgcactaccacgcctggctgttttttttttgtagagacaaaaatctcactatgttgcccaggctggtcttgaactcctggcctcaagcaatcttcccaccttggcctcccaaagtgctggagttacagacctgagccaccatgcccggccagataattctttgacagataatcctgctgacatgaactagacttccttaagacacatcatagaatcaatagcccagaaccataaagagcctctacttgtaagtttagagtcattttaagtaaggtagaactggagatcataagagatatgtactcttataatttttgattgtatgtttgtttctttttgagacagagtctcactctgtttgcccatgctggagcacagtggcgcgatcatagtttgttgcagcctcaacctcccaggttcaagggatccttgcaactcagcctcctgagtagctgagaccacaagcgcatgctatcacactagctgatttgatttttttgtagagttggggtctcactaagttgcttaggctggtctcaaactcctggctgcaagtggtcctcccaccttggcctcccaaagcgctgggattacaggcaggaaccacggtgcttggccaacaatttgcatgcctttaccacattccccaaatgttaacatttcacctcattttcttatcagtctctttatgtataacatgcatatgttttctgaatcatttaaatgtaaattgtgacataatgccccttttcccctaaatatgtatttcctgagagtaagaatttcattatgtatttcctaaaagcaaaaatgttctctttcccagtcacacaaaattatcagactcaggaactcaacactgagttcttcctccagcacttgacaagaatcaaagtgttggttagtgactgctttgggggatggggcaggactggcagcaggtggcccgatggcctgggtggtttgcctgccagcgatgctggtgggcaagccctgcctggaagctcctctctcccacgtttttcctgccgcccagtagttagaccacctggagccagaggagggggcccacccggtttcccagcctgtccctccagagctgggctccatttctggaggtagagaatggggcaagtctgggcatcttgtgctctttgctaggggaggaaagggctgtggctgctttccttgtcccccatttcccttctgccagtggggccaagccccagcagctcagtcaggagaagaggatatggatctgtctgggcctctctctttaagagaaagttgattcgtgccttccggatagtcttgttccagggtttctaaactttctgatcccaccttcatgttaaaatgagttttgatcatgtgtctctttagtaatatggacattataaaataggaaaaaaaagtctcttaaagcctaagtagttaaaaatttattttcacatcaggcatagtggctcatgccagtaatcccagcacttttagaggccaaagtgggaagatcgcttgaggctggagttggagaccagtctgggcaatacagtgagaccttgtctctaaattaaaaaaaaaaaaaaaaaaaaaattggccaggcatggtggctcatgcctgtaatcccagcactttgggatgccaaggcaggtggatcacctgaggtcaggagttcaagaccagcctggccaacatggtgaaaccccattagcggggcgtggtggcgtgcccctgtagtcccagctacttgggaggctgaggcgggagaatcacttgaacccggaaggcagaggttgcagtgagccgagattgcgccattgcactccagcctgggtgacagagtgagactccgtctcaaaaaaaaaaagccagttgtggtgtgtgtttgtaatcccagggaggctgagaagggaggatcacttgagctggggaggtcagggttgcaatgagccagtgtaatccagcgtgggccacagagtgagattctgcctcaaaaacaaaaccaaaaatatataacgagttaaaatcctacagtaaagaggctactgttttattctggttaaaccttagggttccttctatcaaacttaaactagaattttttttttttcttgagatggagtcgccctctgtcgcccaggctggagtgcagcagcttactgcaatctctgcctcccgtgttgaagcgattctcctgcctcagcctcccgagtagctgggattacaggtgtgtgccaccactcccagctaacttttgtgtttttagtagatacaggctggtctcaaactcctgaccaggctggttgttggccaggctggtctcaaactcctgacctcaagtgatccgcccacctcagcctccaaaagtgctgggattacaggtgtgagcctctgtgcccagccaagaaattattttttatttttgagatagagtcttgcttcgtctgttgcccaggctggtgtgcagtggcgtgatcttggctcattgcaacttccacctcctggactcaggcaattctccttcctcagcttcctgagtagctgggagtacagacgtgtgccaccacgcccggctaatttttgtatttttagtagagatggggttttaccacgttttcccacattggccaggctggtcttgaactcctgacctcaggtgatccacccgtctcggcctaccaaagtgctgggattacaggcttgagccaccgtgcccagcttataaattattgttattatttattattatttttttgagatggaatctcagtctgtcgtcgaggctgtagtgcagtggcgcgatctcagctcactgcaacctccgcctcctggattcaaggatttctcctccctcagcctcctgagtagctgggatacaggcacgcaccaccacacctggctaatttttgtattttttagtagagacggggtttcaccacattgcccaggctggtctcgaactcatgacctatgatccacccaccttggtcccccaaagtgctgggattacaggcgtgagccactgtgcccggcctataaattattttttaaggcacaaagtctcataggtaatttttaatcagagtcaaaagtaggatggggggcactctagaaagtaaaactccttatactttgtgaaaacacagttttttgtcctgtatccctgcccagagaccacctctgcctcccccaccaactacatatgggggtcaaggttgaggccccctggtctaacgggagagacagttgccgtatgggtggtagcaaaactccttaagggttgtgatttttttttttttttttttttttgagttggagtctccgtgtgtcgcccaggctggagtccagtggtgcgatcttggctcactgcaacctccacctcctgggttcaagcgattctcctgcctcagccccccggagtagctgggactgcaggtgcccaccaccacgcccggctaatttctttttgtatttgtagtagagatgaggattcaccctgttggccaggctggtatggaactcctgaccttgtgctccgtccacctcggcctcccaaagtgctgggattacaggcatgagccacggcgcctggctgtgccttttttctcttaatgatgttttgtgcaccctagtccgtgtcaccgcaggtactcccacccaccacgtaaatgggcgggaggcgctctgttttctggatatgctctcacgtagctcattaatctcttattttaagttccttctgattctcactatgctgaatgccacagtgaaaattctaaattgtagtgtatgtcctgcattatttccttaggcgccgctgcacttcagcctgggtaacagagcaagatcctattaaaaaaaaaaaagcaaacatgcttatggtagtacattttaaaaacatagaagattggaaaattggaaaaatccccatcaaaaatagtaaataacttaaaaatagcaacattttgggtatgttaccttccaatattgttttctgtgtaatttttttggtctcattttgccggagttgtaatgtatatgtagttttgtatcatgatccttttttatttttttgagacaaggtctcgctctattgcccaggctggagtacagtggtgcgatctcagctcgctgcagcgtcaagctctgggacttaagtgatcctcctgcctcagcctcctgagtagctgggactacaggcatgtgccgccacaccctgctaattttttattaaagatgctccccctttccggggtcccgcctcctcctctgagctttggctctggcttccctgcctcccccagctgcctggtctgacaggagagaaggacagttacagtgtacagtgacaccaaaaacatgctgtattgattatagtttatttttttttcttgtagaggtgggttcatgctgtgttgcccaggttgttgtccaactcctgagccgagcgatccacctgccttggcctgtcaaatgctgggattacaggcatgagccacctcacttggccatgatcctttttcaacttgatcatacagctgtttgtaaatatcaccatctatggcaataacagaactgactgcttatccccctgagcattcaagttttctctaggtaggttttcattattgtgaatatgctgtgccaaacatcctttttttttttttttttttttttttgagacagagtctcactctgtcttcaggctggagtgcagtggcatgatctcagctcactgcagcctccgcttcccgggttcaagcaattctcctgcctcagcctcccgagtagctgagactataggcgttcaccaccacgcccggctaatttttgtatttttagtagagacggggtttcaccatgttggccaggatggtctcaatctcctgacctcgtgatctgcccacctcggcctcccaaagtgctgggattacaggcatgagccaccgcacccggcctgtgccaaacatctttgtgcactaaagccttttctgtatttagggttatttccttagggtcatggaagtggaattgttgcgctgcaagacctgtaaatacattatagagctttggatcaaagttacgaattctgcttcagaggatggtgctttcattctgactggtttaaaaggctgctttctttgaagacaagcgaagtgagtgggacacagcccaggcgcagaaggtgaaggctgggatctccgcatggtggctgccagccccctgcaagggaggtcatgagcgtgggagatgactccccagcccccagccctcctcatccttgtccctaagaagagagtgagagcaaaacttgtggctgcggtgcagacaagcctgcctctttctcatgcagatgtgatgtttcccacacagggaggcagtcagaaaccagcatatgcccttctgtcttcccagccagcagcccaggaagggcaggtgctttgaaggagaggcccctaaccccctttcacggacattcacagggagtcaaggtggacgcgagagaccacagtggagccacagcccggatgctggccaagcagtacggacacatgaagatcgtggccttgatggacacttactcgccctctctgcccaagagcctctatcggagcccaggtacccacacctgccagccgcgccctgctggggtctctggttgccttgagctttaggtgacctggcagagaaagatgtcccccgcttccccggctcccaccttctctgagatttggctctgcctcccccagctgcttacatgtcaaggttgaggcccctgctctaacaggagataaggatggttacgatggagagtggtacaaaaccaggctgttgtgaatgtagaggctttctgtagtatgcttgactaccgagtaggggcaggcccctcttagttttctgttttcactgtttcctgagctatggcttgttcattcttctatatgaacttgaatatcaacttgtctagctccttaaaaacagtattgatatttttactgagattgtgacaatgtataaattaactatatctttgtgttgttgtcttatccaagaacaagggatgacttcttgttccaatgtacttttgggtcttgcaggagggttttaaatttttcttcatctacattttgcatgtgacttaagtttattcctaagtgtttgatcatctttgtcgctattgtaaatggggttttccctatcattatatcctttttttccccccaactctcagggtattaattattcagtgctatttattttttatttcagtaggtttttggagaacaggtggtggttggatacgtgaataagtcctttagtggtgtcattatatcgtttcactgcatattgtcagtgcatttgaaggcagtggatttctgcaaacttttgttttttttttgatacgggagtttcgctcttgttgctcaggctggagtgcaatgaagcgatcttgcctcaccgcaacctcttcctcccaggttcaagcaattttgcctcagcctcccaggtagctgggattacaggcgtgcaccaccatgcccggctaattttttgtattttcagtagagatggggtttctccatgttggtcaggctggtctagaactcgcaacctcaggtgatccacccatctcagcctcccaaagtgctgggattacaggtgtgagccactgcactcagccctgcaaactaattttatattctgctaccttacagaattcttacattgttcaggttagttttgttattgattctttagggctttacaggtgtactaacatataatctttaagtatcgatggatacactgcttcctgctgattctcatgactctgactttgttgaattgcaccgttcttttgtttagttgctaacacctctagctcattgttcaacatagtggagatagtgagcctccttaccttggtcctgatcttagtggaaatgccacgttacatgagaggctgactgtaaaagggaaggcatatgttattttagcttattaacaaagtattcctcagttcttctattcctgagtggtgttttacaggagtaactattgaattgtgttcccatatctttggagacgatggtgaattttcatatggtagattgtcttcatgaacctcctaataatgaatcaaccttacattcttggcataaatcccacatgttgtactattttaatgtgtttttgaattctgtttattaatatttagtatttttctatggatattcagtcataagtgatactggtctatagttttctttcttctttttttttgtttttgaaatggagtcttgctctgttgcccaggctggactggagtggcgagatctcagctcactgcaacctccgcaacctccgcctcctgagttcaagcaattcttctgcctcagcctcccgagtagctgggatcacaggcgtgcaccactacacccagctaatttttgtatttttagtagagacggggtttcaccatgttggccaggctggtctcgaactcctgatctccagtgatccgcctgcctcagcctcccaaagtgctgggattacaggcgtgagccaccgctcccggcgtggtctatacttttctatttttgttctgtctatcaggtatgggtatcagtgtttacttcataaaaataatttggaagttttccttccttttttgtgttctaggacaatacacgtagcattagtgctacctggtcttagaagttttgatagaatcctcccatgaaaccatctggtctctttctgtgaggtggttcctcgataacagtttttctatttcttctatagagattggcctcctcatactttcttttcttatggggtcagttttggtaaattatattttcctgagagatcacttcatctaggatttcagacttatctgcagaggtctacaagataatattttctccctttttttttttttttttttgagacagagtttcactcttgttccccaggctggagtgcagtggctcgatcttgactcaccgcaacctctgcctcccgggttcaagtgattctcctgcctcagcgtcccaagtagatgggattacaggcatgcgctaccatgcctggataattttatgtttttagtagagacagggtttctccatgttggccgggctggtctcaaactcccgacctcaggtggtctgcccacctgggcctcccaaagtactgggattataggtgtgagccaccgcacccggccaatttttttctccttttaaaatattctgtttcagggccaggcgcggtggcttatgcctataatctcagcactttggaaggccgagttgggcggatcacctgaggtcgggagttcgagaccagcctgatcagtatggagaaaccccatctctactaaaaatataaaattagctgggcgtagtggtgcatgcctgtaatcccagctactcgggaggctgaggtgggagaatcccttgaacccgggaggcagaggttgaggtgagccgagatcgtgccattgcagtccagcctaggcaacaagagcgaaactctgtctcaaaaaaaaaaaaaaaaaaaaaattctgtttcaggctgggtgcagtggctcatgcctgtaatctcagcactttgggaggctgaggcgtgtggatcacttgaggtcaggagttcaagaccagcctggccaacatggtgaaaccccgtctccactaaaaatacaaaaataagccaatgtggtggtgtgcgccagctactctggaggctgaggcaggagaatcacttgaacccgggagggggagattgcagtaagccaaaatcacgccactgcactccagcttggcgacagagcgagactccatctcaaagaaaagtaaatagataaaataaaacaaaataaaatactctgtttcagtggttattttctcctgttattatctttttttggcatggaaaatattgatttattttttgtgacagggtcttgctttgtcacccaggctggagtccagtgacccaatctcgactcaatgcaacctccgcctcccaggctcaaaacgatccttctacctcagctctacgagtagctaggactgtaggtgcaccctaccacgcccagcttacgtttgtattttttgtagagaggtggttttgccatgttgaccaggctggtctcaagagtcctgagctcaagcaatccacccgcctcagcctcccaaagtgctgggactacaggcatgagctactgcacctgacctggaaaatatttatctcatttttaattgacacaaaataactacatatttatggggtacagtgtgtgatgttttgatacatgtatacactgtgtaatgatcaaattaaggtgattagcttatccatcacctcaaacatttatcatttcgaggtgagaacatttaaaatcatgtcttctagtagctattttgaggtataagctgttgttccgtatagtcactctactgtgaacaccagaacttctttcttcgatctgtaattttacacctattgaccaatctctcccactacctccccacccccaacctctgataatcactattctactctacatgtttgacatgagcttttaaaaatcctgtaaatgggtgacatcatgtagtcatgtagtcttttttgttgtttgtttggtttttgagacaggttctcgctttgtcacccaggctggagtgtggtggcataatcttggctcactgcagcctccaattcctgggctcaagtgatcctcctatctcagcctcccgagtagctggcactacaggcacctaccaccacacctggctaatgttttatttttttgtagagacggggtcttgctatactgaccaggttggttttgaactcctgggctcaagtgatcctctcgccttggcctcccagagtgttgggattacaagtgtgagtcaccacaacagctggcatttgtctttcttttctatgtctggcttattttactgaacatagtctcttccaggcttattcatgttgccacaaatgatcagatttcattctttatgtctgaataatattcaattgtgtatataaactcattttctgtcttcgttcatccactgatggacacaggttgattctctatctaggctactgtgaatactgcggcagtaaacatgagggtgtagacatctctttggtatactgatttcctttcttttggataaatacccagtagtggaattgctggatctcatttcttatattttttaatttttttttttttttgagatggagtttcgctcttgtttcctaggctggagtgcaatggcacgatcttggctcactgcaacctccacctcccgggttcaagcgattctcctgcctcagcctccctagtagctgggattacaggcatgtgccaccacgtctggctaattttgcatttttgggagagacagggtttctccatgttggtcagggtggtctcgaactcccgacataaggtggtccacccgactcggcctcccaaagtgctgggattacaggcatgaaccgctgcacccggcaaaaatttcttctattaaaaaaaatagagacagtgtctcagtatgttgcccaggctggtctcaaactcctgggcccaagcgatcctcccacctcagtctcccacagtgctgagattataggcatgagccactgcgcccggcctcacttcttattttgaatatttgtgtttgttctttttttttttttgagacagagtctcgctctgttgcccaggctggagtgcagtggcgcgatctcggctcactgcaacccccgcctcccaggttcaagcgattctcctgcctcagccttttgagtagctgggactacagggtgcccaccaccacacctggctaattttttttttgtatttttagtagagacagggtttcactgtgttagccaggatggtctcgatctcctcacctcgtgatctgcccacctcggcctcccaaactgctagaattacaggtgtgagccaccgtgcgcagcctcttcctttttttcttaagttaaatactagtactttgtctgtttagtggaaaaacaagaaaaacccatcggattttgatttattaatgagacctactgattgtctgtttaatttctgcttttatttttatttggcttactttgttgttctagttttttgagttggaaacttctttcattttcattgttgcccttttgttgctaaatgttagaggctgtgaatttttgctgattgctgctttaagtgtattctgggggttctgtatttaatactttccttgttatttttagaaattctgtaatttttatttatattttctccttcacccaggagttgtctaatagaagtattatgattgtttttgtttgttaatttctagatggaagggcctttttgatcttgcaattaatttctcatgttattctgattaactttaatgtgtctgatcagagagtgtttataattcttacatttacataacttccttgtcatcttatttatcatctactgatctatctatatatatatatatttttttcagatgtagtctcactctgtcacccaggctggagtgcccaagtgcgatcttgactcactgcaacctctgcctcccaggttcaagcgactctcctgcctcagcctcccgagtagttgggattccaggcatctgccaccacgcctggctcatttttttttgtatttttagtagggacagggtttcaccatgttggccaggttggtcttgaagtcctgacctcaagtgatccgcccacctcggcctcccaaagtgctgggattacaggcgtgagccaccgcgcccggccctgatcaatattttttagtgttccgtgttttgcttgagaagttgtattctctattatctgtatacagtttagcatatctgtgagtctatcttatttaggattatgtactcttagttcattttctacaaaattacctattagcgtgtttctgatttatgaaggaagttggtgcattttttggtgacagattttcataacttgttatagattcactgtgaattatggcttttagtattagaagtgtccttctggctgggcatggcccatacctgtaatccgagcactttgggaggccaaggcgggcagatcccctgaggtcaggagttcgagaccagtccagcctacatggtgaaaccttgtctctactcaaaatacacaaattagccaggcatggtggcacatacttacaatcccagctactcgggaggctgaggcaggagaatcacttgaacccgggaggcggaggttacaatgagccgagattgtgccactgcactccagcctaggtgacggagtgaaactctgtttcaaaaaaaaaaaaaaaaaagtgtccttccgtgtcatatttaatgtgttttgccctgaattccacgttgatagcaggattgcagccctggctcttttgtggtttccatctgcctgttctttttaagctgctctgagggtgtgttgggtgctgagattcacgcagctgccgttcccttgcttattgctgcctctttgcatttgtcttacagctccctccccttcagcttggatggaagcacagtctccctggagtgctatagatctttgagtgtgaggaggtgtgtgtccatatggctagctcagtcgccagagcttgagcctcgtcatggggaaggacagagtggcccacgttcagggcctgagctctccctctttgctggcctgccctgagttgtcctgtcagtttgcacctgagcgagcagctcctttctcagtgtcaggctcagcccagcctcttccctggcattgggattgtttcataataaacacagctcaggtggtaatgcaaaggacctttcccttcatttctgccccagcttacccactccacaaggagatctcatcatttcctcctgtatacaactcacgtatctcttaaaagtagaatcagatcagagccttatacaaatcaaatatgaaaaactgaaaagctacaaaataataaaagctctggtttgagctctgaaagctcagactgggaagtgatttgaaacagtttataatcatagcaaacacatgccatgctttagaaaatacaaaattgtggctgggcgctgtggctcactcctgtgatgccagcactttgtgggaggccaaggtgggcggatcacaaggtcaggagatcgagaccagcctggccaacatggtgaaaccccgtctctactaaaaatacaaaaacaagattagctgggcatggtggccgggtgcctgtagtcccagctacttgggagcctgaggcaggagagtggcgtgaacccaggaggtggagcttgcagtgagccgtgatcgcaccattgcactcctgcctgggtgacagagcaagactccgtctcaaaaaaataaagaaaaaaaaaagaaaatacagaattgcttaataagttgtttccagccgggcacagtggtaacgtgcctataatcccagcactttgcgaggctgaggtgggtggatcacctgaggtcaggagttcaagaccagcctaatatgatgaaaccccatctctactaaaatataaaaattagctgggtatggtggcatctgcctataattcccaactactcgggaggctgagataggagaattgcttgaacccaggaggcggaagttccagcctgggcagcaagagcaaaactccttctcaaaagaaaaaaaaaaaagttgtttccaaaggaagggattaggaaaaagtagttgtgacttatattaccatatattttaatgaagagatgggttttacttattcaaattagaacagaatttctgattatgaacaatacagacttatgaacaatttggcaaaccccaacagagataataaactcctggctgggcatggtggctcatgcctgtaatcccagcactttgggaggccaaggcaggcagatcaggagtttgagaccagcctggccaacatggcaaaagcctgtgtctactgaaaaagaaaagaaaaaaaacactgggcatggtggcacgcatctgtaaccgcagctacttggaagggtgaggcgtgagaatcgctagaacccaggaggcggaggttgcagtgagtgagccaagatcatgccattacacttcagctcgggggacagagtgagactctgtctcaagaaaaatgaaacttcccatcctcactaactttgcagctccctgtggcccattggagcagcgccccggcctgttagggcatttctcagaagtgatgccctggcagatacccttctccttaatttaacaaaaccggcgacagtcactttctttcagtttgccgtaaggattagtaaatgagtccattactgaacacactatcttaatcttggtgtttgatcacagaaaagtacgaagatctgagctcttctgacgagtcctgccctgctcctcagagacagaggccttgccggaagaagggtgtcagcatccacgagggaccgcgagccctggccaggatcacaggcattggcctgggcggcagagccccacggcctcgctatggtgagtggcccgcgtttcccgagggctctttctcattgcataccaggattttgtgttggcaagaatggaatagctcttaggctcctgaaatgtgggtcgctggacctcaggtggcagcgggacaggtggcccagctttcatgctcagggagactcaggattgagtcctgtgatggaaatgcattggtcacggactagctcttgttttttgctttatctcctggagtttccttttcgttggttaaatttaggaatagaactttctctcctgcagcagaaatgtagctaaggtcagatttcattcatcacataggtgggttggctcatacagggaggaggcaaagcgtgaagttcacttccctgccctgcccataccagctgggtcgggtgcgctgctgggggcaggaggccaagaaaacaggccctgctgttttctcagggcgatgaagttgtactcagaccctcctgagagagggcccgcttgttgacttgctggtgaagaatcctagcctttgggttttccagtctcgttcattctcagattcccagccccagggtgttgagcgttttgctcttggggagtgctggggtttctttttaggggagttgggtttggtgcctactctctattgctgtggtctgtcccagagctcagctggaggtgtgagttatgtcttcctttgatggctgtcacccactcatagccaggccaaggctgctggtctcacaggcctggtggctggtccttctcgggagcaaggcctctttgaggccaggacttggaagagtgagagtagacagtgtttcagccaggggtccaccagtaattgaattcccttctagaccccaggaacaagcagatgtgcagacttctgtcttcccaagcctgggtgctgggttgggaactggagacccaccttctcccatcatcctgggaagggtgagctgactgggccactgggaaggcctctctcgagctgctggccagccccaccacagcatgagggcccgcccgtgtcccgtccgctgagctgtgagcactggctctgggacaccgggctggtcgttctgagtggcagagtctcttccttccaaaaggtccctgccacctgctacagcctgaggtgtggtggggacaggaaggaagctgtcatcctggggctgagttggtaattaatctatatagctgtacaacaaatgctttaacaaaatcatacatgtctgaagccgcttgtgtgcggttctttgtatgtatccacagagaagtaatcatggtggtggtctcaggtgtggtatttcaggggatttttgttttctcataccttgtgaaatttaaattttctataagtgcatatattttatttgccagtaattaagaaatttggggccgggcgcagtggctcacgcctgtaatcccagcactttgggaggccgaggcaggtggatcaagagatccagaccatcctggccaacatggtgaaatcccatctttactaaaaatgcaaaaattagctgggcatggtagtacgtgcctataatcccagctactcgggaggctgaggcaggagaatcggttgaacccgggaggcggaggttgcagtgagccgagattgtgccactgcactccagtctggtgacagagcaagactccgtctcaaaaaaaaaaaaaaaaaattgggggggccaggtgcagtggcttatacctgtaatcccagcactttggaaggctgaggtaggaagattgcttgggctcaggagttgtgagaccagcctgggcaatgtagcaagaccctatctctacaaaaaattttgaaaattagccagatatggtggcccatgcctgtagccccagttacatgagaggctgaggtggaaggattgcttgagcccaggaggtcaaggctgtagtgacccatgatggtgccattgcattccagtctggataacacagcaagaccctgtctcaaaaacagtttagggggcaatgataaatagcatgtgctgattagaaaaacttctccataactaggaaaatacgtaaagaggaaagtaagttccccatggtcccatcaaccagtcctttgggttcttttttgagacagggtttcactgtagcccaggctggagtgcagtggcacgatcatagctcactgaaggctccagttcctgagctcaagcgatcctcctgtctcagcctcccaagtagctgagattacagacatgtgccaccgtgactggtcaagtcagtctttttatgtaaaggggcaaaactggagtgaaattgcctggtatacatgcccctttttctgcttggttttagaggcaggtagagttaggtaatttcatattattgttgttaatttttacctcaaggcctttttccttcctgctcagccaggtctctttttcgccggggttgactgaccagaggaggcccgctaagcgcctgtggttaaaggtcacagggacataaagacacgtggtcgatgggtgtctgtgtgaggtcattagctacctcctgctaaaaggaacactcatggtatagttttctctggtcaggcatctgtaaatacagctgaccatttgctacgttttccccttggaaaagaaatggagagggcccaggcttgacctggctgccagccctcgccccaccaggcacttgcttgggccactgactgaccctcagagcatcttttccacccacacaccacagatagagccatgccaggtcgcaggggcaagtaggtgaggtcatgactgggaagtcacctgcctccatcctgggcctcggcctctgaggaggtttcactttggagttccctgggcttatgggccccattctgtacacagagcaggctcctccccgtggctatgtcaccttcaacagcagtggcgagaaccccctggaagaagagggcctctgctgccgggatgtcacctcccccatcaatgagcgggatgtggagagcagcagcagcagcagcagtcggggtacgtgcacccccacccatccggcccgtggctcaggcaggtcctggagctcctgtgtgcccatccccacttatcccctgggcctggcgctggacacagccatccagcagaggacaggaaaggggtaggtgtggacggccctggttcttgtgaggaatgggagaagcttctggtccagcatccccgtgcggcttaagggagccgttccacagcaacaggtttagctccttgcttgggagcccctgaggctttcagggcaggccccagtaggaatgtctgttataactgcacctccgtgcagcagctgtttccatagtgcccaccgtgtgccaagcactgctccgggtgcttgggatttatcagtgaacaaaaaagacagaagccctgcccgtctgtatagaggggagggtttaggacaggcaggaagtttgaaatataaggaagcaaccgctgcaggccccaaggagtgccctggtggaggcggctcagcccggggcacgcccatgcgcagcacctcggtgagggctgcaggcggacgccctgtcttcccgccctcagaggaacatgctttctgtgccaacctggggcccgtccagagcagcagcagcagcgagggcctggccagagcccaggggctcagcagcgaagcttctgtggagagcaacgaggtacggattctttctttcttggtctcccatagccggtccctggctgggatgcctgacatcccccagttactttaagatgagcatgtatgtaagaagcagctgctgcacgtgtgtgctgcactgggacgtgctgtgtccagggtctggcttctcagacgacagcgaacgcaccggaagcccctgtgtggcgggtggggggtttcacgaagcctctcaagcccctgtgtggcgggtgggggtttcaccaaggctctcaagttagcccgcgcactctttcagatgcacgcctctcactgcaggactcggatcatgcctgtaaaagctcagctcgcaaacaagctaaaagttacatgaagaccaagaatcctgacagccagtggcctccccgcgctgcaactgacagggaaggctttctcgctgagtccagcccccagactcagagggccccctactcaggaccccaggtaagaccgcttgtgaaactggaggttacactcagagacggcactttttgtgacttaggaggcatgtgttgtgtatatgacgtgccaggcgctgctaggagaacagaatggcggtggcatccccatggcctgttaggctccacaggctcacagccggctccatggctggcagccccgctgcagcgcttctactctgttcctctccacggaaaggacctgtctccctgctttccatactggagttggcctccctgagcctggggagaagaaaagcacacttgacctcagagctgcctgcaggagtctgacaagatgtggttgaagcagagacaggaactacacacagtgtgtgcttggtgatggttacagctgccaccatcctcctcctttctgtggtccctctgaccacacattaccttagggatcagaggtgtgactcacagctcagctgtctcacctgtgtctgctgagttctcctaccctgtgtgggcagaagaggcacggagaggagaggcagagggaagctctggttggttatttggtttgtttgttcgagacggagtctcgcactgtcatctgggctggagtgcagtggcgcgatctcggctcactgcaacctcctcctcctgggttcaagcgattctcctgcctcagcctcccaagtagctgggattacaggcacccgccaccatgcccatctaattttttgtatttttagtagagacgggatttcactatgttggccaggctggtctcaaattcctgacatcgtgatccgcccgcctcgacctcccaaagtgctgggattacaggcgtgagccaccacacctggcctggtgccatgcccggcctggctggttatttgttaaagcactggctttgctgttcagtagagccttggatttgccggcttctccctgcagcccctggctcagtgagcaggcacacgtctcggtcccttcaacatacgttgagtggagtctggtcagggtagtgtcctaagtatgtttctttcagaaaatagcttgaagaaaatgtcagagtaacatttgtttgtccattaaaagcaataaactctcaaaagtaggatttctggagttgaaaagtaaatgaaatgaaaatatcactagacgagctcacagcagaattgagcaggcagaagagtcagacaacttgtgaacacaggtcacctgagatcatctcgcttgaggaacagaaagaatgagtaaaaaaaattaacagaaatctgtgatcccctcaagcacaccgacaccaccccatacagtggcattccagaaggagagcagaaacgatgggtgagaaacagcctgaccatctcagtggatcagaaacacggatcttacatccagggagctcggtgaactccagacaggtgaactcggagaagagctgcgcttagacaagtggaaatcagaacatccgacactgagactctagaattagagggcagcgctctccgcctacaaagcattgtcgagatcagcagctccatggtcccttcacagaactgagcatgtgtgggaggaggaggccagtttctggtgatgaacatacattgtccccacgtggccgaccatagtgtgaggactcacctgcctgcaacatcctgccctgcctgagccaccagagtaggaggggacagcctgggcgccacacacaaggcactgtcttggttctgagcctggggaagtggtggggctccgagtggaggaaaacgtctctgcttcgtcgtcagccactacctcccccaacctgtcccctgtgcctgccaggaccttgccgcactgctggagcagatcgggtgtctgaagtacctgcaggtgtttgaggagcaggacgtggacctccgcatctttctgaccctcactgagagcgacctgaaggaaattggcatcacgtgcgtccagaagggccgctctggccctcagcccggggttggggcaaactcccactcatgtaagcgctcttgggacgctgaggcatatcctggtcacattccccccgcaggctgtttgggcccaagaggaagatgacgtccgccattgcccgctggcacagcagtgcccgcccacccggggatgccctggagctggcctacgccgaccggctggaggctgagatgcaggagctcgccatccagctgcacaaggtgagtggctgggtgggggatgggggggcagggtgacacccgtgagttggctccatctctgacagaaaaggtgggtgctgtgtggaggggtcaggtggatgcagtggggagagggccccacacacaggacagggccgtggccaagggtctggcttgaccggccacctcccagcctccccgcgccccccacccccctgcagcgctgcgaggaggtagaggccacgcggggccaggtgtgtcaggagcaggagctgcgcgccgtggtggagagctgcctgctggagcaggaccgcgcccgcgaggacctccaggcccggctgcgggagacgtgggccctggcccgggatgctgccctcgtcctggaccagctgcggtgagtggctctgagctgccctgggctgggtctccagtggtcagccacctggcccctgggcccccacacatcctttcctcctgattttgtaactgaggggtggatttcagggtctggagccaccccacccccatttcatcaggcccttccttcctgcaggcagacccaggcaggagttgggtccgggaatctgcaccggtcgccctcctgctctttagtgcagcctcatggggcactggcccagcccatgagggccagctgcaaggacagggctgagcccctccctcccctagaaggtctgaggtgggggctctgcagcggccaggcctctgctctcaccaatatttgtttctgtgtctggcagagcctgtcaagctgagctgtcatctcgagtgaggcaggaccagccccctggtgcagccactctgggcctagccgtccccccagctggtaagagcagtggcctgactccgcactgggcagaggggaaggtgggggagccctgaagccaggtttgacccagtgggcttggcctggttctccggccggcagccactctcccaggtccctgtgtgcacatgatcccagagtccaaggaaaagagggggccctggggacccaagcccacttcctcacctgtgacaggaaaactgcctatcccccaggggtaggaggtactcgagaaaggccctgtgccttggctggctgtgctgtgctgagaccgccagtgacttctgtagcctccagccagggcccagacccgggtccccaccggcagagctttgccttctctcgggctgacccgggcctcgtagtgtttgctcagcctgtgggaggaagggcacaacagggcttccctgcctcggccttgggaggttgcttagacactgtcaggcgggtagggaggttctgatccaagcaggttctcctggttgcatgggctcagaataaagcagggcctgtggggacgcagacccccagctaactcggtccctgcacctgcaccacagactccaagggctggcaagcgtccctgcaggccatgagcctccccgagctctcgggagccctggaggaccgtgtccgtgagatgggtgagtctccggggaccagacgactgagcgctccttttgtttccgagggaggcaaagggacccctttccagggaaagcgggtttgtgtctctctaccccaaggctgacctcggggctggggccataacgggtgaggggcaggtcacatcctgcagctgagaccccggggcagcaccacccagccctcctgagcctggccgggagaggctcaaggtcatcattcctcagggcaagcactgtgcttagtgacccagagcctggagaagctgcaggtgctgaacgggaagaagtggcgggagacctagcctgcgggccggtgagtgtctgccagcctggatcccgcgtggtgggagcagcagggcctgtctgggcggctgcaggtgtgggtatgcacccacctgtccccctcccttctcaccggggctttttctttcagaatctgacgttgggtgattggtccaccctgaagctgtgtgccagggagtgaggaggacagtgagcaggtagctgccatgtgcagcccaggcccagtgggggccagaggatcaggccccgggagcagccggcagacagaggcaagacgggggctgcggccctggctcggcagctcgggccagcactgaggcgggacgagggcctcacccagaacctcgtggtgaggcccagagttcatgggctgccctggcccataccaggcagggccctggggggaaagtgtatccatatacacgcacaggtgccaactgaggtgggaccttaggaatgaggactggggcacctggaaaatgccattttttggaaaataaaatttaagaacagctag

SEQ ID NO: 15396 - DNA, 37393 bp, Homo sapiens
gcggtgccccggcgagggagcgtggcggcgagctgtttggggggggttggcgacggcagcccgagggcggcgcaaggcctgaggcccagcacaggtgggttccgcggcggcccggccccagcacttgccggcacctgcagcccgcctagacccggcgctcgggcgtcccgcgctgcacttgctcgccgcgtgactggaggaccgagcccccacattttctttatgtggttgtggtgggggcacagtaatgccctgtgcgccgtagcgttcctgtggggatgtggccggggggcgtcgggaagcgtcactgctgtgagttacgggtttgtcggccagggacccgccccggggccagtgagctacctttgcgatgcggttccacggggcgagagggggtgcctgggtgctttcacagacctcctctgtgggcgtgacagttaccaccagcatcacatttgttaagatttttaaaaattttttaatttttgtgggtacgtagtaggtgtatatatttatggcgtatatgagagattttgatacaggcatgcagttcgtaataatcacatgtaaaatgggggtctccatcccttcaagcatttatcctttgtgttacaaacaatatgattatactctttgaattatttttaaatgtgcagccgggcgcggtggctcactcacgcctgtaatcctagcactttgggaggcaaaggcgggcggatcacctgaagtcaaggatttgagaccagcctggccaacatggggacacttcgtctctactaaacatacgaaaactaggctggcatggtggctcatacctgtaatctcagctactcgggaagctgaggcaggagaatcgcttgaacccaggaggcggaggttgcattgagccgagatcacgccgctgcactctagcctgggtaacagagtgagattatgtctcaaaaaaaataataataaataaataaaatgtgcaattagattatattgactatagtcaccctgttgtgcggtcaaatactagatctttttttttttttttttttttttgagacggagtctcgctttgtcgcccaggctggagtgcagtggcttgatcaaatactagatcttattcattctgttttttttgtatccattaagcatccccaccctccactacccttcccagccttggttacactagaagtaaccatccttctactttctatgtccatgagttcagttgttttgatttttagataaccacaaataattgagaacatgcaatatttatctttctgtgcctggcttatttcactaaacataacgatctccgcttccatccatgtttttgcaaatgataggatctcattctttttttatggctgaatagtactccattgtgtctaagtaccacattttctttaggattcactgtaaaggtaacagatacttagcattttcagaatggacagaaccaaaaagttgaatgaaaactaaaacgtcttatctctaatgctactttacaccacaccactcgggatgggacattttagttttcactttagtgttttttttttgtttttttttttgagacagaatttcgctctgttgcccaggctggagtgcagtggcttgagctcggctcactgcaatcgcctcccaggctcaagcgattctcttgcctcagcctcctgagtactgagactacaggcgcccaccaccacacccagctaatttttgtaattttagtaaagatgggagttcaccattttggccagggtggtctcgaactcctggcctcaagtggtccgtcacgcttggtctggttctcattgtccttcagacctctggggatgtcagatatgcaagtctccagtaaatagagaacacggcctcaccctgcaggaggcctttggcgtggaagagacatgcccagtgaaggcttgagggaggtatggaagggactctgaactgaccctcagctcgtttggtttcttatccaggcttcgttggccagggctgttagggtgggattctcacctgcaaagtgagggaagggcactgcacgatcttgggctctgctagctgaagaggtggtggctccaggaaggagggctttgcttgccccaccgcacctacacacactcttcaccaagggtctgtgaagtgttcgtctcccacattggtggcttgtttctttagccatcttggctgtcacctggggcttggaagcattctttaatagaaactgaggtcctcatcgcatctattaactaccatagcacctgtaggtcatcacaacctgacaaggcctttgttttcgcctttgctccctttcctacccttgtttcctggcactcttgtacctaaggattctactaggaagctgatgaccttgccttgatttggggattcctggtgtgccgttacccatgtaggcccatctcggggaaagtgttacctcaccagttcaccggcctgttatatttccccccatagctctctcttcaaaggatgcctaagtggattcctattcagttgacggttgctgcgtgccaccagtcacatcctggtttgtctgttggggaattgctttctatttttttcagaaaaatttatttttacttttttgaaattttcaatttcataaccattccagaaaaattaatttatatttaaaatttacaggccaggtgcagtggctcacgcctatatttccaggactttgagaggctgaggcgggcggatcacctgaggtgaggagttcgagaccagcctggccaacatggtgaaacccccgtctctactaaaaatacaaaaattagcctaacatgatggcgcacacctgtaatctcagctattcaggtggctgaggctcaagaagcccttaaacccaggaggcagaggttccagtgagctgaaatcatgccactgcactccagcctgggcaacagagcgagactgtctcaaaaaaataaataaaatttacatacagtaaaattcattttggtgttcagttctgtggtttcataaaggcatggagtcacagatccaccgtcacagtcatacaggtctatcgtcccccaaattccctctctgccccaacctccaaccctttaattttgccttttccagaatgtcatgtaagtgaaattatactgtaggcaggcttcttccatttagcgtaaatcatttgaaattcattcacgtgttgcatgtcaactgttggatccttgtgtttaatgctgagtagcatccattatatggatgtgccaccgtttgtttatccattcttttatgtatcataatagcagcctttttagatatgtccccgttagacagtgaggcactagggattggagttgctaagtagcagagctgcttttttgttgttttttttttttgttttgtttttggagacaaagtcttgctctgtttcccaggctggagtgcaatggcgtgatcttggctcaccgcaacctccgcctcctcagttcaagtgatgctcctacctcagcctcccgagtagctggccttcatgcccagctaatttttgtatttttagtagagacaggatttcaccatgttggccaggctggtcttgaactcttgacctcaagtgatctgcccaccttggcctcccaaagtgctgggattacaggtgtgagccaccgcaccgggtccaagctgaattttgatcaaaccccaaatccagggttcttccccaccacatcaaggaactgattgggttaaacaacccaattagcatttcttcactgcccatccaagaggttgtcaggttcctagagttggtggagaattctcttttacctggtgcctgcggttggaaggaggagcaggtactccacagttaatgcctcaccatatgtgctcctctttactggtgtgatagcaggctcaccagatttagcatggttgggactgcccaaagcatacattatttcagcaaataaatttgtctgagttactcccggggttgactgcactgggttatcagtctgctagtgcagtggtgtagcaggggcaggaccagcctgtttcatgccctggaacaaccagccaggaaagatctaacccttgggccttcctcctcagtgatgtccgagctcagcgatgaagccagcgagccggaactcctgaaccgcagcttgtccatgtggcacgggctcgggacacaggtcagcggggaggagctggatgtccccctggatcttcacacagctgcttccattggccagtatgaagtggtgaaggagtgtgtgcagcggtaagagatctcggggaacttcctctcacattttgagcagcgcagtgatggcttcgatcccacgtgatggggctttgcacacagttgtggatgtttaatgcgtgtagaataggttaacctgcttatctcaggcagctgtcagtaagtattgatgctgagccctgacaaagaggccgtttttattcctaggaagaaaaagagggagtaaactttgatcagaagcttataaacagtcattctttaaccagactaattttattcactaattgcagaaatgcccaaacaaacaagcaaaataaaaataaagacagaaagtgatggcctggtgcggtggctcacacttgtaattccagcactttgggaggctgagatgggcgggtcacttgaggtcaggagtttgagaccattctggataacatgatgaaaccccatctctactaaaaatataaaagttagctgggtgtggtggcatgtacctgtaatcccagctactcaggaggctgaggcaggagaatcgcttgaacccgggaggtggaggttacagtgagctgagattgcgccactgcactctagcctgggcaacagagtgagactctgtctcaaaaacaaaaaaaagaaaaaagaaagtgatccctggccttcttttcccggagggttcattcgatccctgtgatccctgttcccctctagcttctgccatggaggaggagagaggctgggctttcagtgcctctggggaatgacctcccgacgtcactgcccacctgccctttgctaatctgtgtacaatagttagagacaatataaagcccctggcagggtccatggctgcgtcttgcccatagtaggatgtgatcatcttgtttttggaaaagggtcgtctcctcacttccacccccttatgttccacacacagcctaactctgtctcctggttctcatttgatattgtggtgcagcgacctctcttcctctctctgcgtgcctcttccagttcccagtgagccaaagcaaagcattgctgaagccccaggtctccggttcccaagttgtggccctcacttagacatacccagcccatggagtgctggtgcaccttggtacagggtggtctgttgcgctccctccacaggaggctctaggcataggcagctgggtatgcagtcagtacggcccctcaaagggtcacgtttggaattctcaggctcttaagtctttgggtgtcctgttaagatgcagagtccataaccgctccatagaggagcagggggaggcgtttgtgttgtgatgggattttgacactagctgaggtggaggcttgctgatagtaagcacaggatggggcctgaggggagctgggggcatcagaaggaaggggtggggctgaacgaggagtggtaagagagccccagggagatgctctgctgttgtgtaaaggaagatagtgttaggacgagctgggtgcattcgagccctgctgcagaggcatctccatgcagcccccctggccaggggctgccactgaaccctggtatcaggaccttctggaatggctgcccaggtgtgcatcccagagtcactgagggctgccaggcaatggaaggtagttgcctgctgtggtctaatatgtgaatcccggctgggcgcggtggctcacgcctgtaatccagcactttgggaggctaaggcgggtggatcacgaggtcaggagatcgagaccatcctggctaacacggtgaaaccccatctctactaaaaatacaaaaaactagctgggcgtagtggcgggcgcctgtagtcccagctacttgggaggctgaggcaggagaatggcgtgaacttgggaggcggagcttgcagtgagccgagatcgcgccactgcactccagcctgggcgacagagcgagactctgtctcaaaaaaacaacaaaaaagtgaatcccgtaaaagggacagatcctggggttcagtcaccagttgttatcccctctgcaggcaagaactggggaagggaaagaaggcctgtgggcgttaaccatgtaggatcccaggtaaccatgcaagtgggtattattttaaatgtgactcccttgtcccaaccccagagtcgcagctaggaagcccacagttttttcccatgggaaaatgcattgccagaattttaacagcaatcagtgagaaagatgggattctttggtcacagatttttcaagaatgtttctttaaggtgaggtgacaaaggatgaatcagtggcggtgggacttgtccacggtggagtcccttctttcctcactgctcctctccacccagcagtgggctagtagatgccaggcctgtggtggtcagggtttttcaactgtggctgtgttgacaatccaggctggatcattctttgctgtgggggctgtcctggacactgtgggatgtttagcggcagccttggcctccagcagcccttccctgcccagttgtgagaaccaaaaatgccttcacacattgccacatattccctggttgagtgccatctgcctatctggtggtgtgaaagagcatagctggccttgggctaggaggatgcgaaatcagagcaaggagacgaaggctcagggcctcacaaggcagtgtacgagcaactgtcagcatttttctgcctgcctgcctccaatccccacaacgtccagggtggcagataacttctgcttcctgtcaactcatcccgcctggcctagcctcgccaccagctttggtgaaccccacatgcgaggcggctggccatgtctagcatatcttgcgtttgtttaggagagagttagatttgaataagaagaatggtggtggctggaccccgctgatgtatgcctcctacattggccacgacacaatcgtgcacctgctgcttgaggcgggggtgagtgtgaatgtgccgaccccagaagggcagactccactgatgctggcctccagctgtggcaacgagagcatcgcctactttcttctccaggtgagctacgagggaactcaggcccagaaacctgaggggctccgtggccaccctgacagagatgcgaaccactgcaggccacggtgttcgtgtgtgctcgtgtaatcacttctgattcttgcagcatggccgcctggagggcgcccgccccacgcagaggagatgaggccgtaacgcacgttctgtgttctcttgaagcaaggtgcagagctagaaatgaaagacatccagggctggacagccctcttccactgtaccagcgccgggcaccagcacatggtcaggttcctcttggacagtggagccaatgccaacgtgaggtgattgccacatctttagtggccacaggagtggcctaggtgtcatctgactctaaggagggtggctctggaggcagctaaccagagtttagggccaccctgcttcggcacgagaggctcaagatgaggggtaggaccagagtccttccaggcacaggccttttcgtacatctgtgagatgcatctcttcaagccctctcagcttccttttctttatctgaaacccacctgggtcatacagttgtaagaattacatgttttattgtatgccaggggcctaacatactgaatggcatttaaatgtcatacattacatgcaaattccttccattttcttgctttttgtatggatgaggtgaggtgatgctttgaaacagtcatgaggccgggcgtggtggctcacgcctgtgatcccagctctttgggaggccgaggtaggcagatcacgaggtcaggagatcgagaccatcctggctaacatggtgaaaccccatctctactaaaaatacgaaaaaattagctgggcatggtgacgggcgcctgtagtcccagctactcgggaggctgaggcaagagaatggtgtgaacccgggaggtggagcttgcagtgagccgagattgcaccactgcactccagcctgggtgacagagcaagactccatctcaaaaaaaaaaaaacaaaaacaacagtcatgagttttggccgggctcagtggctcacacctgtaatcctagcactctgggaggccaaggcgggcagatcatgaggtcaggagttcgagaccagtctggccaacatggtgaaaccccgtctctactaaaaatacaaaaattagctgggcgtggtggcaggtgcctgtaatcccagctactcgggagtctgaggcgggagaatcacttgaaaccagaaggcagaggttgcagtgaactgagagatcgtgccactgcactccagcctgagcaacaagagcaaaactctgtctcaaaaacaaacaaaaaaccagtcatgagttttataagttggaagtgggattgttgtctaaagcttgtcatgataataatcacctttgaacaaacgcagcgggtaccaatgcagcacccaccctggctgtcattcattctaagacacctgataattttgtatgccactaagaaagaaaaaatatgctactaattaacattcaactcgcctgttgatttaaagatgttttctgacttgagagatgttaaaatatgaacactgtgtgtcttaagatggatgaaaaccagcatttcccatgcatggttcctgacttccaaaccagcatgagacaaggagggatttggaagccctctgaagacagtgccgagttagcataaccaagcatgaaaagcaagcttcaggagctaagcgtggcaaagatagcttagatcattagtacttgaacttttcagagtgggttcatggaggacgttgaacttgaagccaggatttggatgaatggatgggagatgctggctttctgtgaggaattagaacagctttttgaatatgattgaggtggagatttcagaggtagccagtgggaatagccaacaggtgggacgacaggcagacatctgtctttaggacaaagaccagccctggggacagacaccagaagagtaaatggagctgatgtgttatattcactgttctcatgtcacctgttaattctggaaagggacagtgttctacgcttagggatcggtgactcgtgcactgctcagggtttatcttcagcagggagtttttgcctggcggaacttgtctcttccaatcatctgactgtggcccacatcttgcagggagccgatatgtggatttactcccttgatggaagcagctgctgctggccatgagataatcgtgcagtattttctgaatcacgtaagtgaccctgattattagcatgtaatgtagtcacggcaaatgaggaatcatattactgaagtataagctattacagaattttcctttgcacagaaataactttcattcatttattcaacacattttcattatctattgacgcccggtgttgagtggtgcttaggcattaaggatacagtggtgagtagaaatagacacctattcctgtaataattttgaaaatactatctgaaaattatggaaaaatattttaaaagtaaatagcactcataatcctgtcacttagaaaaattatatagaataagaaggcagagatcctcctctctttttcaacctccctgatgcccacttggtttgagaaagagctgccctaggacttttcctctgctgtggaaagatgtgtctgtaggcaagtgtgtgcacattgctttgtgttttgaacaaagtgggattctacgtatagtctgtaacttagagacatcttatagacatcttatctttgtacagtattccgtgtacaatctgcctcagttaatttaatgagtttcttattagtagaaacttagtttttaacattttgcaattataaacagtgttccgggaatatccttttacacatagctttaatacatttgcagttatttctgtatgttgtatttctgttttattttattaatttatttttttgagacatggtgttgccctgtatcccaggctggagttcagtggcgagatcgtggctcactgcagcttcagcctcctgggctcaagcgatcctcctgcctcagcccccaagtagctgggactacaggtgcatgctaccatgccccggctaattatttaattttttttttttggtagagttgggggtctcagtatgttgtgcaggctagtcttgaattcctgagctcaagcgatcacctcagcctcccaaagtgctgggatcacaggtgcaagcctgtccacacagaaccttgtacataaatattcatagcagtattattcataattgccaaaaagtagaaaaacccacaagtccatctactgaggaattgataaacaaaatatatatctgtatagcaggatattattcggccctacaaagtaatgcagtactgctgcatgctgcggcaggggtgaaccctgatgcgttaggctgggctgggtgcggtggcgcacgccggtaatcccaacactttgggaggctgaggccagagggtcgcttcagccctggagttggaggttgcagtgagctatgattgcgccgccacactccattctgggtcacagagtggatcctgcctcaaaaagaaaaagaaaaggaaaacattcggctcagtgaaagaagccagacacaacaggccacacactaggtgatttcactcataggaaatgtccagaataagcaaatacatagacagaaaatagatgagtggtttcctgggtcttggggaatgggaagattggggtgataaaaatgtgctaaaattgtttgtggtgatggttgaacaactgtgaatatacgagaagccgttgaattgtacattgtaagtgggtgacttgttggtatgtggattatatctttataaggctgttaaacccaatggggggaagtgcaggcggtcctgatgaattcccactaccaaggttgtctgttgtcctgcccaccagtcatagacaaaggtgtccattttctcttgtcctcaccagtcctgatgtcagtcaaccttttgtcaatctggcgggtgaattgtagcgtctcattttagtttgtccttgttagagtagttgaaatttttttctttttttttttttttggagacagaagtcttgtgctgtgtcgcccaggctggaaggctggagtgcagtggcgtgatctcggctcactgcaacctctacctcccaagttcaagcagttcttctgcctcagcctcccgagtagctgggactgcaggcacccgcccgcacacctggctaattttttgtattttagtagagatgaggtttcaccatgttgcccaggctgctcttgaactcctgaactcaggcaatccacccaccttagcctcccaaagtgctaggattacaggcataagccactgcgcccagccagttgaacatttttaaattgatttcttagccatttgtatttcttttttttttttttttttgagactgagtctcactcagtcgcccaggctggagtacagtggcatgatctcagctcactgcaacctccacctcccaggtttaagagattgtcctgcctcagcctcccgagtagctgggactaaaaatacaaaaaatcccggctaattttttgtatttttagtagagacaaggtttcaccgtgttagccaggatggtctcgatctcctgacctcatgatctgcccgccctggcctcccaaagtgctgggattacaggtgtgagccactgtgcccggctggccatttgtatttctcttacgagctgtctatgtttattgcccaattttctattggatagtttgtttttttctcacttattggtgggaatttcttaaatagtgaaaaattcacatggtatctctttttaacaaagaattttgggacacaacatgcacatggtacacatgcagaccagaaggtgggtgcaccgcaggcctgtcccccaccctgcctgcgtctccttggcaccctccccacgggcgactctgggaatacacccacacatgctcatggtcctgccccatgtgcagctgctcccatcttgcattttttaaaaaacttaatcatgaagatttttctatattggtgtataaagagacggggccaggtgcattgtctcgctcctgtaatcccagcactttgagaggccaaggcagacagatcacttgaggtcaggagtttgagaccagcttggccaaggtggtgaaacccgcctctaccaaaaatacaaaaatacaaaatacaggtggctgacgctgtaatcccagctacttgggaggctgagacaggagaatcacttgaacctgggaggcagaggttgcgatgagccaagatgttgccactgcactccagcctgggtgacagagtgagactatctctaaataaataaataaataaataaataaataaatcaataaatcaataaagagatggggtcttgctctgtccctcaggctggagtggagtggtgcagtctcagctcactgcagccttgacctcctggtctcaagtgatcctcctgcctcagcctcccaagtagctgggattacaggtgcgtgccaccacgcccagccaatttttgtattttttttgtagagatggggttttgccacgttgcccaggctggtcttgaactcctgagctcaggcagttcgcctgcctcggtctcccaaagtgctgggattacaggcacgagccaacgcacccagcccctctcttttttttttttttttgagatggcgtcttgctctgttgcccaggctagagtgcagtggcacgatctcggctcactgcaacctcagacttccgggttcacaccattctcctgcctcagcctcccgagtagctgggaccacaggcgcccgccaccatgcccagctaatttttcatatttttagtagagacggggtttcaccgcgttagccaggatggtctcgatctcctgacctcgtgatccgcccaccttggcctcccaaagtgctgggattacaggcgtgagccaccgtgcctggcctctcttttttttttttttttttatggtggcatggtattccctgtagggatgaatcagagtttttttgtttgtttgtttgtttgttttgagatggagtctcgctctgtagccctggctggagtgcagtggcgcaatctcggctcattgcaacctctgcctcccaggttcaagcgattctcctgcctcagcctcctgagtagctgggattacaggcgtgtgccaccacgcccagctaattttgtatttttagtagacagggtttcggcatgttggtcaggatggtcttgaactcctgacctcaagtgatctaccactttggcctcccaaagtgctgagattacaggcatgagccactgcgcctggcctaccgttgacatttcttacacgtctttttaagcacatatgggaatttcttcaggagcttaggatgtgttcttcaaagtagagtctttgttgtgtgaggtgggttcagtcggtagtgggtagtgtaaacttgctttgttccatagtggtcctggttcacacccctccccttagggtgttagacttcttttttttttttgagatggagtctctctctgtcacccaggctggagtgcagtggcgcgatctcggctcactgcaacctctgcctcccaggttcaagcgattttcctgcctcagcctcccgagtagctgggactgtaggcactcgccaccatgcccagctaatttttgtatttttagtagagacagggtttcaccatgttggccaggatggtctcaatctcttgaccttgtgacccgcccgccttggtcttccaaagtgctgggattacaggcgtgagccaccgtgcctggccttttttttttttttttttttggggtggggtcttgctctgtccccaaggctggagtacagtggtgtgatctcagctcagtgcaacttctgactcccaggctcaagcaattcgcctggctcagcctcccgagtagctgggattccaggtgtgtgccaccatatccagctaatttttgtatttttagtggagacagggtttcaccatgttggccaggctggtctcgaactcctgacctcatgatctgtctgcctcagcctcccaaagtgctgggattacaggcgtgagccactgtgcctggccaggatgttagactttttggctccctggccatttgggtttctttttctgcaaataattatttttgtattttttatttattttttttatatagggtcttgctttgtcaccacactagagtgcagtggcctgatcatgggtcattgtagtctcaacctcctgggctgaagtaatccttctgcctcagcctcctcagtagctgggactacaggcacgcactaccacgcctggctgttttttttttgtagagacaaaaatctcactatgttgcccaggctggtcttgaactcctggcctcaagcaatcttcccaccttggcctcccaaagtgctggagttacagacctgagccaccatgcccggccagataattctttgacagataatcctgctgacatgaactagacttccttaagacacatcatagaatcaatagcccagaaccataaagagcctctacttgtaagtttagagtcattttaagtaaggtagaactggagatcataagagatatgtactcttataatttttgattgtatgtttgtttctttttgagacagagtctcactctgtttgcccatgctggagcacagtggcgcgatcatagtttgttgcagcctcaacctcccaggttcaagggatccttgcaactcagcctcctgagtagctgagaccacaagcgcatgctatcacactagctgatttgatttttttgtagagttggggtctcactaagttgcttaggctggtctcaaactcctggctgcaagtggtcctcccaccttggcctcccaaagcgctgggattacaggcaggaaccacggtgcttggccaacaatttgcatgcctttaccacattccccaaatgttaacatttcacctcattttcttatcagtctctttatgtataacatgcatatgttttctgaatcatttaaatgtaaattgtgacataatgccccttttcccctaaatatgtatttcctgagagtaagaatttcattatgtatttcctaaaagcaaaaatgttctctttcccagtcacacaaaattatcagactcaggaactcaacactgagttcttcctccagcacttgacaagaatcaaagtgttggttagtgactgctttgggggatggggcaggactggcagcaggtggcccgatggcctgggtggtttgcctgccagcgatgctggtgggcaagccctgcctggaagctcctctctcccacgtttttcctgccgcccagtagttagaccacctggagccagaggagggggcccacccggtttcccagcctgtccctccagagctgggctccatttctggaggtagagaatggggcaagtctgggcatcttgtgctctttgctaggggaggaaagggctgtggctgctttccttgtcccccatttcccttctgccagtggggccaagccccagcagctcagtcaggagaagaggatatggatctgtctgggcctctctctttaagagaaagttgattcgtgccttccggatagtcttgttccagggtttctaaactttctgatcccaccttcatgttaaaatgagttttgatcatgtgtctctttagtaatatggacattataaaataggaaaaaaaagtctcttaaagcctaagtagttaaaaatttattttcacatcaggcatagtggctcatgccagtaatcccagcacttttagaggccaaagtgggaagatcgcttgaggctggagttggagaccagtctgggcaatacagtgagaccttgtctctaaattaaaaaaaaaaaaaaaaaaaaaattggccaggcatggtggctcatgcctgtaatcccagcactttgggatgccaaggcaggtggatcacctgaggtcaggagttcaagaccagcctggccaacatggtgaaaccccattagcggggcgtggtggcgtgcccctgtagtcccagctacttgggaggctgaggcgggagaatcacttgaacccggaaggcagaggttgcagtgagccgagattgcgccattgcactccagcctgggtgacagagtgagactccgtctcaaaaaaaaaaagccagttgtggtgtgtgtttgtaatcccagggaggctgagaagggaggatcacttgagctggggaggtcagggttgcaatgagccagtgtaatccagcgtgggccacagagtgagattctgcctcaaaaacaaaaccaaaaatatataacgagttaaaatcctacagtaaagaggctactgttttattctggttaaaccttagggttccttctatcaaacttaaactagaattttttttttttcttgagatggagtcgccctctgtcgcccaggctggagtgcagcagcttactgcaatctctgcctcccgtgttgaagcgattctcctgcctcagcctcccgagtagctgggattacaggtgtgtgccaccactcccagctaacttttgtgtttttagtagatacaggctggtctcaaactcctgaccaggctggttgttggccaggctggtctcaaactcctgacctcaagtgatccgcccacctcagcctccaaaagtgctgggattacaggtgtgagcctctgtgcccagccaagaaattattttttatttttgagatagagtcttgcttcgtctgttgcccaggctggtgtgcagtggcgtgatcttggctcattgcaacttccacctcctggactcaggcaattctccttcctcagcttcctgagtagctgggagtacagacgtgtgccaccacgcccggctaatttttgtatttttagtagagatggggttttaccacgttttcccacattggccaggctggtcttgaactcctgacctcaggtgatccacccgtctcggcctaccaaagtgctgggattacaggcttgagccaccgtgcccagcttataaattattgttattatttattattatttttttgagatggaatctcagtctgtcgtcgaggctgtagtgcagtggcgcgatctcagctcactgcaacctccgcctcctggattcaaggatttctcctccctcagcctcctgagtagctgggatacaggcacgcaccaccacacctggctaatttttgtattttttagtagagacggggtttcaccacattgcccaggctggtctcgaactcatgacctatgatccacccaccttggtcccccaaagtgctgggattacaggcgtgagccactgtgcccggcctataaattattttttaaggcacaaagtctcataggtaatttttaatcagagtcaaaagtaggatggggggcactctagaaagtaaaactccttatactttgtgaaaacacagttttttgtcctgtatccctgcccagagaccacctctgcctcccccaccaactacatatgggggtcaaggttgaggccccctggtctaacgggagagacagttgccgtatgggtggtagcaaaactccttaagggttgtgatttttttttttttttttttttttgagttggagtctccgtgtgtcgcccaggctggagtccagtggtgcgatcttggctcactgcaacctccacctcctgggttcaagcgattctcctgcctcagccccccggagtagctgggactgcaggtgcccaccaccacgcccggctaatttctttttgtatttgtagtagagatgaggattcaccctgttggccaggctggtatggaactcctgaccttgtgctccgtccacctcggcctcccaaagtgctgggattacaggcatgagccacggcgcctggctgtgccttttttctcttaatgatgttttgtgcaccctagtccgtgtcaccgcaggtactcccacccaccacgtaaatgggcgggaggcgctctgttttctggatatgctctcacgtagctcattaatctcttattttaagttccttctgattctcactatgctgaatgccacagtgaaaattctaaattgtagtgtatgtcctgcattatttccttaggcgccgctgcacttcagcctgggtaacagagcaagatcctattaaaaaaaaaaaagcaaacatgcttatggtagtacattttaaaaacatagaagattggaaaattggaaaaatccccatcaaaaatagtaaataacttaaaaatagcaacattttgggtatgttaccttccaatattgttttctgtgtaatttttttggtctcattttgccggagttgtaatgtatatgtagttttgtatcatgatccttttttatttttttgagacaaggtctcgctctattgcccaggctggagtacagtggtgcgatctcagctcgctgcagcgtcaagctctgggacttaagtgatcctcctgcctcagcctcctgagtagctgggactacaggcatgtgccgccacaccctgctaattttttattaaagatgctccccctttccggggtcccgcctcctcctctgagctttggctctggcttccctgcctcccccagctgcctggtctgacaggagagaaggacagttacagtgtacagtgacaccaaaaacatgctgtattgattatagtttatttttttttcttgtagaggtgggttcatgctgtgttgcccaggttgttgtccaactcctgagccgagcgatccacctgccttggcctgtcaaatgctgggattacaggcatgagccacctcacttggccatgatcctttttcaacttgatcatacagctgtttgtaaatatcaccatctatggcaataacagaactgactgcttatccccctgagcattcaagttttctctaggtaggttttcattattgtgaatatgctgtgccaaacatcctttttttttttttttttttttttttgagacagagtctcactctgtcttcaggctggagtgcagtggcatgatctcagctcactgcagcctccgcttcccgggttcaagcaattctcctgcctcagcctcccgagtagctgagactataggcgttcaccaccacgcccggctaatttttgtatttttagtagagacggggtttcaccatgttggccaggatggtctcaatctcctgacctcgtgatctgcccacctcggcctcccaaagtgctgggattacaggcatgagccaccgcacccggcctgtgccaaacatctttgtgcactaaagccttttctgtatttagggttatttccttagggtcatggaagtggaattgttgcgctgcaagacctgtaaatacattatagagctttggatcaaagttacgaattctgcttcagaggatggtgctttcattctgactggtttaaaaggctgctttctttgaagacaagcgaagtgagtgggacacagcccaggcgcagaaggtgaaggctgggatctccgcatggtggctgccagccccctgcaagggaggtcatgagcgtgggagatgactccccagcccccagccctcctcatccttgtccctaagaagagagtgagagcaaaacttgtggctgcggtgcagacaagcctgcctctttctcatgcagatgtgatgtttcccacacagggaggcagtcagaaaccagcatatgcccttctgtcttcccagccagcagcccaggaagggcaggtgctttgaaggagaggcccctaaccccctttcacggacattcacagggagtcaaggtggacgcgagagaccacagtggagccacagcccggatgctggccaagcagtacggacacatgaagatcgtggccttgatggacacttactcgccctctctgcccaagagcctctatcggagcccaggtacccacacctgccagccgcgccctgctggggtctctggttgccttgagctttaggtgacctggcagagaaagatgtcccccgcttccccggctcccaccttctctgagatttggctctgcctcccccagctgcttacatgtcaaggttgaggcccctgctctaacaggagataaggatggttacgatggagagtggtacaaaaccaggctgttgtgaatgtagaggctttctgtagtatgcttgactaccgagtaggggcaggcccctcttagttttctgttttcactgtttcctgagctatggcttgttcattcttctatatgaacttgaatatcaacttgtctagctccttaaaaacagtattgatatttttactgagattgtgacaatgtataaattaactatatctttgtgttgttgtcttatccaagaacaagggatgacttcttgttccaatgtacttttgggtcttgcaggagggttttaaatttttcttcatctacattttgcatgtgacttaagtttattcctaagtgtttgatcatctttgtcgctattgtaaatggggttttccctatcattatatcctttttttccccccaactctcagggtattaattattcagtgctatttattttttatttcagtaggtttttggagaacaggtggtggttggatacgtgaataagtcctttagtggtgtcattatatcgtttcactgcatattgtcagtgcatttgaaggcagtggatttctgcaaacttttgttttttttttgatacgggagtttcgctcttgttgctcaggctggagtgcaatgaagcgatcttgcctcaccgcaacctcttcctcccaggttcaagcaattttgcctcagcctcccaggtagctgggattacaggcgtgcaccaccatgcccggctaattttttgtattttcagtagagatggggtttctccatgttggtcaggctggtctagaactcgcaacctcaggtgatccacccatctcagcctcccaaagtgctgggattacaggtgtgagccactgcactcagccctgcaaactaattttatattctgctaccttacagaattcttacattgttcaggttagttttgttattgattctttagggctttacaggtgtactaacatataatctttaagtatcgatggatacactgcttcctgctgattctcatgactctgactttgttgaattgcaccgttcttttgtttagttgctaacacctctagctcattgttcaacatagtggagatagtgagcctccttaccttggtcctgatcttagtggaaatgccacgttacatgagaggctgactgtaaaagggaaggcatatgttattttagcttattaacaaagtattcctcagttcttctattcctgagtggtgttttacaggagtaactattgaattgtgttcccatatctttggagacgatggtgaattttcatatggtagattgtcttcatgaacctcctaataatgaatcaaccttacattcttggcataaatcccacatgttgtactattttaatgtgtttttgaattctgtttattaatatttagtatttttctatggatattcagtcataagtgatactggtctatagttttctttcttctttttttttgtttttgaaatggagtcttgctctgttgcccaggctggactggagtggcgagatctcagctcactgcaacctccgcaacctccgcctcctgagttcaagcaattcttctgcctcagcctcccgagtagctgggatcacaggcgtgcaccactacacccagctaatttttgtatttttagtagagacggggtttcaccatgttggccaggctggtctcgaactcctgatctccagtgatccgcctgcctcagcctcccaaagtgctgggattacaggcgtgagccaccgctcccggcgtggtctatacttttctatttttgttctgtctatcaggtatgggtatcagtgtttacttcataaaaataatttggaagttttccttccttttttgtgttctaggacaatacacgtagcattagtgctacctggtcttagaagttttgatagaatcctcccatgaaaccatctggtctctttctgtgaggtggttcctcgataacagtttttctatttcttctatagagattggcctcctcatactttcttttcttatggggtcagttttggtaaattatattttcctgagagatcacttcatctaggatttcagacttatctgcagaggtctacaagataatattttctccctttttttttttttttttttgagacagagtttcactcttgttccccaggctggagtgcagtggctcgatcttgactcaccgcaacctctgcctcccgggttcaagtgattctcctgcctcagcgtcccaagtagatgggattacaggcatgcgctaccatgcctggataattttatgtttttagtagagacagggtttctccatgttggccgggctggtctcaaactcccgacctcaggtggtctgcccacctgggcctcccaaagtactgggattataggtgtgagccaccgcacccggccaatttttttctccttttaaaatattctgtttcagggccaggcgcggtggcttatgcctataatctcagcactttggaaggccgagttgggcggatcacctgaggtcgggagttcgagaccagcctgatcagtatggagaaaccccatctctactaaaaatataaaattagctgggcgtagtggtgcatgcctgtaatcccagctactcgggaggctgaggtgggagaatcccttgaacccgggaggcagaggttgaggtgagccgagatcgtgccattgcagtccagcctaggcaacaagagcgaaactctgtctcaaaaaaaaaaaaaaaaaaaaaattctgtttcaggctgggtgcagtggctcatgcctgtaatctcagcactttgggaggctgaggcgtgtggatcacttgaggtcaggagttcaagaccagcctggccaacatggtgaaaccccgtctccactaaaaatacaaaaataagccaatgtggtggtgtgcgccagctactctggaggctgaggcaggagaatcacttgaacccgggagggggagattgcagtaagccaaaatcacgccactgcactccagcttggcgacagagcgagactccatctcaaagaaaagtaaatagataaaataaaacaaaataaaatactctgtttcagtggttattttctcctgttattatctttttttggcatggaaaatattgatttattttttgtgacagggtcttgctttgtcacccaggctggagtccagtgacccaatctcgactcaatgcaacctccgcctcccaggctcaaaacgatccttctacctcagctctacgagtagctaggactgtaggtgcaccctaccacgcccagcttacgtttgtattttttgtagagaggtggttttgccatgttgaccaggctggtctcaagagtcctgagctcaagcaatccacccgcctcagcctcccaaagtgctgggactacaggcatgagctactgcacctgacctggaaaatatttatctcatttttaattgacacaaaataactacatatttatggggtacagtgtgtgatgttttgatacatgtatacactgtgtaatgatcaaattaaggtgattagcttatccatcacctcaaacatttatcatttcgaggtgagaacatttaaaatcatgtcttctagtagctattttgaggtataagctgttgttccgtatagtcactctactgtgaacaccagaacttctttcttcgatctgtaattttacacctattgaccaatctctcccactacctccccacccccaacctctgataatcactattctactctacatgtttgacatgagcttttaaaaatcctgtaaatgggtgacatcatgtagtcatgtagtcttttttgttgtttgtttggtttttgagacaggttctcgctttgtcacccaggctggagtgtggtggcataatcttggctcactgcagcctccaattcctgggctcaagtgatcctcctatctcagcctcccgagtagctggcactacaggcacctaccaccacacctggctaatgttttatttttttgtagagacggggtcttgctatactgaccaggttggttttgaactcctgggctcaagtgatcctctcgccttggcctcccagagtgttgggattacaagtgtgagtcaccacaacagctggcatttgtctttcttttctatgtctggcttattttactgaacatagtctcttccaggcttattcatgttgccacaaatgatcagatttcattctttatgtctgaataatattcaattgtgtatataaactcattttctgtcttcgttcatccactgatggacacaggttgattctctatctaggctactgtgaatactgcggcagtaaacatgagggtgtagacatctctttggtatactgatttcctttcttttggataaatacccagtagtggaattgctggatctcatttcttatattttttaatttttttttttttttgagatggagtttcgctcttgtttcctaggctggagtgcaatggcacgatcttggctcactgcaacctccacctcccgggttcaagcgattctcctgcctcagcctccctagtagctgggattacaggcatgtgccaccacgtctggctaattttgcatttttgggagagacagggtttctccatgttggtcagggtggtctcgaactcccgacataaggtggtccacccgactcggcctcccaaagtgctgggattacaggcatgaaccgctgcacccggcaaaaatttcttctattaaaaaaaatagagacagtgtctcagtatgttgcccaggctggtctcaaactcctgggcccaagcgatcctcccacctcagtctcccacagtgctgagattataggcatgagccactgcgcccggcctcacttcttattttgaatatttgtgtttgttctttttttttttttgagacagagtctcgctctgttgcccaggctggagtgcagtggcgcgatctcggctcactgcaacccccgcctcccaggttcaagcgattctcctgcctcagccttttgagtagctgggactacagggtgcccaccaccacacctggctaattttttttttgtatttttagtagagacagggtttcactgtgttagccaggatggtctcgatctcctcacctcgtgatctgcccacctcggcctcccaaactgctagaattacaggtgtgagccaccgtgcgcagcctcttcctttttttcttaagttaaatactagtactttgtctgtttagtggaaaaacaagaaaaacccatcggattttgatttattaatgagacctactgattgtctgtttaatttctgcttttatttttatttggcttactttgttgttctagttttttgagttggaaacttctttcattttcattgttgcccttttgttgctaaatgttagaggctgtgaatttttgctgattgctgctttaagtgtattctgggggttctgtatttaatactttccttgttatttttagaaattctgtaatttttatttatattttctccttcacccaggagttgtctaatagaagtattatgattgtttttgtttgttaatttctagatggaagggcctttttgatcttgcaattaatttctcatgttattctgattaactttaatgtgtctgatcagagagtgtttataattcttacatttacataacttccttgtcatcttatttatcatctactgatctatctatatatatatatatttttttcagatgtagtctcactctgtcacccaggctggagtgcccaagtgcgatcttgactcactgcaacctctgcctcccaggttcaagcgactctcctgcctcagcctcccgagtagttgggattccaggcatctgccaccacgcctggctcatttttttttgtatttttagtagggacagggtttcaccatgttggccaggttggtcttgaagtcctgacctcaagtgatccgcccacctcggcctcccaaagtgctgggattacaggcgtgagccaccgcgcccggccctgatcaatattttttagtgttccgtgttttgcttgagaagttgtattctctattatctgtatacagtttagcatatctgtgagtctatcttatttaggattatgtactcttagttcattttctacaaaattacctattagcgtgtttctgatttatgaaggaagttggtgcattttttggtgacagattttcataacttgttatagattcactgtgaattatggcttttagtattagaagtgtccttctggctgggcatggcccatacctgtaatccgagcactttgggaggccaaggcgggcagatcccctgaggtcaggagttcgagaccagtccagcctacatggtgaaaccttgtctctactcaaaatacacaaattagccaggcatggtggcacatacttacaatcccagctactcgggaggctgaggcaggagaatcacttgaacccgggaggcggaggttacaatgagccgagattgtgccactgcactccagcctaggtgacggagtgaaactctgtttcaaaaaaaaaaaaaaaaaagtgtccttccgtgtcatatttaatgtgttttgccctgaattccacgttgatagcaggattgcagccctggctcttttgtggtttccatctgcctgttctttttaagctgctctgagggtgtgttgggtgctgagattcacgcagctgccgttcccttgcttattgctgcctctttgcatttgtcttacagctccctccccttcagcttggatggaagcacagtctccctggagtgctatagatctttgagtgtgaggaggtgtgtgtccatatggctagctcagtcgccagagcttgagcctcgtcatggggaaggacagagtggcccacgttcagggcctgagctctccctctttgctggcctgccctgagttgtcctgtcagtttgcacctgagcgagcagctcctttctcagtgtcaggctcagcccagcctcttccctggcattgggattgtttcataataaacacagctcaggtggtaatgcaaaggacctttcccttcatttctgccccagcttacccactccacaaggagatctcatcatttcctcctgtatacaactcacgtatctcttaaaagtagaatcagatcagagccttatacaaatcaaatatgaaaaactgaaaagctacaaaataataaaagctctggtttgagctctgaaagctcagactgggaagtgatttgaaacagtttataatcatagcaaacacatgccatgctttagaaaatacaaaattgtggctgggcgctgtggctcactcctgtgatgccagcactttgtgggaggccaaggtgggcggatcacaaggtcaggagatcgagaccagcctggccaacatggtgaaaccccgtctctactaaaaatacaaaaacaagattagctgggcatggtggccgggtgcctgtagtcccagctacttgggagcctgaggcaggagagtggcgtgaacccaggaggtggagcttgcagtgagccgtgatcgcaccattgcactcctgcctgggtgacagagcaagactccgtctcaaaaaaataaagaaaaaaaaaagaaaatacagaattgcttaataagttgtttccagccgggcacagtggtaacgtgcctataatcccagcactttgcgaggctgaggtgggtggatcacctgaggtcaggagttcaagaccagcctaatatgatgaaaccccatctctactaaaatataaaaattagctgggtatggtggcatctgcctataattcccaactactcgggaggctgagataggagaattgcttgaacccaggaggcggaagttccagcctgggcagcaagagcaaaactccttctcaaaagaaaaaaaaaaaagttgtttccaaaggaagggattaggaaaaagtagttgtgacttatattaccatatattttaatgaagagatgggttttacttattcaaattagaacagaatttctgattatgaacaatacagacttatgaacaatttggcaaaccccaacagagataataaactcctggctgggcatggtggctcatgcctgtaatcccagcactttgggaggccaaggcaggcagatcaggagtttgagaccagcctggccaacatggcaaaagcctgtgtctactgaaaaagaaaagaaaaaaaacactgggcatggtggcacgcatctgtaaccgcagctacttggaagggtgaggcgtgagaatcgctagaacccaggaggcggaggttgcagtgagtgagccaagatcatgccattacacttcagctcgggggacagagtgagactctgtctcaagaaaaatgaaacttcccatcctcactaactttgcagctccctgtggcccattggagcagcgccccggcctgttagggcatttctcagaagtgatgccctggcagatacccttctccttaatttaacaaaaccggcgacagtcactttctttcagtttgccgtaaggattagtaaatgagtccattactgaacacactatcttaatcttggtgtttgatcacagaaaagtacgaagatctgagctcttctgacgagtcctgccctgctcctcagagacagaggccttgccggaagaagggtgtcagcatccacgagggaccgcgagccctggccaggatcacaggcattggcctgggcggcagagccccacggcctcgctatggtgagtggcccgcgtttcccgagggctctttctcattgcataccaggattttgtgttggcaagaatggaatagctcttaggctcctgaaatgtgggtcgctggacctcaggtggcagcgggacaggtggcccagctttcatgctcagggagactcaggattgagtcctgtgatggaaatgcattggtcacggactagctcttgttttttgctttatctcctggagtttccttttcgttggttaaatttaggaatagaactttctctcctgcagcagaaatgtagctaaggtcagatttcattcatcacataggtgggttggctcatacagggaggaggcaaagcgtgaagttcacttccctgccctgcccataccagctgggtcgggtgcgctgctgggggcaggaggccaagaaaacaggccctgctgttttctcagggcgatgaagttgtactcagaccctcctgagagagggcccgcttgttgacttgctggtgaagaatcctagcctttgggttttccagtctcgttcattctcagattcccagccccagggtgttgagcgttttgctcttggggagtgctggggtttctttttaggggagttgggtttggtgcctactctctattgctgtggtctgtcccagagctcagctggaggtgtgagttatgtcttcctttgatggctgtcacccactcatagccaggccaaggctgctggtctcacaggcctggtggctggtccttctcgggagcaaggcctctttgaggccaggacttggaagagtgagagtagacagtgtttcagccaggggtccaccagtaattgaattcccttctagaccccaggaacaagcagatgtgcagacttctgtcttcccaagcctgggtgctgggttgggaactggagacccaccttctcccatcatcctgggaagggtgagctgactgggccactgggaaggcctctctcgagctgctggccagccccaccacagcatgagggcccgcccgtgtcccgtccgctgagctgtgagcactggctctgggacaccgggctggtcgttctgagtggcagagtctcttccttccaaaaggtccctgccacctgctacagcctgaggtgtggtggggacaggaaggaagctgtcatcctggggctgagttggtaattaatctatatagctgtacaacaaatgctttaacaaaatcatacatgtctgaagccgcttgtgtgcggttctttgtatgtatccacagagaagtaatcatggtggtggtctcaggtgtggtatttcaggggatttttgttttctcataccttgtgaaatttaaattttctataagtgcatatattttatttgccagtaattaagaaatttggggccgggcgcagtggctcacgcctgtaatcccagcactttgggaggccgaggcaggtggatcaagagatccagaccatcctggccaacatggtgaaatcccatctttactaaaaatgcaaaaattagctgggcatggtagtacgtgcctataatcccagctactcgggaggctgaggcaggagaatcggttgaacccgggaggcggaggttgcagtgagccgagattgtgccactgcactccagtctggtgacagagcaagactccgtctcaaaaaaaaaaaaaaaaaattgggggggccaggtgcagtggcttatacctgtaatcccagcactttggaaggctgaggtaggaagattgcttgggctcaggagttgtgagaccagcctgggcaatgtagcaagaccctatctctacaaaaaattttgaaaattagccagatatggtggcccatgcctgtagccccagttacatgagaggctgaggtggaaggattgcttgagcccaggaggtcaaggctgtagtgacccatgatggtgccattgcattccagtctggataacacagcaagaccctgtctcaaaaacagtttagggggcaatgataaatagcatgtgctgattagaaaaacttctccataactaggaaaatacgtaaagaggaaagtaagttccccatggtcccatcaaccagtcctttgggttcttttttgagacagggtttcactgtagcccaggctggagtgcagtggcacgatcatagctcactgaaggctccagttcctgagctcaagcgatcctcctgtctcagcctcccaagtagctgagattacagacatgtgccaccgtgactggtcaagtcagtctttttatgtaaaggggcaaaactggagtgaaattgcctggtatacatgcccctttttctgcttggttttagaggcaggtagagttaggtaatttcatattattgttgttaatttttacctcaaggcctttttccttcctgctcagccaggtctctttttcgccggggttgactgaccagaggaggcccgctaagcgcctgtggttaaaggtcacagggacataaagacacgtggtcgatgggtgtctgtgtgaggtcattagctacctcctgctaaaaggaacactcatggtatagttttctctggtcaggcatctgtaaatacagctgaccatttgctacgttttccccttggaaaagaaatggagagggcccaggcttgacctggctgccagccctcgccccaccaggcacttgcttgggccactgactgaccctcagagcatcttttccacccacacaccacagatagagccatgccaggtcgcaggggcaagtaggtgaggtcatgactgggaagtcacctgcctccatcctgggcctcggcctctgaggaggtttcactttggagttccctgggcttatgggccccattctgtacacagagcaggctcctccccgtggctatgtcaccttcaacagcagtggcgagaaccccctggaagaagagggcctctgctgccgggatgtcacctcccccatcaatgagcgggatgtggagagcagcagcagcagcagcagtcggggtacgtgcacccccacccatccggcccgtggctcaggcaggtcctggagctcctgtgtgcccatccccacttatcccctgggcctggcgctggacacagccatccagcagaggacaggaaaggggtaggtgtggacggccctggttcttgtgaggaatgggagaagcttctggtccagcatccccgtgcggcttaagggagccgttccacagcaacaggtttagctccttgcttgggagcccctgaggctttcagggcaggccccagtaggaatgtctgttataactgcacctccgtgcagcagctgtttccatagtgcccaccgtgtgccaagcactgctccgggtgcttgggatttatcagtgaacaaaaaagacagaagccctgcccgtctgtatagaggggagggtttaggacaggcaggaagtttgaaatataaggaagcaaccgctgcaggccccaaggagtgccctggtggaggcggctcagcccggggcacgcccatgcgcagcacctcggtgagggctgcaggcggacgccctgtcttcccgccctcagaggaacatgctttctgtgccaacctggggcccgtccagagcagcagcagcagcgagggcctggccagagcccaggggctcagcagcgaagcttctgtggagagcaacgaggtacggattctttctttcttggtctcccatagccggtccctggctgggatgcctgacatcccccagttactttaagatgagcatgtatgtaagaagcagctgctgcacgtgtgtgctgcactgggacgtgctgtgtccagggtctggcttctcagacgacagcgaacgcaccggaagcccctgtgtggcgggtggggggtttcacgaagcctctcaagcccctgtgtggcgggtgggggtttcaccaaggctctcaagttagcccgcgcactctttcagatgcacgcctctcactgcaggactcggatcatgcctgtaaaagctcagctcgcaaacaagctaaaagttacatgaagaccaagaatcctgacagccagtggcctccccgcgctgcaactgacagggaaggctttctcgctgagtccagcccccagactcagagggccccctactcaggaccccaggtaagaccgcttgtgaaactggaggttacactcagagacggcactttttgtgacttaggaggcatgtgttgtgtatatgacgtgccaggcgctgctaggagaacagaatggcggtggcatccccatggcctgttaggctccacaggctcacagccggctccatggctggcagccccgctgcagcgcttctactctgttcctctccacggaaaggacctgtctccctgctttccatactggagttggcctccctgagcctggggagaagaaaagcacacttgacctcagagctgcctgcaggagtctgacaagatgtggttgaagcagagacaggaactacacacagtgtgtgcttggtgatggttacagctgccaccatcctcctcctttctgtggtccctctgaccacacattaccttagggatcagaggtgtgactcacagctcagctgtctcacctgtgtctgctgagttctcctaccctgtgtgggcagaagaggcacggagaggagaggcagagggaagctctggttggttatttggtttgtttgttcgagacggagtctcgcactgtcatctgggctggagtgcagtggcgcgatctcggctcactgcaacctcctcctcctgggttcaagcgattctcctgcctcagcctcccaagtagctgggattacaggcacccgccaccatgcccatctaattttttgtatttttagtagagacgggatttcactatgttggccaggctggtctcaaattcctgacatcgtgatccgcccgcctcgacctcccaaagtgctgggattacaggcgtgagccaccacacctggcctggtgccatgcccggcctggctggttatttgttaaagcactggctttgctgttcagtagagccttggatttgccggcttctccctgcagcccctggctcagtgagcaggcacacgtctcggtcccttcaacatacgttgagtggagtctggtcagggtagtgtcctaagtatgtttctttcagaaaatagcttgaagaaaatgtcagagtaacatttgtttgtccattaaaagcaataaactctcaaaagtaggatttctggagttgaaaagtaaatgaaatgaaaatatcactagacgagctcacagcagaattgagcaggcagaagagtcagacaacttgtgaacacaggtcacctgagatcatctcgcttgaggaacagaaagaatgagtaaaaaaaattaacagaaatctgtgatcccctcaagcacaccgacaccaccccatacagtggcattccagaaggagagcagaaacgatgggtgagaaacagcctgaccatctcagtggatcagaaacacggatcttacatccagggagctcggtgaactccagacaggtgaactcggagaagagctgcgcttagacaagtggaaatcagaacatccgacactgagactctagaattagagggcagcgctctccgcctacaaagcattgtcgagatcagcagctccatggtcccttcacagaactgagcatgtgtgggaggaggaggccagtttctggtgatgaacatacattgtccccacgtggccgaccatagtgtgaggactcacctgcctgcaacatcctgccctgcctgagccaccagagtaggaggggacagcctgggcgccacacacaaggcactgtcttggttctgagcctggggaagtggtggggctccgagtggaggaaaacgtctctgcttcgtcgtcagccactacctcccccaacctgtcccctgtgcctgccaggaccttgccgcactgctggagcagatcgggtgtctgaagtacctgcaggtgtttgaggagcaggacgtggacctccgcatctttctgaccctcactgagagcgacctgaaggaaattggcatcacgtgcgtccagaagggccgctctggccctcagcccggggttggggcaaactcccactcatgtaagcgctcttgggacgctgaggcatatcctggtcacattccccccgcaggctgtttgggcccaagaggaagatgacgtccgccattgcccgctggcacagcagtgcccgcccacccggggatgccctggagctggcctacgccgaccggctggaggctgagatgcaggagctcgccatccagctgcacaaggtgagtggctgggtgggggatgggggggcagggtgacacccgtgagttggctccatctctgacagaaaaggtgggtgctgtgtggaggggtcaggtggatgcagtggggagagggccccacacacaggacagggccgtggccaagggtctggcttgaccggccacctcccagcctccccgcgccccccacccccctgcagcgctgcgaggaggtagaggccacgcggggccaggtgtgtcaggagcaggagctgcgcgccgtggtggagagctgcctgctggagcaggaccgcgcccgcgaggacctccaggcccggctgcgggagacgtgggccctggcccgggatgctgccctcgtcctggaccagctgcggtgagtggctctgagctgccctgggctgggtctccagtggtcagccacctggcccctgggcccccacacatcctttcctcctgattttgtaactgaggggtggatttcagggtctggagccaccccacccccatttcatcaggcccttccttcctgcaggcagacccaggcaggagttgggtccgggaatctgcaccggtcgccctcctgctctttagtgcagcctcatggggcactggcccagcccatgagggccagctgcaaggacagggctgagcccctccctcccctagaaggtctgaggtgggggctctgcagcggccaggcctctgctctcaccaatatttgtttctgtgtctggcagagcctgtcaagctgagctgtcatctcgagtgaggcaggaccagccccctggtgcagccactctgggcctagccgtccccccagctggtaagagcagtggcctgactccgcactgggcagaggggaaggtgggggagccctgaagccaggtttgacccagtgggcttggcctggttctccggccggcagccactctcccaggtccctgtgtgcacatgatcccagagtccaaggaaaagagggggccctggggacccaagcccacttcctcacctgtgacaggaaaactgcctatcccccaggggtaggaggtactcgagaaaggccctgtgccttggctggctgtgctgtgctgagaccgccagtgacttctgtagcctccagccagggcccagacccgggtccccaccggcagagctttgccttctctcgggctgacccgggcctcgtagtgtttgctcagcctgtgggaggaagggcacaacagggcttccctgcctcggccttgggaggttgcttagacactgtcaggcgggtagggaggttctgatccaagcaggttctcctggttgcatgggctcagaataaagcagggcctgtggggacgcagacccccagctaactcggtccctgcacctgcaccacagactccaagggctggcaagcgtccctgcaggccatgagcctccccgagctctcgggagccctggaggaccgtgtccgtgagatgggtgagtctccggggaccagacgactgagcgctccttttgtttccgagggaggcaaagggacccctttccagggaaagcgggtttgtgtctctctaccccaaggctgacctcggggctggggccataacgggtgaggggcaggtcacatcctgcagctgagaccccggggcagcaccacccagccctcctgagcctggccgggagaggctcaaggtcatcattcctcagggcaagcactgtgcttagtgacccagagcctggagaagctgcaggtgctgaacgggaagaagtggcgggagacctagcctgcgggccggtgagtgtctgccagcctggatcccgcgtggtgggagcagcagggcctgtctgggcggctgcaggtgtgggtatgcacccacctgtccccctcccttctcaccggggctttttctttcagaatctgacgttgggtgattggtccaccctgaagctgtgtg

SEQ ID NO: 15397 - DNA, 33147 bp, Homo sapiens
gggcgggtgccgggggcggtgccccggcgagggagcgtggcggcgagctgtttggggggggttggcgacggcagcccgagggcggcgcaaggcctgaggcccagcacaggtgggttccgcggcggcccggccccagcacttgccggcacctgcagcccgcctagacccggcgctcgggcgtcccgcgctgcacttgctcgccgcgtgactggaggaccgagcccccacattttctttatgtggttgtggtgggggcacagtaatgccctgtgcgccgtagcgttcctgtggggatgtggccggggggcgtcgggaagcgtcactgctgtgagttacgggtttgtcggccagggacccgccccggggccagtgagctacctttgcgatgcggttccacggggcgagagggggtgcctgggtgctttcacagacctcctctgtgggcgtgacagttaccaccagcatcacatttgttaagatttttaaaaattttttaatttttgtgggtacgtagtaggtgtatatatttatggcgtatatgagagattttgatacaggcatgcagttcgtaataatcacatgtaaaatgggggtctccatcccttcaagcatttatcctttgtgttacaaacaatatgattatactctttgaattatttttaaatgtgcagccgggcgcggtggctcactcacgcctgtaatcctagcactttgggaggcaaaggcgggcggatcacctgaagtcaaggatttgagaccagcctggccaacatggggacacttcgtctctactaaacatacgaaaactaggctggcatggtggctcatacctgtaatctcagctactcgggaagctgaggcaggagaatcgcttgaacccaggaggcggaggttgcattgagccgagatcacgccgctgcactctagcctgggtaacagagtgagattatgtctcaaaaaaaataataataaataaataaaatgtgcaattagattatattgactatagtcaccctgttgtgcggtcaaatactagatctttttttttttttttttttttttgagacggagtctcgctttgtcgcccaggctggagtgcagtggcttgatcaaatactagatcttattcattctgttttttttgtatccattaagcatccccaccctccactacccttcccagccttggttacactagaagtaaccatccttctactttctatgtccatgagttcagttgttttgatttttagataaccacaaataattgagaacatgcaatatttatctttctgtgcctggcttatttcactaaacataacgatctccgcttccatccatgtttttgcaaatgataggatctcattctttttttatggctgaatagtactccattgtgtctaagtaccacattttctttaggattcactgtaaaggtaacagatacttagcattttcagaatggacagaaccaaaaagttgaatgaaaactaaaacgtcttatctctaatgctactttacaccacaccactcgggatgggacattttagttttcactttagtgttttttttttgtttttttttttgagacagaatttcgctctgttgcccaggctggagtgcagtggcttgagctcggctcactgcaatcgcctcccaggctcaagcgattctcttgcctcagcctcctgagtactgagactacaggcgcccaccaccacacccagctaatttttgtaattttagtaaagatgggagttcaccattttggccagggtggtctcgaactcctggcctcaagtggtccgtcacgcttggtctggttctcattgtccttcagacctctggggatgtcagatatgcaagtctccagtaaatagagaacacggcctcaccctgcaggaggcctttggcgtggaagagacatgcccagtgaaggcttgagggaggtatggaagggactctgaactgaccctcagctcgtttggtttcttatccaggcttcgttggccagggctgttagggtgggattctcacctgcaaagtgagggaagggcactgcacgatcttgggctctgctagctgaagaggtggtggctccaggaaggagggctttgcttgccccaccgcacctacacacactcttcaccaagggtctgtgaagtgttcgtctcccacattggtggcttgtttctttagccatcttggctgtcacctggggcttggaagcattctttaatagaaactgaggtcctcatcgcatctattaactaccatagcacctgtaggtcatcacaacctgacaaggcctttgttttcgcctttgctccctttcctacccttgtttcctggcactcttgtacctaaggattctactaggaagctgatgaccttgccttgatttggggattcctggtgtgccgttacccatgtaggcccatctcggggaaagtgttacctcaccagttcaccggcctgttatatttccccccatagctctctcttcaaaggatgcctaagtggattcctattcagttgacggttgctgcgtgccaccagtcacatcctggtttgtctgttggggaattgctttctatttttttcagaaaaatttatttttacttttttgaaattttcaatttcataaccattccagaaaaattaatttatatttaaaatttacaggccaggtgcagtggctcacgcctatatttccaggactttgagaggctgaggcgggcggatcacctgaggtgaggagttcgagaccagcctggccaacatggtgaaacccccgtctctactaaaaatacaaaaattagcctaacatgatggcgcacacctgtaatctcagctattcaggtggctgaggctcaagaagcccttaaacccaggaggcagaggttccagtgagctgaaatcatgccactgcactccagcctgggcaacagagcgagactgtctcaaaaaaataaataaaatttacatacagtaaaattcattttggtgttcagttctgtggtttcataaaggcatggagtcacagatccaccgtcacagtcatacaggtctatcgtcccccaaattccctctctgccccaacctccaaccctttaattttgccttttccagaatgtcatgtaagtgaaattatactgtaggcaggcttcttccatttagcgtaaatcatttgaaattcattcacgtgttgcatgtcaactgttggatccttgtgtttaatgctgagtagcatccattatatggatgtgccaccgtttgtttatccattcttttatgtatcataatagcagcctttttagatatgtccccgttagacagtgaggcactagggattggagttgctaagtagcagagctgcttttttgttgttttttttttttgttttgtttttggagacaaagtcttgctctgtttcccaggctggagtgcaatggcgtgatcttggctcaccgcaacctccgcctcctcagttcaagtgatgctcctacctcagcctcccgagtagctggccttcatgcccagctaatttttgtatttttagtagagacaggatttcaccatgttggccaggctggtcttgaactcttgacctcaagtgatctgcccaccttggcctcccaaagtgctgggattacaggtgtgagccaccgcaccgggtccaagctgaattttgatcaaaccccaaatccagggttcttccccaccacatcaaggaactgattgggttaaacaacccaattagcatttcttcactgcccatccaagaggttgtcaggttcctagagttggtggagaattctcttttacctggtgcctgcggttggaaggaggagcaggtactccacagttaatgcctcaccatatgtgctcctctttactggtgtgatagcaggctcaccagatttagcatggttgggactgcccaaagcatacattatttcagcaaataaatttgtctgagttactcccggggttgactgcactgggttatcagtctgctagtgcagtggtgtagcaggggcaggaccagcctgtttcatgccctggaacaaccagccaggaaagatctaacccttgggccttcctcctcagtgatgtccgagctcagcgatgaagccagcgagccggaactcctgaaccgcagcttgtccatgtggcacgggctcgggacacaggtcagcggggaggagctggatgtccccctggatcttcacacagctgcttccattggccagtatgaagtggtgaaggagtgtgtgcagcggtaagagatctcggggaacttcctctcacattttgagcagcgcagtgatggcttcgatcccacgtgatggggctttgcacacagttgtggatgtttaatgcgtgtagaataggttaacctgcttatctcaggcagctgtcagtaagtattgatgctgagccctgacaaagaggccgtttttattcctaggaagaaaaagagggagtaaactttgatcagaagcttataaacagtcattctttaaccagactaattttattcactaattgcagaaatgcccaaacaaacaagcaaaataaaaataaagacagaaagtgatggcctggtgcggtggctcacacttgtaattccagcactttgggaggctgagatgggcgggtcacttgaggtcaggagtttgagaccattctggataacatgatgaaaccccatctctactaaaaatataaaagttagctgggtgtggtggcatgtacctgtaatcccagctactcaggaggctgaggcaggagaatcgcttgaacccgggaggtggaggttacagtgagctgagattgcgccactgcactctagcctgggcaacagagtgagactctgtctcaaaaacaaaaaaaagaaaaaagaaagtgatccctggccttcttttcccggagggttcattcgatccctgtgatccctgttcccctctagcttctgccatggaggaggagagaggctgggctttcagtgcctctggggaatgacctcccgacgtcactgcccacctgccctttgctaatctgtgtacaatagttagagacaatataaagcccctggcagggtccatggctgcgtcttgcccatagtaggatgtgatcatcttgtttttggaaaagggtcgtctcctcacttccacccccttatgttccacacacagcctaactctgtctcctggttctcatttgatattgtggtgcagcgacctctcttcctctctctgcgtgcctcttccagttcccagtgagccaaagcaaagcattgctgaagccccaggtctccggttcccaagttgtggccctcacttagacatacccagcccatggagtgctggtgcaccttggtacagggtggtctgttgcgctccctccacaggaggctctaggcataggcagctgggtatgcagtcagtacggcccctcaaagggtcacgtttggaattctcaggctcttaagtctttgggtgtcctgttaagatgcagagtccataaccgctccatagaggagcagggggaggcgtttgtgttgtgatgggattttgacactagctgaggtggaggcttgctgatagtaagcacaggatggggcctgaggggagctgggggcatcagaaggaaggggtggggctgaacgaggagtggtaagagagccccagggagatgctctgctgttgtgtaaaggaagatagtgttaggacgagctgggtgcattcgagccctgctgcagaggcatctccatgcagcccccctggccaggggctgccactgaaccctggtatcaggaccttctggaatggctgcccaggtgtgcatcccagagtcactgagggctgccaggcaatggaaggtagttgcctgctgtggtctaatatgtgaatcccggctgggcgcggtggctcacgcctgtaatccagcactttgggaggctaaggcgggtggatcacgaggtcaggagatcgagaccatcctggctaacacggtgaaaccccatctctactaaaaatacaaaaaactagctgggcgtagtggcgggcgcctgtagtcccagctacttgggaggctgaggcaggagaatggcgtgaacttgggaggcggagcttgcagtgagccgagatcgcgccactgcactccagcctgggcgacagagcgagactctgtctcaaaaaaacaacaaaaaagtgaatcccgtaaaagggacagatcctggggttcagtcaccagttgttatcccctctgcaggcaagaactggggaagggaaagaaggcctgtgggcgttaaccatgtaggatcccaggtaaccatgcaagtgggtattattttaaatgtgactcccttgtcccaaccccagagtcgcagctaggaagcccacagttttttcccatgggaaaatgcattgccagaattttaacagcaatcagtgagaaagatgggattctttggtcacagatttttcaagaatgtttctttaaggtgaggtgacaaaggatgaatcagtggcggtgggacttgtccacggtggagtcccttctttcctcactgctcctctccacccagcagtgggctagtagatgccaggcctgtggtggtcagggtttttcaactgtggctgtgttgacaatccaggctggatcattctttgctgtgggggctgtcctggacactgtgggatgtttagcggcagccttggcctccagcagcccttccctgcccagttgtgagaaccaaaaatgccttcacacattgccacatattccctggttgagtgccatctgcctatctggtggtgtgaaagagcatagctggccttgggctaggaggatgcgaaatcagagcaaggagacgaaggctcagggcctcacaaggcagtgtacgagcaactgtcagcatttttctgcctgcctgcctccaatccccacaacgtccagggtggcagataacttctgcttcctgtcaactcatcccgcctggcctagcctcgccaccagctttggtgaaccccacatgcgaggcggctggccatgtctagcatatcttgcgtttgtttaggagagagttagatttgaataagaagaatggtggtggctggaccccgctgatgtatgcctcctacattggccacgacacaatcgtgcacctgctgcttgaggcgggggtgagtgtgaatgtgccgaccccagaagggcagactccactgatgctggcctccagctgtggcaacgagagcatcgcctactttcttctccaggtgagctacgagggaactcaggcccagaaacctgaggggctccgtggccaccctgacagagatgcgaaccactgcaggccacggtgttcgtgtgtgctcgtgtaatcacttctgattcttgcagcatggccgcctggagggcgcccgccccacgcagaggagatgaggccgtaacgcacgttctgtgttctcttgaagcaaggtgcagagctagaaatgaaagacatccagggctggacagccctcttccactgtaccagcgccgggcaccagcacatggtcaggttcctcttggacagtggagccaatgccaacgtgaggtgattgccacatctttagtggccacaggagtggcctaggtgtcatctgactctaaggagggtggctctggaggcagctaaccagagtttagggccaccctgcttcggcacgagaggctcaagatgaggggtaggaccagagtccttccaggcacaggccttttcgtacatctgtgagatgcatctcttcaagccctctcagcttccttttctttatctgaaacccacctgggtcatacagttgtaagaattacatgttttattgtatgccaggggcctaacatactgaatggcatttaaatgtcatacattacatgcaaattccttccattttcttgctttttgtatggatgaggtgaggtgatgctttgaaacagtcatgaggccgggcgtggtggctcacgcctgtgatcccagctctttgggaggccgaggtaggcagatcacgaggtcaggagatcgagaccatcctggctaacatggtgaaaccccatctctactaaaaatacgaaaaaattagctgggcatggtgacgggcgcctgtagtcccagctactcgggaggctgaggcaagagaatggtgtgaacccgggaggtggagcttgcagtgagccgagattgcaccactgcactccagcctgggtgacagagcaagactccatctcaaaaaaaaaaaaacaaaaacaacagtcatgagttttggccgggctcagtggctcacacctgtaatcctagcactctgggaggccaaggcgggcagatcatgaggtcaggagttcgagaccagtctggccaacatggtgaaaccccgtctctactaaaaatacaaaaattagctgggcgtggtggcaggtgcctgtaatcccagctactcgggagtctgaggcgggagaatcacttgaaaccagaaggcagaggttgcagtgaactgagagatcgtgccactgcactccagcctgagcaacaagagcaaaactctgtctcaaaaacaaacaaaaaaccagtcatgagttttataagttggaagtgggattgttgtctaaagcttgtcatgataataatcacctttgaacaaacgcagcgggtaccaatgcagcacccaccctggctgtcattcattctaagacacctgataattttgtatgccactaagaaagaaaaaatatgctactaattaacattcaactcgcctgttgatttaaagatgttttctgacttgagagatgttaaaatatgaacactgtgtgtcttaagatggatgaaaaccagcatttcccatgcatggttcctgacttccaaaccagcatgagacaaggagggatttggaagccctctgaagacagtgccgagttagcataaccaagcatgaaaagcaagcttcaggagctaagcgtggcaaagatagcttagatcattagtacttgaacttttcagagtgggttcatggaggacgttgaacttgaagccaggatttggatgaatggatgggagatgctggctttctgtgaggaattagaacagctttttgaatatgattgaggtggagatttcagaggtagccagtgggaatagccaacaggtgggacgacaggcagacatctgtctttaggacaaagaccagccctggggacagacaccagaagagtaaatggagctgatgtgttatattcactgttctcatgtcacctgttaattctggaaagggacagtgttctacgcttagggatcggtgactcgtgcactgctcagggtttatcttcagcagggagtttttgcctggcggaacttgtctcttccaatcatctgactgtggcccacatcttgcagggagccgatatgtggatttactcccttgatggaagcagctgctgctggccatgagataatcgtgcagtattttctgaatcacgtaagtgaccctgattattagcatgtaatgtagtcacggcaaatgaggaatcatattactgaagtataagctattacagaattttcctttgcacagaaataactttcattcatttattcaacacattttcattatctattgacgcccggtgttgagtggtgcttaggcattaaggatacagtggtgagtagaaatagacacctattcctgtaataattttgaaaatactatctgaaaattatggaaaaatattttaaaagtaaatagcactcataatcctgtcacttagaaaaattatatagaataagaaggcagagatcctcctctctttttcaacctccctgatgcccacttggtttgagaaagagctgccctaggacttttcctctgctgtggaaagatgtgtctgtaggcaagtgtgtgcacattgctttgtgttttgaacaaagtgggattctacgtatagtctgtaacttagagacatcttatagacatcttatctttgtacagtattccgtgtacaatctgcctcagttaatttaatgagtttcttattagtagaaacttagtttttaacattttgcaattataaacagtgttccgggaatatccttttacacatagctttaatacatttgcagttatttctgtatgttgtatttctgttttattttattaatttatttttttgagacatggtgttgccctgtatcccaggctggagttcagtggcgagatcgtggctcactgcagcttcagcctcctgggctcaagcgatcctcctgcctcagcccccaagtagctgggactacaggtgcatgctaccatgccccggctaattatttaattttttttttttggtagagttgggggtctcagtatgttgtgcaggctagtcttgaattcctgagctcaagcgatcacctcagcctcccaaagtgctgggatcacaggtgcaagcctgtccacacagaaccttgtacataaatattcatagcagtattattcataattgccaaaaagtagaaaaacccacaagtccatctactgaggaattgataaacaaaatatatatctgtatagcaggatattattcggccctacaaagtaatgcagtactgctgcatgctgcggcaggggtgaaccctgatgcgttaggctgggctgggtgcggtggcgcacgccggtaatcccaacactttgggaggctgaggccagagggtcgcttcagccctggagttggaggttgcagtgagctatgattgcgccgccacactccattctgggtcacagagtggatcctgcctcaaaaagaaaaagaaaaggaaaacattcggctcagtgaaagaagccagacacaacaggccacacactaggtgatttcactcataggaaatgtccagaataagcaaatacatagacagaaaatagatgagtggtttcctgggtcttggggaatgggaagattggggtgataaaaatgtgctaaaattgtttgtggtgatggttgaacaactgtgaatatacgagaagccgttgaattgtacattgtaagtgggtgacttgttggtatgtggattatatctttataaggctgttaaacccaatggggggaagtgcaggcggtcctgatgaattcccactaccaaggttgtctgttgtcctgcccaccagtcatagacaaaggtgtccattttctcttgtcctcaccagtcctgatgtcagtcaaccttttgtcaatctggcgggtgaattgtagcgtctcattttagtttgtccttgttagagtagttgaaatttttttctttttttttttttttggagacagaagtcttgtgctgtgtcgcccaggctggaaggctggagtgcagtggcgtgatctcggctcactgcaacctctacctcccaagttcaagcagttcttctgcctcagcctcccgagtagctgggactgcaggcacccgcccgcacacctggctaattttttgtattttagtagagatgaggtttcaccatgttgcccaggctgctcttgaactcctgaactcaggcaatccacccaccttagcctcccaaagtgctaggattacaggcataagccactgcgcccagccagttgaacatttttaaattgatttcttagccatttgtatttcttttttttttttttttttgagactgagtctcactcagtcgcccaggctggagtacagtggcatgatctcagctcactgcaacctccacctcccaggtttaagagattgtcctgcctcagcctcccgagtagctgggactaaaaatacaaaaaatcccggctaattttttgtatttttagtagagacaaggtttcaccgtgttagccaggatggtctcgatctcctgacctcatgatctgcccgccctggcctcccaaagtgctgggattacaggtgtgagccactgtgcccggctggccatttgtatttctcttacgagctgtctatgtttattgcccaattttctattggatagtttgtttttttctcacttattggtgggaatttcttaaatagtgaaaaattcacatggtatctctttttaacaaagaattttgggacacaacatgcacatggtacacatgcagaccagaaggtgggtgcaccgcaggcctgtcccccaccctgcctgcgtctccttggcaccctccccacgggcgactctgggaatacacccacacatgctcatggtcctgccccatgtgcagctgctcccatcttgcattttttaaaaaacttaatcatgaagatttttctatattggtgtataaagagacggggccaggtgcattgtctcgctcctgtaatcccagcactttgagaggccaaggcagacagatcacttgaggtcaggagtttgagaccagcttggccaaggtggtgaaacccgcctctaccaaaaatacaaaaatacaaaatacaggtggctgacgctgtaatcccagctacttgggaggctgagacaggagaatcacttgaacctgggaggcagaggttgcgatgagccaagatgttgccactgcactccagcctgggtgacagagtgagactatctctaaataaataaataaataaataaataaataaatcaataaatcaataaagagatggggtcttgctctgtccctcaggctggagtggagtggtgcagtctcagctcactgcagccttgacctcctggtctcaagtgatcctcctgcctcagcctcccaagtagctgggattacaggtgcgtgccaccacgcccagccaatttttgtattttttttgtagagatggggttttgccacgttgcccaggctggtcttgaactcctgagctcaggcagttcgcctgcctcggtctcccaaagtgctgggattacaggcacgagccaacgcacccagcccctctcttttttttttttttttgagatggcgtcttgctctgttgcccaggctagagtgcagtggcacgatctcggctcactgcaacctcagacttccgggttcacaccattctcctgcctcagcctcccgagtagctgggaccacaggcgcccgccaccatgcccagctaatttttcatatttttagtagagacggggtttcaccgcgttagccaggatggtctcgatctcctgacctcgtgatccgcccaccttggcctcccaaagtgctgggattacaggcgtgagccaccgtgcctggcctctcttttttttttttttttttatggtggcatggtattccctgtagggatgaatcagagtttttttgtttgtttgtttgtttgttttgagatggagtctcgctctgtagccctggctggagtgcagtggcgcaatctcggctcattgcaacctctgcctcccaggttcaagcgattctcctgcctcagcctcctgagtagctgggattacaggcgtgtgccaccacgcccagctaattttgtatttttagtagacagggtttcggcatgttggtcaggatggtcttgaactcctgacctcaagtgatctaccactttggcctcccaaagtgctgagattacaggcatgagccactgcgcctggcctaccgttgacatttcttacacgtctttttaagcacatatgggaatttcttcaggagcttaggatgtgttcttcaaagtagagtctttgttgtgtgaggtgggttcagtcggtagtgggtagtgtaaacttgctttgttccatagtggtcctggttcacacccctccccttagggtgttagacttcttttttttttttgagatggagtctctctctgtcacccaggctggagtgcagtggcgcgatctcggctcactgcaacctctgcctcccaggttcaagcgattttcctgcctcagcctcccgagtagctgggactgtaggcactcgccaccatgcccagctaatttttgtatttttagtagagacagggtttcaccatgttggccaggatggtctcaatctcttgaccttgtgacccgcccgccttggtcttccaaagtgctgggattacaggcgtgagccaccgtgcctggccttttttttttttttttttttggggtggggtcttgctctgtccccaaggctggagtacagtggtgtgatctcagctcagtgcaacttctgactcccaggctcaagcaattcgcctggctcagcctcccgagtagctgggattccaggtgtgtgccaccatatccagctaatttttgtatttttagtggagacagggtttcaccatgttggccaggctggtctcgaactcctgacctcatgatctgtctgcctcagcctcccaaagtgctgggattacaggcgtgagccactgtgcctggccaggatgttagactttttggctccctggccatttgggtttctttttctgcaaataattatttttgtattttttatttattttttttatatagggtcttgctttgtcaccacactagagtgcagtggcctgatcatgggtcattgtagtctcaacctcctgggctgaagtaatccttctgcctcagcctcctcagtagctgggactacaggcacgcactaccacgcctggctgttttttttttgtagagacaaaaatctcactatgttgcccaggctggtcttgaactcctggcctcaagcaatcttcccaccttggcctcccaaagtgctggagttacagacctgagccaccatgcccggccagataattctttgacagataatcctgctgacatgaactagacttccttaagacacatcatagaatcaatagcccagaaccataaagagcctctacttgtaagtttagagtcattttaagtaaggtagaactggagatcataagagatatgtactcttataatttttgattgtatgtttgtttctttttgagacagagtctcactctgtttgcccatgctggagcacagtggcgcgatcatagtttgttgcagcctcaacctcccaggttcaagggatccttgcaactcagcctcctgagtagctgagaccacaagcgcatgctatcacactagctgatttgatttttttgtagagttggggtctcactaagttgcttaggctggtctcaaactcctggctgcaagtggtcctcccaccttggcctcccaaagcgctgggattacaggcaggaaccacggtgcttggccaacaatttgcatgcctttaccacattccccaaatgttaacatttcacctcattttcttatcagtctctttatgtataacatgcatatgttttctgaatcatttaaatgtaaattgtgacataatgccccttttcccctaaatatgtatttcctgagagtaagaatttcattatgtatttcctaaaagcaaaaatgttctctttcccagtcacacaaaattatcagactcaggaactcaacactgagttcttcctccagcacttgacaagaatcaaagtgttggttagtgactgctttgggggatggggcaggactggcagcaggtggcccgatggcctgggtggtttgcctgccagcgatgctggtgggcaagccctgcctggaagctcctctctcccacgtttttcctgccgcccagtagttagaccacctggagccagaggagggggcccacccggtttcccagcctgtccctccagagctgggctccatttctggaggtagagaatggggcaagtctgggcatcttgtgctctttgctaggggaggaaagggctgtggctgctttccttgtcccccatttcccttctgccagtggggccaagccccagcagctcagtcaggagaagaggatatggatctgtctgggcctctctctttaagagaaagttgattcgtgccttccggatagtcttgttccagggtttctaaactttctgatcccaccttcatgttaaaatgagttttgatcatgtgtctctttagtaatatggacattataaaataggaaaaaaaagtctcttaaagcctaagtagttaaaaatttattttcacatcaggcatagtggctcatgccagtaatcccagcacttttagaggccaaagtgggaagatcgcttgaggctggagttggagaccagtctgggcaatacagtgagaccttgtctctaaattaaaaaaaaaaaaaaaaaaaaaattggccaggcatggtggctcatgcctgtaatcccagcactttgggatgccaaggcaggtggatcacctgaggtcaggagttcaagaccagcctggccaacatggtgaaaccccattagcggggcgtggtggcgtgcccctgtagtcccagctacttgggaggctgaggcgggagaatcacttgaacccggaaggcagaggttgcagtgagccgagattgcgccattgcactccagcctgggtgacagagtgagactccgtctcaaaaaaaaaaagccagttgtggtgtgtgtttgtaatcccagggaggctgagaagggaggatcacttgagctggggaggtcagggttgcaatgagccagtgtaatccagcgtgggccacagagtgagattctgcctcaaaaacaaaaccaaaaatatataacgagttaaaatcctacagtaaagaggctactgttttattctggttaaaccttagggttccttctatcaaacttaaactagaattttttttttttcttgagatggagtcgccctctgtcgcccaggctggagtgcagcagcttactgcaatctctgcctcccgtgttgaagcgattctcctgcctcagcctcccgagtagctgggattacaggtgtgtgccaccactcccagctaacttttgtgtttttagtagatacaggctggtctcaaactcctgaccaggctggttgttggccaggctggtctcaaactcctgacctcaagtgatccgcccacctcagcctccaaaagtgctgggattacaggtgtgagcctctgtgcccagccaagaaattattttttatttttgagatagagtcttgcttcgtctgttgcccaggctggtgtgcagtggcgtgatcttggctcattgcaacttccacctcctggactcaggcaattctccttcctcagcttcctgagtagctgggagtacagacgtgtgccaccacgcccggctaatttttgtatttttagtagagatggggttttaccacgttttcccacattggccaggctggtcttgaactcctgacctcaggtgatccacccgtctcggcctaccaaagtgctgggattacaggcttgagccaccgtgcccagcttataaattattgttattatttattattatttttttgagatggaatctcagtctgtcgtcgaggctgtagtgcagtggcgcgatctcagctcactgcaacctccgcctcctggattcaaggatttctcctccctcagcctcctgagtagctgggatacaggcacgcaccaccacacctggctaatttttgtattttttagtagagacggggtttcaccacattgcccaggctggtctcgaactcatgacctatgatccacccaccttggtcccccaaagtgctgggattacaggcgtgagccactgtgcccggcctataaattattttttaaggcacaaagtctcataggtaatttttaatcagagtcaaaagtaggatggggggcactctagaaagtaaaactccttatactttgtgaaaacacagttttttgtcctgtatccctgcccagagaccacctctgcctcccccaccaactacatatgggggtcaaggttgaggccccctggtctaacgggagagacagttgccgtatgggtggtagcaaaactccttaagggttgtgatttttttttttttttttttttttgagttggagtctccgtgtgtcgcccaggctggagtccagtggtgcgatcttggctcactgcaacctccacctcctgggttcaagcgattctcctgcctcagccccccggagtagctgggactgcaggtgcccaccaccacgcccggctaatttctttttgtatttgtagtagagatgaggattcaccctgttggccaggctggtatggaactcctgaccttgtgctccgtccacctcggcctcccaaagtgctgggattacaggcatgagccacggcgcctggctgtgccttttttctcttaatgatgttttgtgcaccctagtccgtgtcaccgcaggtactcccacccaccacgtaaatgggcgggaggcgctctgttttctggatatgctctcacgtagctcattaatctcttattttaagttccttctgattctcactatgctgaatgccacagtgaaaattctaaattgtagtgtatgtcctgcattatttccttaggcgccgctgcacttcagcctgggtaacagagcaagatcctattaaaaaaaaaaaagcaaacatgcttatggtagtacattttaaaaacatagaagattggaaaattggaaaaatccccatcaaaaatagtaaataacttaaaaatagcaacattttgggtatgttaccttccaatattgttttctgtgtaatttttttggtctcattttgccggagttgtaatgtatatgtagttttgtatcatgatccttttttatttttttgagacaaggtctcgctctattgcccaggctggagtacagtggtgcgatctcagctcgctgcagcgtcaagctctgggacttaagtgatcctcctgcctcagcctcctgagtagctgggactacaggcatgtgccgccacaccctgctaattttttattaaagatgctccccctttccggggtcccgcctcctcctctgagctttggctctggcttccctgcctcccccagctgcctggtctgacaggagagaaggacagttacagtgtacagtgacaccaaaaacatgctgtattgattatagtttatttttttttcttgtagaggtgggttcatgctgtgttgcccaggttgttgtccaactcctgagccgagcgatccacctgccttggcctgtcaaatgctgggattacaggcatgagccacctcacttggccatgatcctttttcaacttgatcatacagctgtttgtaaatatcaccatctatggcaataacagaactgactgcttatccccctgagcattcaagttttctctaggtaggttttcattattgtgaatatgctgtgccaaacatcctttttttttttttttttttttttttgagacagagtctcactctgtcttcaggctggagtgcagtggcatgatctcagctcactgcagcctccgcttcccgggttcaagcaattctcctgcctcagcctcccgagtagctgagactataggcgttcaccaccacgcccggctaatttttgtatttttagtagagacggggtttcaccatgttggccaggatggtctcaatctcctgacctcgtgatctgcccacctcggcctcccaaagtgctgggattacaggcatgagccaccgcacccggcctgtgccaaacatctttgtgcactaaagccttttctgtatttagggttatttccttagggtcatggaagtggaattgttgcgctgcaagacctgtaaatacattatagagctttggatcaaagttacgaattctgcttcagaggatggtgctttcattctgactggtttaaaaggctgctttctttgaagacaagcgaagtgagtgggacacagcccaggcgcagaaggtgaaggctgggatctccgcatggtggctgccagccccctgcaagggaggtcatgagcgtgggagatgactccccagcccccagccctcctcatccttgtccctaagaagagagtgagagcaaaacttgtggctgcggtgcagacaagcctgcctctttctcatgcagatgtgatgtttcccacacagggaggcagtcagaaaccagcatatgcccttctgtcttcccagccagcagcccaggaagggcaggtgctttgaaggagaggcccctaaccccctttcacggacattcacagggagtcaaggtggacgcgagagaccacagtggagccacagcccggatgctggccaagcagtacggacacatgaagatcgtggccttgatggacacttactcgccctctctgcccaagagcctctatcggagcccaggtacccacacctgccagccgcgccctgctggggtctctggttgccttgagctttaggtgacctggcagagaaagatgtcccccgcttccccggctcccaccttctctgagatttggctctgcctcccccagctgcttacatgtcaaggttgaggcccctgctctaacaggagataaggatggttacgatggagagtggtacaaaaccaggctgttgtgaatgtagaggctttctgtagtatgcttgactaccgagtaggggcaggcccctcttagttttctgttttcactgtttcctgagctatggcttgttcattcttctatatgaacttgaatatcaacttgtctagctccttaaaaacagtattgatatttttactgagattgtgacaatgtataaattaactatatctttgtgttgttgtcttatccaagaacaagggatgacttcttgttccaatgtacttttgggtcttgcaggagggttttaaatttttcttcatctacattttgcatgtgacttaagtttattcctaagtgtttgatcatctttgtcgctattgtaaatggggttttccctatcattatatcctttttttccccccaactctcagggtattaattattcagtgctatttattttttatttcagtaggtttttggagaacaggtggtggttggatacgtgaataagtcctttagtggtgtcattatatcgtttcactgcatattgtcagtgcatttgaaggcagtggatttctgcaaacttttgttttttttttgatacgggagtttcgctcttgttgctcaggctggagtgcaatgaagcgatcttgcctcaccgcaacctcttcctcccaggttcaagcaattttgcctcagcctcccaggtagctgggattacaggcgtgcaccaccatgcccggctaattttttgtattttcagtagagatggggtttctccatgttggtcaggctggtctagaactcgcaacctcaggtgatccacccatctcagcctcccaaagtgctgggattacaggtgtgagccactgcactcagccctgcaaactaattttatattctgctaccttacagaattcttacattgttcaggttagttttgttattgattctttagggctttacaggtgtactaacatataatctttaagtatcgatggatacactgcttcctgctgattctcatgactctgactttgttgaattgcaccgttcttttgtttagttgctaacacctctagctcattgttcaacatagtggagatagtgagcctccttaccttggtcctgatcttagtggaaatgccacgttacatgagaggctgactgtaaaagggaaggcatatgttattttagcttattaacaaagtattcctcagttcttctattcctgagtggtgttttacaggagtaactattgaattgtgttcccatatctttggagacgatggtgaattttcatatggtagattgtcttcatgaacctcctaataatgaatcaaccttacattcttggcataaatcccacatgttgtactattttaatgtgtttttgaattctgtttattaatatttagtatttttctatggatattcagtcataagtgatactggtctatagttttctttcttctttttttttgtttttgaaatggagtcttgctctgttgcccaggctggactggagtggcgagatctcagctcactgcaacctccgcaacctccgcctcctgagttcaagcaattcttctgcctcagcctcccgagtagctgggatcacaggcgtgcaccactacacccagctaatttttgtatttttagtagagacggggtttcaccatgttggccaggctggtctcgaactcctgatctccagtgatccgcctgcctcagcctcccaaagtgctgggattacaggcgtgagccaccgctcccggcgtggtctatacttttctatttttgttctgtctatcaggtatgggtatcagtgtttacttcataaaaataatttggaagttttccttccttttttgtgttctaggacaatacacgtagcattagtgctacctggtcttagaagttttgatagaatcctcccatgaaaccatctggtctctttctgtgaggtggttcctcgataacagtttttctatttcttctatagagattggcctcctcatactttcttttcttatggggtcagttttggtaaattatattttcctgagagatcacttcatctaggatttcagacttatctgcagaggtctacaagataatattttctccctttttttttttttttttttgagacagagtttcactcttgttccccaggctggagtgcagtggctcgatcttgactcaccgcaacctctgcctcccgggttcaagtgattctcctgcctcagcgtcccaagtagatgggattacaggcatgcgctaccatgcctggataattttatgtttttagtagagacagggtttctccatgttggccgggctggtctcaaactcccgacctcaggtggtctgcccacctgggcctcccaaagtactgggattataggtgtgagccaccgcacccggccaatttttttctccttttaaaatattctgtttcagggccaggcgcggtggcttatgcctataatctcagcactttggaaggccgagttgggcggatcacctgaggtcgggagttcgagaccagcctgatcagtatggagaaaccccatctctactaaaaatataaaattagctgggcgtagtggtgcatgcctgtaatcccagctactcgggaggctgaggtgggagaatcccttgaacccgggaggcagaggttgaggtgagccgagatcgtgccattgcagtccagcctaggcaacaagagcgaaactctgtctcaaaaaaaaaaaaaaaaaaaaaattctgtttcaggctgggtgcagtggctcatgcctgtaatctcagcactttgggaggctgaggcgtgtggatcacttgaggtcaggagttcaagaccagcctggccaacatggtgaaaccccgtctccactaaaaatacaaaaataagccaatgtggtggtgtgcgccagctactctggaggctgaggcaggagaatcacttgaacccgggagggggagattgcagtaagccaaaatcacgccactgcactccagcttggcgacagagcgagactccatctcaaagaaaagtaaatagataaaataaaacaaaataaaatactctgtttcagtggttattttctcctgttattatctttttttggcatggaaaatattgatttattttttgtgacagggtcttgctttgtcacccaggctggagtccagtgacccaatctcgactcaatgcaacctccgcctcccaggctcaaaacgatccttctacctcagctctacgagtagctaggactgtaggtgcaccctaccacgcccagcttacgtttgtattttttgtagagaggtggttttgccatgttgaccaggctggtctcaagagtcctgagctcaagcaatccacccgcctcagcctcccaaagtgctgggactacaggcatgagctactgcacctgacctggaaaatatttatctcatttttaattgacacaaaataactacatatttatggggtacagtgtgtgatgttttgatacatgtatacactgtgtaatgatcaaattaaggtgattagcttatccatcacctcaaacatttatcatttcgaggtgagaacatttaaaatcatgtcttctagtagctattttgaggtataagctgttgttccgtatagtcactctactgtgaacaccagaacttctttcttcgatctgtaattttacacctattgaccaatctctcccactacctccccacccccaacctctgataatcactattctactctacatgtttgacatgagcttttaaaaatcctgtaaatgggtgacatcatgtagtcatgtagtcttttttgttgtttgtttggtttttgagacaggttctcgctttgtcacccaggctggagtgtggtggcataatcttggctcactgcagcctccaattcctgggctcaagtgatcctcctatctcagcctcccgagtagctggcactacaggcacctaccaccacacctggctaatgttttatttttttgtagagacggggtcttgctatactgaccaggttggttttgaactcctgggctcaagtgatcctctcgccttggcctcccagagtgttgggattacaagtgtgagtcaccacaacagctggcatttgtctttcttttctatgtctggcttattttactgaacatagtctcttccaggcttattcatgttgccacaaatgatcagatttcattctttatgtctgaataatattcaattgtgtatataaactcattttctgtcttcgttcatccactgatggacacaggttgattctctatctaggctactgtgaatactgcggcagtaaacatgagggtgtagacatctctttggtatactgatttcctttcttttggataaatacccagtagtggaattgctggatctcatttcttatattttttaatttttttttttttttgagatggagtttcgctcttgtttcctaggctggagtgcaatggcacgatcttggctcactgcaacctccacctcccgggttcaagcgattctcctgcctcagcctccctagtagctgggattacaggcatgtgccaccacgtctggctaattttgcatttttgggagagacagggtttctccatgttggtcagggtggtctcgaactcccgacataaggtggtccacccgactcggcctcccaaagtgctgggattacaggcatgaaccgctgcacccggcaaaaatttcttctattaaaaaaaatagagacagtgtctcagtatgttgcccaggctggtctcaaactcctgggcccaagcgatcctcccacctcagtctcccacagtgctgagattataggcatgagccactgcgcccggcctcacttcttattttgaatatttgtgtttgttctttttttttttttgagacagagtctcgctctgttgcccaggctggagtgcagtggcgcgatctcggctcactgcaacccccgcctcccaggttcaagcgattctcctgcctcagccttttgagtagctgggactacagggtgcccaccaccacacctggctaattttttttttgtatttttagtagagacagggtttcactgtgttagccaggatggtctcgatctcctcacctcgtgatctgcccacctcggcctcccaaactgctagaattacaggtgtgagccaccgtgcgcagcctcttcctttttttcttaagttaaatactagtactttgtctgtttagtggaaaaacaagaaaaacccatcggattttgatttattaatgagacctactgattgtctgtttaatttctgcttttatttttatttggcttactttgttgttctagttttttgagttggaaacttctttcattttcattgttgcccttttgttgctaaatgttagaggctgtgaatttttgctgattgctgctttaagtgtattctgggggttctgtatttaatactttccttgttatttttagaaattctgtaatttttatttatattttctccttcacccaggagttgtctaatagaagtattatgattgtttttgtttgttaatttctagatggaagggcctttttgatcttgcaattaatttctcatgttattctgattaactttaatgtgtctgatcagagagtgtttataattcttacatttacataacttccttgtcatcttatttatcatctactgatctatctatatatatatatatttttttcagatgtagtctcactctgtcacccaggctggagtgcccaagtgcgatcttgactcactgcaacctctgcctcccaggttcaagcgactctcctgcctcagcctcccgagtagttgggattccaggcatctgccaccacgcctggctcatttttttttgtatttttagtagggacagggtttcaccatgttggccaggttggtcttgaagtcctgacctcaagtgatccgcccacctcggcctcccaaagtgctgggattacaggcgtgagccaccgcgcccggccctgatcaatattttttagtgttccgtgttttgcttgagaagttgtattctctattatctgtatacagtttagcatatctgtgagtctatcttatttaggattatgtactcttagttcattttctacaaaattacctattagcgtgtttctgatttatgaaggaagttggtgcattttttggtgacagattttcataacttgttatagattcactgtgaattatggcttttagtattagaagtgtccttctggctgggcatggcccatacctgtaatccgagcactttgggaggccaaggcgggcagatcccctgaggtcaggagttcgagaccagtccagcctacatggtgaaaccttgtctctactcaaaatacacaaattagccaggcatggtggcacatacttacaatcccagctactcgggaggctgaggcaggagaatcacttgaacccgggaggcggaggttacaatgagccgagattgtgccactgcactccagcctaggtgacggagtgaaactctgtttcaaaaaaaaaaaaaaaaaagtgtccttccgtgtcatatttaatgtgttttgccctgaattccacgttgatagcaggattgcagccctggctcttttgtggtttccatctgcctgttctttttaagctgctctgagggtgtgttgggtgctgagattcacgcagctgccgttcccttgcttattgctgcctctttgcatttgtcttacagctccctccccttcagcttggatggaagcacagtctccctggagtgctatagatctttgagtgtgaggaggtgtgtgtccatatggctagctcagtcgccagagcttgagcctcgtcatggggaaggacagagtggcccacgttcagggcctgagctctccctctttgctggcctgccctgagttgtcctgtcagtttgcacctgagcgagcagctcctttctcagtgtcaggctcagcccagcctcttccctggcattgggattgtttcataataaacacagctcaggtggtaatgcaaaggacctttcccttcatttctgccccagcttacccactccacaaggagatctcatcatttcctcctgtatacaactcacgtatctcttaaaagtagaatcagatcagagccttatacaaatcaaatatgaaaaactgaaaagctacaaaataataaaagctctggtttgagctctgaaagctcagactgggaagtgatttgaaacagtttataatcatagcaaacacatgccatgctttagaaaatacaaaattgtggctgggcgctgtggctcactcctgtgatgccagcactttgtgggaggccaaggtgggcggatcacaaggtcaggagatcgagaccagcctggccaacatggtgaaaccccgtctctactaaaaatacaaaaacaagattagctgggcatggtggccgggtgcctgtagtcccagctacttgggagcctgaggcaggagagtggcgtgaacccaggaggtggagcttgcagtgagccgtgatcgcaccattgcactcctgcctgggtgacagagcaagactccgtctcaaaaaaataaagaaaaaaaaaagaaaatacagaattgcttaataagttgtttccagccgggcacagtggtaacgtgcctataatcccagcactttgcgaggctgaggtgggtggatcacctgaggtcaggagttcaagaccagcctaatatgatgaaaccccatctctactaaaatataaaaattagctgggtatggtggcatctgcctataattcccaactactcgggaggctgagataggagaattgcttgaacccaggaggcggaagttccagcctgggcagcaagagcaaaactccttctcaaaagaaaaaaaaaaaagttgtttccaaaggaagggattaggaaaaagtagttgtgacttatattaccatatattttaatgaagagatgggttttacttattcaaattagaacagaatttctgattatgaacaatacagacttatgaacaatttggcaaaccccaacagagataataaactcctggctgggcatggtggctcatgcctgtaatcccagcactttgggaggccaaggcaggcagatcaggagtttgagaccagcctggccaacatggcaaaagcctgtgtctactgaaaaagaaaagaaaaaaaacactgggcatggtggcacgcatctgtaaccgcagctacttggaagggtgaggcgtgagaatcgctagaacccaggaggcggaggttgcagtgagtgagccaagatcatgccattacacttcagctcgggggacagagtgagactctgtctcaagaaaaatgaaacttcccatcctcactaactttgcagctccctgtggcccattggagcagcgccccggcctgttagggcatttctcagaagtgatgccctggcagatacccttctccttaatttaacaaaaccggcgacagtcactttctttcagtttgccgtaaggattagtaaatgagtccattactgaacacactatcttaatcttggtgtttgatcacagaaaagtacgaagatctgagctcttctgacgagtcctgccctgctcctcagagacagaggccttgccggaagaagggtgtcagcatccacgagggaccgcgagccctggccaggatcacaggcattggcctgggcggcagagccccacggcctcgctatggtgagtggcccgcgtttcccgagggctctttctcattgcataccaggattttgtgttggcaagaatggaatagctcttaggctcctgaaatgtgggtcgctggacctcaggtggcagcgggacaggtggcccagctttcatgctcagggagactcaggattgagtcctgtgatggaaatgcattggtcacggactagctcttgttttttgctttatctcctggagtttccttttcgttggttaaatttaggaatagaactttctctcctgcagcagaaatgtagctaaggtcagatttcattcatcacataggtgggttggctcatacagggaggaggcaaagcgtgaagttcacttccctgccctgcccataccagctgggtcgggtgcgctgctgggggcaggaggccaagaaaacaggccctgctgttttctcagggcgatgaagttgtactcagaccctcctgagagagggcccgcttgttgacttgctggtgaagaatcctagcctttgggttttccagtctcgttcattctcagattcccagccccagggtgttgagcgttttgctcttggggagtgctggggtttctttttaggggagttgggtttggtgcctactctctattgctgtggtctgtcccagagctcagctggaggtgtgagttatgtcttcctttgatggctgtcacccactcatagccaggccaaggctgctggtctcacaggcctggtggctggtccttctcgggagcaaggcctctttgaggccaggacttggaagagtgagagtagacagtgtttcagccaggggtccaccagtaattgaattcccttctagaccccaggaacaagcagatgtgcagacttctgtcttcccaagcctgggtgctgggttgggaactggagacccaccttctcccatcatcctgggaagggtgagctgactgggccactgggaaggcctctctcgagctgctggccagccccaccacagcatgagggcccgcccgtgtcccgtccgctgagctgtgagcactggctctgggacaccgggctggtcgttctgagtggcagagtctcttccttccaaaaggtccctgccacctgctacagcctgaggtgtggtggggacaggaaggaagctgtcatcctggggctgagttggtaattaatctatatagctgtacaacaaatgctttaacaaaatcatacatgtctgaagccgcttgtgtgcggttctttgtatgtatccacagagaagtaatcatggtggtggtctcaggtgtggtatttcaggggatttttgttttctcataccttgtgaaatttaaattttctataagtgcatatattttatttgccagtaattaagaaatttggggccgggcgcagtggctcacgcctgtaatcccagcactttgggaggccgaggcaggtggatcaagagatccagaccatcctggccaacatggtgaaatcccatctttactaaaaatgcaaaaattagctgggcatggtagtacgtgcctataatcccagctactcgggaggctgaggcaggagaatcggttgaacccgggaggcggaggttgcagtgagccgagattgtgccactgcactccagtctggtgacagagcaagactccgtctcaaaaaaaaaaaaaaaaaattgggggggccaggtgcagtggcttatacctgtaatcccagcactttggaaggctgaggtaggaagattgcttgggctcaggagttgtgagaccagcctgggcaatgtagcaagaccctatctctacaaaaaattttgaaaattagccagatatggtggcccatgcctgtagccccagttacatgagaggctgaggtggaaggattgcttgagcccaggaggtcaaggctgtagtgacccatgatggtgccattgcattccagtctggataacacagcaagaccctgtctcaaaaacagtttagggggcaatgataaatagcatgtgctgattagaaaaacttctccataactaggaaaatacgtaaagaggaaagtaagttccccatggtcccatcaaccagtcctttgggttcttttttgagacagggtttcactgtagcccaggctggagtgcagtggcacgatcatagctcactgaaggctccagttcctgagctcaagcgatcctcctgtctcagcctcccaagtagctgagattacagacatgtgccaccgtgactggtcaagtcagtctttttatgtaaaggggcaaaactggagtgaaattgcctggtatacatgcccctttttctgcttggttttagaggcaggtagagttaggtaatttcatattattgttgttaatttttacctcaaggcctttttccttcctgctcagccaggtctctttttcgccggggttgactgaccagaggaggcccgctaagcgcctgtggttaaaggtcacagggacataaagacacgtggtcgatgggtgtctgtgtgaggtcattagctacctcctgctaaaaggaacactcatggtatagttttctctggtcaggcatctgtaaatacagctgaccatttgctacgttttccccttggaaaagaaatggagagggcccaggcttgacctggctgccagccctcgccccaccaggcacttgcttgggccactgactgaccctcagagcatcttttccacccacacaccacagatagagccatgccaggtcgcaggggcaagtaggtgaggtcatgactgggaagtcacctgcctccatcctgggcctcggcctctgaggaggtttcactttggagttccctgggcttatgggccccattctgtacacagagcaggctcctccccgtggctatgtcaccttcaacagcagtggcgagaaccccctggaagaagagggcctctgctgccgggatgtcacctcccccatcaatgagcgggatgtggagagcagcagcagcagcagcagtcggggtacgtgcacccccacccatccggcccgtggctcaggcaggtcctggagctcctgtgtgcccatccccacttatcccctgggcctggcgctggacacagccatccagcagaggacaggaaaggggtaggtgtggacggccctggttcttgtgaggaatgggagaagcttctggtccagcatccccgtgcggcttaagggagccgttccacagcaacaggtttagctccttgcttgggagcccctgaggctttcagggcaggccccagtaggaatgtctgttataactgcacctccgtgcagcagctgtttccatagtgcccaccgtgtgccaagcactgctccgggtgcttgggatttatcagtgaacaaaaaagacagaagccctgcccgtctgtatagaggggagggtttaggacaggcaggaagtttgaaatataaggaagcaaccgctgcaggccccaaggagtgccctggtggaggcggctcagcccggggcacgcccatgcgcagcacctcggtgagggctgcaggcggacgccctgtcttcccgccctcagaggaacatgctttctgtgccaacctggggcccgtccagagcagcagcagcagcgagggcctggccagagcccaggggctcagcagcgaagcttctgtggagagcaacgaggtacggattctttctttcttggtctcccatagccggtccctggctgggatgcctgacatcccccagttactttaagatgagcatgtatgtaagaagcagctgctgcacgtgtgtgctgcactgggacgtgctgtgtccagggtctggcttctcagacgacagcgaacgcaccggaagcccctgtgtggcgggtggggggtttcacgaagcctctcaagcccctgtgtggcgggtgggggtttcaccaaggctctcaagttagcccgcgcactctttcagatgcacgcctctcactgcaggactcggatcatgcctg

SEQ ID NO: 15398 - DNA, 33361 bp, Homo sapiens
ggagctgtcccggtgccgacccgcgagcttcccggcgtgctccgcgccctcccgcaactacttccggggcgggtgccgggggcggtgccccggcgagggagcgtggcggcgagctgtttggggggggttggcgacggcagcccgagggcggcgcaaggcctgaggcccagcacaggtgggttccgcggcggcccggccccagcacttgccggcacctgcagcccgcctagacccggcgctcgggcgtcccgcgctgcacttgctcgccgcgtgactggaggaccgagcccccacattttctttatgtggttgtggtgggggcacagtaatgccctgtgcgccgtagcgttcctgtggggatgtggccggggggcgtcgggaagcgtcactgctgtgagttacgggtttgtcggccagggacccgccccggggccagtgagctacctttgcgatgcggttccacggggcgagagggggtgcctgggtgctttcacagacctcctctgtgggcgtgacagttaccaccagcatcacatttgttaagatttttaaaaattttttaatttttgtgggtacgtagtaggtgtatatatttatggcgtatatgagagattttgatacaggcatgcagttcgtaataatcacatgtaaaatgggggtctccatcccttcaagcatttatcctttgtgttacaaacaatatgattatactctttgaattatttttaaatgtgcagccgggcgcggtggctcactcacgcctgtaatcctagcactttgggaggcaaaggcgggcggatcacctgaagtcaaggatttgagaccagcctggccaacatggggacacttcgtctctactaaacatacgaaaactaggctggcatggtggctcatacctgtaatctcagctactcgggaagctgaggcaggagaatcgcttgaacccaggaggcggaggttgcattgagccgagatcacgccgctgcactctagcctgggtaacagagtgagattatgtctcaaaaaaaataataataaataaataaaatgtgcaattagattatattgactatagtcaccctgttgtgcggtcaaatactagatctttttttttttttttttttttttgagacggagtctcgctttgtcgcccaggctggagtgcagtggcttgatcaaatactagatcttattcattctgttttttttgtatccattaagcatccccaccctccactacccttcccagccttggttacactagaagtaaccatccttctactttctatgtccatgagttcagttgttttgatttttagataaccacaaataattgagaacatgcaatatttatctttctgtgcctggcttatttcactaaacataacgatctccgcttccatccatgtttttgcaaatgataggatctcattctttttttatggctgaatagtactccattgtgtctaagtaccacattttctttaggattcactgtaaaggtaacagatacttagcattttcagaatggacagaaccaaaaagttgaatgaaaactaaaacgtcttatctctaatgctactttacaccacaccactcgggatgggacattttagttttcactttagtgttttttttttgtttttttttttgagacagaatttcgctctgttgcccaggctggagtgcagtggcttgagctcggctcactgcaatcgcctcccaggctcaagcgattctcttgcctcagcctcctgagtactgagactacaggcgcccaccaccacacccagctaatttttgtaattttagtaaagatgggagttcaccattttggccagggtggtctcgaactcctggcctcaagtggtccgtcacgcttggtctggttctcattgtccttcagacctctggggatgtcagatatgcaagtctccagtaaatagagaacacggcctcaccctgcaggaggcctttggcgtggaagagacatgcccagtgaaggcttgagggaggtatggaagggactctgaactgaccctcagctcgtttggtttcttatccaggcttcgttggccagggctgttagggtgggattctcacctgcaaagtgagggaagggcactgcacgatcttgggctctgctagctgaagaggtggtggctccaggaaggagggctttgcttgccccaccgcacctacacacactcttcaccaagggtctgtgaagtgttcgtctcccacattggtggcttgtttctttagccatcttggctgtcacctggggcttggaagcattctttaatagaaactgaggtcctcatcgcatctattaactaccatagcacctgtaggtcatcacaacctgacaaggcctttgttttcgcctttgctccctttcctacccttgtttcctggcactcttgtacctaaggattctactaggaagctgatgaccttgccttgatttggggattcctggtgtgccgttacccatgtaggcccatctcggggaaagtgttacctcaccagttcaccggcctgttatatttccccccatagctctctcttcaaaggatgcctaagtggattcctattcagttgacggttgctgcgtgccaccagtcacatcctggtttgtctgttggggaattgctttctatttttttcagaaaaatttatttttacttttttgaaattttcaatttcataaccattccagaaaaattaatttatatttaaaatttacaggccaggtgcagtggctcacgcctatatttccaggactttgagaggctgaggcgggcggatcacctgaggtgaggagttcgagaccagcctggccaacatggtgaaacccccgtctctactaaaaatacaaaaattagcctaacatgatggcgcacacctgtaatctcagctattcaggtggctgaggctcaagaagcccttaaacccaggaggcagaggttccagtgagctgaaatcatgccactgcactccagcctgggcaacagagcgagactgtctcaaaaaaataaataaaatttacatacagtaaaattcattttggtgttcagttctgtggtttcataaaggcatggagtcacagatccaccgtcacagtcatacaggtctatcgtcccccaaattccctctctgccccaacctccaaccctttaattttgccttttccagaatgtcatgtaagtgaaattatactgtaggcaggcttcttccatttagcgtaaatcatttgaaattcattcacgtgttgcatgtcaactgttggatccttgtgtttaatgctgagtagcatccattatatggatgtgccaccgtttgtttatccattcttttatgtatcataatagcagcctttttagatatgtccccgttagacagtgaggcactagggattggagttgctaagtagcagagctgcttttttgttgttttttttttttgttttgtttttggagacaaagtcttgctctgtttcccaggctggagtgcaatggcgtgatcttggctcaccgcaacctccgcctcctcagttcaagtgatgctcctacctcagcctcccgagtagctggccttcatgcccagctaatttttgtatttttagtagagacaggatttcaccatgttggccaggctggtcttgaactcttgacctcaagtgatctgcccaccttggcctcccaaagtgctgggattacaggtgtgagccaccgcaccgggtccaagctgaattttgatcaaaccccaaatccagggttcttccccaccacatcaaggaactgattgggttaaacaacccaattagcatttcttcactgcccatccaagaggttgtcaggttcctagagttggtggagaattctcttttacctggtgcctgcggttggaaggaggagcaggtactccacagttaatgcctcaccatatgtgctcctctttactggtgtgatagcaggctcaccagatttagcatggttgggactgcccaaagcatacattatttcagcaaataaatttgtctgagttactcccggggttgactgcactgggttatcagtctgctagtgcagtggtgtagcaggggcaggaccagcctgtttcatgccctggaacaaccagccaggaaagatctaacccttgggccttcctcctcagtgatgtccgagctcagcgatgaagccagcgagccggaactcctgaaccgcagcttgtccatgtggcacgggctcgggacacaggtcagcggggaggagctggatgtccccctggatcttcacacagctgcttccattggccagtatgaagtggtgaaggagtgtgtgcagcggtaagagatctcggggaacttcctctcacattttgagcagcgcagtgatggcttcgatcccacgtgatggggctttgcacacagttgtggatgtttaatgcgtgtagaataggttaacctgcttatctcaggcagctgtcagtaagtattgatgctgagccctgacaaagaggccgtttttattcctaggaagaaaaagagggagtaaactttgatcagaagcttataaacagtcattctttaaccagactaattttattcactaattgcagaaatgcccaaacaaacaagcaaaataaaaataaagacagaaagtgatggcctggtgcggtggctcacacttgtaattccagcactttgggaggctgagatgggcgggtcacttgaggtcaggagtttgagaccattctggataacatgatgaaaccccatctctactaaaaatataaaagttagctgggtgtggtggcatgtacctgtaatcccagctactcaggaggctgaggcaggagaatcgcttgaacccgggaggtggaggttacagtgagctgagattgcgccactgcactctagcctgggcaacagagtgagactctgtctcaaaaacaaaaaaaagaaaaaagaaagtgatccctggccttcttttcccggagggttcattcgatccctgtgatccctgttcccctctagcttctgccatggaggaggagagaggctgggctttcagtgcctctggggaatgacctcccgacgtcactgcccacctgccctttgctaatctgtgtacaatagttagagacaatataaagcccctggcagggtccatggctgcgtcttgcccatagtaggatgtgatcatcttgtttttggaaaagggtcgtctcctcacttccacccccttatgttccacacacagcctaactctgtctcctggttctcatttgatattgtggtgcagcgacctctcttcctctctctgcgtgcctcttccagttcccagtgagccaaagcaaagcattgctgaagccccaggtctccggttcccaagttgtggccctcacttagacatacccagcccatggagtgctggtgcaccttggtacagggtggtctgttgcgctccctccacaggaggctctaggcataggcagctgggtatgcagtcagtacggcccctcaaagggtcacgtttggaattctcaggctcttaagtctttgggtgtcctgttaagatgcagagtccataaccgctccatagaggagcagggggaggcgtttgtgttgtgatgggattttgacactagctgaggtggaggcttgctgatagtaagcacaggatggggcctgaggggagctgggggcatcagaaggaaggggtggggctgaacgaggagtggtaagagagccccagggagatgctctgctgttgtgtaaaggaagatagtgttaggacgagctgggtgcattcgagccctgctgcagaggcatctccatgcagcccccctggccaggggctgccactgaaccctggtatcaggaccttctggaatggctgcccaggtgtgcatcccagagtcactgagggctgccaggcaatggaaggtagttgcctgctgtggtctaatatgtgaatcccggctgggcgcggtggctcacgcctgtaatccagcactttgggaggctaaggcgggtggatcacgaggtcaggagatcgagaccatcctggctaacacggtgaaaccccatctctactaaaaatacaaaaaactagctgggcgtagtggcgggcgcctgtagtcccagctacttgggaggctgaggcaggagaatggcgtgaacttgggaggcggagcttgcagtgagccgagatcgcgccactgcactccagcctgggcgacagagcgagactctgtctcaaaaaaacaacaaaaaagtgaatcccgtaaaagggacagatcctggggttcagtcaccagttgttatcccctctgcaggcaagaactggggaagggaaagaaggcctgtgggcgttaaccatgtaggatcccaggtaaccatgcaagtgggtattattttaaatgtgactcccttgtcccaaccccagagtcgcagctaggaagcccacagttttttcccatgggaaaatgcattgccagaattttaacagcaatcagtgagaaagatgggattctttggtcacagatttttcaagaatgtttctttaaggtgaggtgacaaaggatgaatcagtggcggtgggacttgtccacggtggagtcccttctttcctcactgctcctctccacccagcagtgggctagtagatgccaggcctgtggtggtcagggtttttcaactgtggctgtgttgacaatccaggctggatcattctttgctgtgggggctgtcctggacactgtgggatgtttagcggcagccttggcctccagcagcccttccctgcccagttgtgagaaccaaaaatgccttcacacattgccacatattccctggttgagtgccatctgcctatctggtggtgtgaaagagcatagctggccttgggctaggaggatgcgaaatcagagcaaggagacgaaggctcagggcctcacaaggcagtgtacgagcaactgtcagcatttttctgcctgcctgcctccaatccccacaacgtccagggtggcagataacttctgcttcctgtcaactcatcccgcctggcctagcctcgccaccagctttggtgaaccccacatgcgaggcggctggccatgtctagcatatcttgcgtttgtttaggagagagttagatttgaataagaagaatggtggtggctggaccccgctgatgtatgcctcctacattggccacgacacaatcgtgcacctgctgcttgaggcgggggtgagtgtgaatgtgccgaccccagaagggcagactccactgatgctggcctccagctgtggcaacgagagcatcgcctactttcttctccaggtgagctacgagggaactcaggcccagaaacctgaggggctccgtggccaccctgacagagatgcgaaccactgcaggccacggtgttcgtgtgtgctcgtgtaatcacttctgattcttgcagcatggccgcctggagggcgcccgccccacgcagaggagatgaggccgtaacgcacgttctgtgttctcttgaagcaaggtgcagagctagaaatgaaagacatccagggctggacagccctcttccactgtaccagcgccgggcaccagcacatggtcaggttcctcttggacagtggagccaatgccaacgtgaggtgattgccacatctttagtggccacaggagtggcctaggtgtcatctgactctaaggagggtggctctggaggcagctaaccagagtttagggccaccctgcttcggcacgagaggctcaagatgaggggtaggaccagagtccttccaggcacaggccttttcgtacatctgtgagatgcatctcttcaagccctctcagcttccttttctttatctgaaacccacctgggtcatacagttgtaagaattacatgttttattgtatgccaggggcctaacatactgaatggcatttaaatgtcatacattacatgcaaattccttccattttcttgctttttgtatggatgaggtgaggtgatgctttgaaacagtcatgaggccgggcgtggtggctcacgcctgtgatcccagctctttgggaggccgaggtaggcagatcacgaggtcaggagatcgagaccatcctggctaacatggtgaaaccccatctctactaaaaatacgaaaaaattagctgggcatggtgacgggcgcctgtagtcccagctactcgggaggctgaggcaagagaatggtgtgaacccgggaggtggagcttgcagtgagccgagattgcaccactgcactccagcctgggtgacagagcaagactccatctcaaaaaaaaaaaaacaaaaacaacagtcatgagttttggccgggctcagtggctcacacctgtaatcctagcactctgggaggccaaggcgggcagatcatgaggtcaggagttcgagaccagtctggccaacatggtgaaaccccgtctctactaaaaatacaaaaattagctgggcgtggtggcaggtgcctgtaatcccagctactcgggagtctgaggcgggagaatcacttgaaaccagaaggcagaggttgcagtgaactgagagatcgtgccactgcactccagcctgagcaacaagagcaaaactctgtctcaaaaacaaacaaaaaaccagtcatgagttttataagttggaagtgggattgttgtctaaagcttgtcatgataataatcacctttgaacaaacgcagcgggtaccaatgcagcacccaccctggctgtcattcattctaagacacctgataattttgtatgccactaagaaagaaaaaatatgctactaattaacattcaactcgcctgttgatttaaagatgttttctgacttgagagatgttaaaatatgaacactgtgtgtcttaagatggatgaaaaccagcatttcccatgcatggttcctgacttccaaaccagcatgagacaaggagggatttggaagccctctgaagacagtgccgagttagcataaccaagcatgaaaagcaagcttcaggagctaagcgtggcaaagatagcttagatcattagtacttgaacttttcagagtgggttcatggaggacgttgaacttgaagccaggatttggatgaatggatgggagatgctggctttctgtgaggaattagaacagctttttgaatatgattgaggtggagatttcagaggtagccagtgggaatagccaacaggtgggacgacaggcagacatctgtctttaggacaaagaccagccctggggacagacaccagaagagtaaatggagctgatgtgttatattcactgttctcatgtcacctgttaattctggaaagggacagtgttctacgcttagggatcggtgactcgtgcactgctcagggtttatcttcagcagggagtttttgcctggcggaacttgtctcttccaatcatctgactgtggcccacatcttgcagggagccgatatgtggatttactcccttgatggaagcagctgctgctggccatgagataatcgtgcagtattttctgaatcacgtaagtgaccctgattattagcatgtaatgtagtcacggcaaatgaggaatcatattactgaagtataagctattacagaattttcctttgcacagaaataactttcattcatttattcaacacattttcattatctattgacgcccggtgttgagtggtgcttaggcattaaggatacagtggtgagtagaaatagacacctattcctgtaataattttgaaaatactatctgaaaattatggaaaaatattttaaaagtaaatagcactcataatcctgtcacttagaaaaattatatagaataagaaggcagagatcctcctctctttttcaacctccctgatgcccacttggtttgagaaagagctgccctaggacttttcctctgctgtggaaagatgtgtctgtaggcaagtgtgtgcacattgctttgtgttttgaacaaagtgggattctacgtatagtctgtaacttagagacatcttatagacatcttatctttgtacagtattccgtgtacaatctgcctcagttaatttaatgagtttcttattagtagaaacttagtttttaacattttgcaattataaacagtgttccgggaatatccttttacacatagctttaatacatttgcagttatttctgtatgttgtatttctgttttattttattaatttatttttttgagacatggtgttgccctgtatcccaggctggagttcagtggcgagatcgtggctcactgcagcttcagcctcctgggctcaagcgatcctcctgcctcagcccccaagtagctgggactacaggtgcatgctaccatgccccggctaattatttaattttttttttttggtagagttgggggtctcagtatgttgtgcaggctagtcttgaattcctgagctcaagcgatcacctcagcctcccaaagtgctgggatcacaggtgcaagcctgtccacacagaaccttgtacataaatattcatagcagtattattcataattgccaaaaagtagaaaaacccacaagtccatctactgaggaattgataaacaaaatatatatctgtatagcaggatattattcggccctacaaagtaatgcagtactgctgcatgctgcggcaggggtgaaccctgatgcgttaggctgggctgggtgcggtggcgcacgccggtaatcccaacactttgggaggctgaggccagagggtcgcttcagccctggagttggaggttgcagtgagctatgattgcgccgccacactccattctgggtcacagagtggatcctgcctcaaaaagaaaaagaaaaggaaaacattcggctcagtgaaagaagccagacacaacaggccacacactaggtgatttcactcataggaaatgtccagaataagcaaatacatagacagaaaatagatgagtggtttcctgggtcttggggaatgggaagattggggtgataaaaatgtgctaaaattgtttgtggtgatggttgaacaactgtgaatatacgagaagccgttgaattgtacattgtaagtgggtgacttgttggtatgtggattatatctttataaggctgttaaacccaatggggggaagtgcaggcggtcctgatgaattcccactaccaaggttgtctgttgtcctgcccaccagtcatagacaaaggtgtccattttctcttgtcctcaccagtcctgatgtcagtcaaccttttgtcaatctggcgggtgaattgtagcgtctcattttagtttgtccttgttagagtagttgaaatttttttctttttttttttttttggagacagaagtcttgtgctgtgtcgcccaggctggaaggctggagtgcagtggcgtgatctcggctcactgcaacctctacctcccaagttcaagcagttcttctgcctcagcctcccgagtagctgggactgcaggcacccgcccgcacacctggctaattttttgtattttagtagagatgaggtttcaccatgttgcccaggctgctcttgaactcctgaactcaggcaatccacccaccttagcctcccaaagtgctaggattacaggcataagccactgcgcccagccagttgaacatttttaaattgatttcttagccatttgtatttcttttttttttttttttttgagactgagtctcactcagtcgcccaggctggagtacagtggcatgatctcagctcactgcaacctccacctcccaggtttaagagattgtcctgcctcagcctcccgagtagctgggactaaaaatacaaaaaatcccggctaattttttgtatttttagtagagacaaggtttcaccgtgttagccaggatggtctcgatctcctgacctcatgatctgcccgccctggcctcccaaagtgctgggattacaggtgtgagccactgtgcccggctggccatttgtatttctcttacgagctgtctatgtttattgcccaattttctattggatagtttgtttttttctcacttattggtgggaatttcttaaatagtgaaaaattcacatggtatctctttttaacaaagaattttgggacacaacatgcacatggtacacatgcagaccagaaggtgggtgcaccgcaggcctgtcccccaccctgcctgcgtctccttggcaccctccccacgggcgactctgggaatacacccacacatgctcatggtcctgccccatgtgcagctgctcccatcttgcattttttaaaaaacttaatcatgaagatttttctatattggtgtataaagagacggggccaggtgcattgtctcgctcctgtaatcccagcactttgagaggccaaggcagacagatcacttgaggtcaggagtttgagaccagcttggccaaggtggtgaaacccgcctctaccaaaaatacaaaaatacaaaatacaggtggctgacgctgtaatcccagctacttgggaggctgagacaggagaatcacttgaacctgggaggcagaggttgcgatgagccaagatgttgccactgcactccagcctgggtgacagagtgagactatctctaaataaataaataaataaataaataaataaatcaataaatcaataaagagatggggtcttgctctgtccctcaggctggagtggagtggtgcagtctcagctcactgcagccttgacctcctggtctcaagtgatcctcctgcctcagcctcccaagtagctgggattacaggtgcgtgccaccacgcccagccaatttttgtattttttttgtagagatggggttttgccacgttgcccaggctggtcttgaactcctgagctcaggcagttcgcctgcctcggtctcccaaagtgctgggattacaggcacgagccaacgcacccagcccctctcttttttttttttttttgagatggcgtcttgctctgttgcccaggctagagtgcagtggcacgatctcggctcactgcaacctcagacttccgggttcacaccattctcctgcctcagcctcccgagtagctgggaccacaggcgcccgccaccatgcccagctaatttttcatatttttagtagagacggggtttcaccgcgttagccaggatggtctcgatctcctgacctcgtgatccgcccaccttggcctcccaaagtgctgggattacaggcgtgagccaccgtgcctggcctctcttttttttttttttttttatggtggcatggtattccctgtagggatgaatcagagtttttttgtttgtttgtttgtttgttttgagatggagtctcgctctgtagccctggctggagtgcagtggcgcaatctcggctcattgcaacctctgcctcccaggttcaagcgattctcctgcctcagcctcctgagtagctgggattacaggcgtgtgccaccacgcccagctaattttgtatttttagtagacagggtttcggcatgttggtcaggatggtcttgaactcctgacctcaagtgatctaccactttggcctcccaaagtgctgagattacaggcatgagccactgcgcctggcctaccgttgacatttcttacacgtctttttaagcacatatgggaatttcttcaggagcttaggatgtgttcttcaaagtagagtctttgttgtgtgaggtgggttcagtcggtagtgggtagtgtaaacttgctttgttccatagtggtcctggttcacacccctccccttagggtgttagacttcttttttttttttgagatggagtctctctctgtcacccaggctggagtgcagtggcgcgatctcggctcactgcaacctctgcctcccaggttcaagcgattttcctgcctcagcctcccgagtagctgggactgtaggcactcgccaccatgcccagctaatttttgtatttttagtagagacagggtttcaccatgttggccaggatggtctcaatctcttgaccttgtgacccgcccgccttggtcttccaaagtgctgggattacaggcgtgagccaccgtgcctggccttttttttttttttttttttggggtggggtcttgctctgtccccaaggctggagtacagtggtgtgatctcagctcagtgcaacttctgactcccaggctcaagcaattcgcctggctcagcctcccgagtagctgggattccaggtgtgtgccaccatatccagctaatttttgtatttttagtggagacagggtttcaccatgttggccaggctggtctcgaactcctgacctcatgatctgtctgcctcagcctcccaaagtgctgggattacaggcgtgagccactgtgcctggccaggatgttagactttttggctccctggccatttgggtttctttttctgcaaataattatttttgtattttttatttattttttttatatagggtcttgctttgtcaccacactagagtgcagtggcctgatcatgggtcattgtagtctcaacctcctgggctgaagtaatccttctgcctcagcctcctcagtagctgggactacaggcacgcactaccacgcctggctgttttttttttgtagagacaaaaatctcactatgttgcccaggctggtcttgaactcctggcctcaagcaatcttcccaccttggcctcccaaagtgctggagttacagacctgagccaccatgcccggccagataattctttgacagataatcctgctgacatgaactagacttccttaagacacatcatagaatcaatagcccagaaccataaagagcctctacttgtaagtttagagtcattttaagtaaggtagaactggagatcataagagatatgtactcttataatttttgattgtatgtttgtttctttttgagacagagtctcactctgtttgcccatgctggagcacagtggcgcgatcatagtttgttgcagcctcaacctcccaggttcaagggatccttgcaactcagcctcctgagtagctgagaccacaagcgcatgctatcacactagctgatttgatttttttgtagagttggggtctcactaagttgcttaggctggtctcaaactcctggctgcaagtggtcctcccaccttggcctcccaaagcgctgggattacaggcaggaaccacggtgcttggccaacaatttgcatgcctttaccacattccccaaatgttaacatttcacctcattttcttatcagtctctttatgtataacatgcatatgttttctgaatcatttaaatgtaaattgtgacataatgccccttttcccctaaatatgtatttcctgagagtaagaatttcattatgtatttcctaaaagcaaaaatgttctctttcccagtcacacaaaattatcagactcaggaactcaacactgagttcttcctccagcacttgacaagaatcaaagtgttggttagtgactgctttgggggatggggcaggactggcagcaggtggcccgatggcctgggtggtttgcctgccagcgatgctggtgggcaagccctgcctggaagctcctctctcccacgtttttcctgccgcccagtagttagaccacctggagccagaggagggggcccacccggtttcccagcctgtccctccagagctgggctccatttctggaggtagagaatggggcaagtctgggcatcttgtgctctttgctaggggaggaaagggctgtggctgctttccttgtcccccatttcccttctgccagtggggccaagccccagcagctcagtcaggagaagaggatatggatctgtctgggcctctctctttaagagaaagttgattcgtgccttccggatagtcttgttccagggtttctaaactttctgatcccaccttcatgttaaaatgagttttgatcatgtgtctctttagtaatatggacattataaaataggaaaaaaaagtctcttaaagcctaagtagttaaaaatttattttcacatcaggcatagtggctcatgccagtaatcccagcacttttagaggccaaagtgggaagatcgcttgaggctggagttggagaccagtctgggcaatacagtgagaccttgtctctaaattaaaaaaaaaaaaaaaaaaaaaattggccaggcatggtggctcatgcctgtaatcccagcactttgggatgccaaggcaggtggatcacctgaggtcaggagttcaagaccagcctggccaacatggtgaaaccccattagcggggcgtggtggcgtgcccctgtagtcccagctacttgggaggctgaggcgggagaatcacttgaacccggaaggcagaggttgcagtgagccgagattgcgccattgcactccagcctgggtgacagagtgagactccgtctcaaaaaaaaaaagccagttgtggtgtgtgtttgtaatcccagggaggctgagaagggaggatcacttgagctggggaggtcagggttgcaatgagccagtgtaatccagcgtgggccacagagtgagattctgcctcaaaaacaaaaccaaaaatatataacgagttaaaatcctacagtaaagaggctactgttttattctggttaaaccttagggttccttctatcaaacttaaactagaattttttttttttcttgagatggagtcgccctctgtcgcccaggctggagtgcagcagcttactgcaatctctgcctcccgtgttgaagcgattctcctgcctcagcctcccgagtagctgggattacaggtgtgtgccaccactcccagctaacttttgtgtttttagtagatacaggctggtctcaaactcctgaccaggctggttgttggccaggctggtctcaaactcctgacctcaagtgatccgcccacctcagcctccaaaagtgctgggattacaggtgtgagcctctgtgcccagccaagaaattattttttatttttgagatagagtcttgcttcgtctgttgcccaggctggtgtgcagtggcgtgatcttggctcattgcaacttccacctcctggactcaggcaattctccttcctcagcttcctgagtagctgggagtacagacgtgtgccaccacgcccggctaatttttgtatttttagtagagatggggttttaccacgttttcccacattggccaggctggtcttgaactcctgacctcaggtgatccacccgtctcggcctaccaaagtgctgggattacaggcttgagccaccgtgcccagcttataaattattgttattatttattattatttttttgagatggaatctcagtctgtcgtcgaggctgtagtgcagtggcgcgatctcagctcactgcaacctccgcctcctggattcaaggatttctcctccctcagcctcctgagtagctgggatacaggcacgcaccaccacacctggctaatttttgtattttttagtagagacggggtttcaccacattgcccaggctggtctcgaactcatgacctatgatccacccaccttggtcccccaaagtgctgggattacaggcgtgagccactgtgcccggcctataaattattttttaaggcacaaagtctcataggtaatttttaatcagagtcaaaagtaggatggggggcactctagaaagtaaaactccttatactttgtgaaaacacagttttttgtcctgtatccctgcccagagaccacctctgcctcccccaccaactacatatgggggtcaaggttgaggccccctggtctaacgggagagacagttgccgtatgggtggtagcaaaactccttaagggttgtgatttttttttttttttttttttttgagttggagtctccgtgtgtcgcccaggctggagtccagtggtgcgatcttggctcactgcaacctccacctcctgggttcaagcgattctcctgcctcagccccccggagtagctgggactgcaggtgcccaccaccacgcccggctaatttctttttgtatttgtagtagagatgaggattcaccctgttggccaggctggtatggaactcctgaccttgtgctccgtccacctcggcctcccaaagtgctgggattacaggcatgagccacggcgcctggctgtgccttttttctcttaatgatgttttgtgcaccctagtccgtgtcaccgcaggtactcccacccaccacgtaaatgggcgggaggcgctctgttttctggatatgctctcacgtagctcattaatctcttattttaagttccttctgattctcactatgctgaatgccacagtgaaaattctaaattgtagtgtatgtcctgcattatttccttaggcgccgctgcacttcagcctgggtaacagagcaagatcctattaaaaaaaaaaaagcaaacatgcttatggtagtacattttaaaaacatagaagattggaaaattggaaaaatccccatcaaaaatagtaaataacttaaaaatagcaacattttgggtatgttaccttccaatattgttttctgtgtaatttttttggtctcattttgccggagttgtaatgtatatgtagttttgtatcatgatccttttttatttttttgagacaaggtctcgctctattgcccaggctggagtacagtggtgcgatctcagctcgctgcagcgtcaagctctgggacttaagtgatcctcctgcctcagcctcctgagtagctgggactacaggcatgtgccgccacaccctgctaattttttattaaagatgctccccctttccggggtcccgcctcctcctctgagctttggctctggcttccctgcctcccccagctgcctggtctgacaggagagaaggacagttacagtgtacagtgacaccaaaaacatgctgtattgattatagtttatttttttttcttgtagaggtgggttcatgctgtgttgcccaggttgttgtccaactcctgagccgagcgatccacctgccttggcctgtcaaatgctgggattacaggcatgagccacctcacttggccatgatcctttttcaacttgatcatacagctgtttgtaaatatcaccatctatggcaataacagaactgactgcttatccccctgagcattcaagttttctctaggtaggttttcattattgtgaatatgctgtgccaaacatcctttttttttttttttttttttttttgagacagagtctcactctgtcttcaggctggagtgcagtggcatgatctcagctcactgcagcctccgcttcccgggttcaagcaattctcctgcctcagcctcccgagtagctgagactataggcgttcaccaccacgcccggctaatttttgtatttttagtagagacggggtttcaccatgttggccaggatggtctcaatctcctgacctcgtgatctgcccacctcggcctcccaaagtgctgggattacaggcatgagccaccgcacccggcctgtgccaaacatctttgtgcactaaagccttttctgtatttagggttatttccttagggtcatggaagtggaattgttgcgctgcaagacctgtaaatacattatagagctttggatcaaagttacgaattctgcttcagaggatggtgctttcattctgactggtttaaaaggctgctttctttgaagacaagcgaagtgagtgggacacagcccaggcgcagaaggtgaaggctgggatctccgcatggtggctgccagccccctgcaagggaggtcatgagcgtgggagatgactccccagcccccagccctcctcatccttgtccctaagaagagagtgagagcaaaacttgtggctgcggtgcagacaagcctgcctctttctcatgcagatgtgatgtttcccacacagggaggcagtcagaaaccagcatatgcccttctgtcttcccagccagcagcccaggaagggcaggtgctttgaaggagaggcccctaaccccctttcacggacattcacagggagtcaaggtggacgcgagagaccacagtggagccacagcccggatgctggccaagcagtacggacacatgaagatcgtggccttgatggacacttactcgccctctctgcccaagagcctctatcggagcccaggtacccacacctgccagccgcgccctgctggggtctctggttgccttgagctttaggtgacctggcagagaaagatgtcccccgcttccccggctcccaccttctctgagatttggctctgcctcccccagctgcttacatgtcaaggttgaggcccctgctctaacaggagataaggatggttacgatggagagtggtacaaaaccaggctgttgtgaatgtagaggctttctgtagtatgcttgactaccgagtaggggcaggcccctcttagttttctgttttcactgtttcctgagctatggcttgttcattcttctatatgaacttgaatatcaacttgtctagctccttaaaaacagtattgatatttttactgagattgtgacaatgtataaattaactatatctttgtgttgttgtcttatccaagaacaagggatgacttcttgttccaatgtacttttgggtcttgcaggagggttttaaatttttcttcatctacattttgcatgtgacttaagtttattcctaagtgtttgatcatctttgtcgctattgtaaatggggttttccctatcattatatcctttttttccccccaactctcagggtattaattattcagtgctatttattttttatttcagtaggtttttggagaacaggtggtggttggatacgtgaataagtcctttagtggtgtcattatatcgtttcactgcatattgtcagtgcatttgaaggcagtggatttctgcaaacttttgttttttttttgatacgggagtttcgctcttgttgctcaggctggagtgcaatgaagcgatcttgcctcaccgcaacctcttcctcccaggttcaagcaattttgcctcagcctcccaggtagctgggattacaggcgtgcaccaccatgcccggctaattttttgtattttcagtagagatggggtttctccatgttggtcaggctggtctagaactcgcaacctcaggtgatccacccatctcagcctcccaaagtgctgggattacaggtgtgagccactgcactcagccctgcaaactaattttatattctgctaccttacagaattcttacattgttcaggttagttttgttattgattctttagggctttacaggtgtactaacatataatctttaagtatcgatggatacactgcttcctgctgattctcatgactctgactttgttgaattgcaccgttcttttgtttagttgctaacacctctagctcattgttcaacatagtggagatagtgagcctccttaccttggtcctgatcttagtggaaatgccacgttacatgagaggctgactgtaaaagggaaggcatatgttattttagcttattaacaaagtattcctcagttcttctattcctgagtggtgttttacaggagtaactattgaattgtgttcccatatctttggagacgatggtgaattttcatatggtagattgtcttcatgaacctcctaataatgaatcaaccttacattcttggcataaatcccacatgttgtactattttaatgtgtttttgaattctgtttattaatatttagtatttttctatggatattcagtcataagtgatactggtctatagttttctttcttctttttttttgtttttgaaatggagtcttgctctgttgcccaggctggactggagtggcgagatctcagctcactgcaacctccgcaacctccgcctcctgagttcaagcaattcttctgcctcagcctcccgagtagctgggatcacaggcgtgcaccactacacccagctaatttttgtatttttagtagagacggggtttcaccatgttggccaggctggtctcgaactcctgatctccagtgatccgcctgcctcagcctcccaaagtgctgggattacaggcgtgagccaccgctcccggcgtggtctatacttttctatttttgttctgtctatcaggtatgggtatcagtgtttacttcataaaaataatttggaagttttccttccttttttgtgttctaggacaatacacgtagcattagtgctacctggtcttagaagttttgatagaatcctcccatgaaaccatctggtctctttctgtgaggtggttcctcgataacagtttttctatttcttctatagagattggcctcctcatactttcttttcttatggggtcagttttggtaaattatattttcctgagagatcacttcatctaggatttcagacttatctgcagaggtctacaagataatattttctccctttttttttttttttttttgagacagagtttcactcttgttccccaggctggagtgcagtggctcgatcttgactcaccgcaacctctgcctcccgggttcaagtgattctcctgcctcagcgtcccaagtagatgggattacaggcatgcgctaccatgcctggataattttatgtttttagtagagacagggtttctccatgttggccgggctggtctcaaactcccgacctcaggtggtctgcccacctgggcctcccaaagtactgggattataggtgtgagccaccgcacccggccaatttttttctccttttaaaatattctgtttcagggccaggcgcggtggcttatgcctataatctcagcactttggaaggccgagttgggcggatcacctgaggtcgggagttcgagaccagcctgatcagtatggagaaaccccatctctactaaaaatataaaattagctgggcgtagtggtgcatgcctgtaatcccagctactcgggaggctgaggtgggagaatcccttgaacccgggaggcagaggttgaggtgagccgagatcgtgccattgcagtccagcctaggcaacaagagcgaaactctgtctcaaaaaaaaaaaaaaaaaaaaaattctgtttcaggctgggtgcagtggctcatgcctgtaatctcagcactttgggaggctgaggcgtgtggatcacttgaggtcaggagttcaagaccagcctggccaacatggtgaaaccccgtctccactaaaaatacaaaaataagccaatgtggtggtgtgcgccagctactctggaggctgaggcaggagaatcacttgaacccgggagggggagattgcagtaagccaaaatcacgccactgcactccagcttggcgacagagcgagactccatctcaaagaaaagtaaatagataaaataaaacaaaataaaatactctgtttcagtggttattttctcctgttattatctttttttggcatggaaaatattgatttattttttgtgacagggtcttgctttgtcacccaggctggagtccagtgacccaatctcgactcaatgcaacctccgcctcccaggctcaaaacgatccttctacctcagctctacgagtagctaggactgtaggtgcaccctaccacgcccagcttacgtttgtattttttgtagagaggtggttttgccatgttgaccaggctggtctcaagagtcctgagctcaagcaatccacccgcctcagcctcccaaagtgctgggactacaggcatgagctactgcacctgacctggaaaatatttatctcatttttaattgacacaaaataactacatatttatggggtacagtgtgtgatgttttgatacatgtatacactgtgtaatgatcaaattaaggtgattagcttatccatcacctcaaacatttatcatttcgaggtgagaacatttaaaatcatgtcttctagtagctattttgaggtataagctgttgttccgtatagtcactctactgtgaacaccagaacttctttcttcgatctgtaattttacacctattgaccaatctctcccactacctccccacccccaacctctgataatcactattctactctacatgtttgacatgagcttttaaaaatcctgtaaatgggtgacatcatgtagtcatgtagtcttttttgttgtttgtttggtttttgagacaggttctcgctttgtcacccaggctggagtgtggtggcataatcttggctcactgcagcctccaattcctgggctcaagtgatcctcctatctcagcctcccgagtagctggcactacaggcacctaccaccacacctggctaatgttttatttttttgtagagacggggtcttgctatactgaccaggttggttttgaactcctgggctcaagtgatcctctcgccttggcctcccagagtgttgggattacaagtgtgagtcaccacaacagctggcatttgtctttcttttctatgtctggcttattttactgaacatagtctcttccaggcttattcatgttgccacaaatgatcagatttcattctttatgtctgaataatattcaattgtgtatataaactcattttctgtcttcgttcatccactgatggacacaggttgattctctatctaggctactgtgaatactgcggcagtaaacatgagggtgtagacatctctttggtatactgatttcctttcttttggataaatacccagtagtggaattgctggatctcatttcttatattttttaatttttttttttttttgagatggagtttcgctcttgtttcctaggctggagtgcaatggcacgatcttggctcactgcaacctccacctcccgggttcaagcgattctcctgcctcagcctccctagtagctgggattacaggcatgtgccaccacgtctggctaattttgcatttttgggagagacagggtttctccatgttggtcagggtggtctcgaactcccgacataaggtggtccacccgactcggcctcccaaagtgctgggattacaggcatgaaccgctgcacccggcaaaaatttcttctattaaaaaaaatagagacagtgtctcagtatgttgcccaggctggtctcaaactcctgggcccaagcgatcctcccacctcagtctcccacagtgctgagattataggcatgagccactgcgcccggcctcacttcttattttgaatatttgtgtttgttctttttttttttttgagacagagtctcgctctgttgcccaggctggagtgcagtggcgcgatctcggctcactgcaacccccgcctcccaggttcaagcgattctcctgcctcagccttttgagtagctgggactacagggtgcccaccaccacacctggctaattttttttttgtatttttagtagagacagggtttcactgtgttagccaggatggtctcgatctcctcacctcgtgatctgcccacctcggcctcccaaactgctagaattacaggtgtgagccaccgtgcgcagcctcttcctttttttcttaagttaaatactagtactttgtctgtttagtggaaaaacaagaaaaacccatcggattttgatttattaatgagacctactgattgtctgtttaatttctgcttttatttttatttggcttactttgttgttctagttttttgagttggaaacttctttcattttcattgttgcccttttgttgctaaatgttagaggctgtgaatttttgctgattgctgctttaagtgtattctgggggttctgtatttaatactttccttgttatttttagaaattctgtaatttttatttatattttctccttcacccaggagttgtctaatagaagtattatgattgtttttgtttgttaatttctagatggaagggcctttttgatcttgcaattaatttctcatgttattctgattaactttaatgtgtctgatcagagagtgtttataattcttacatttacataacttccttgtcatcttatttatcatctactgatctatctatatatatatatatttttttcagatgtagtctcactctgtcacccaggctggagtgcccaagtgcgatcttgactcactgcaacctctgcctcccaggttcaagcgactctcctgcctcagcctcccgagtagttgggattccaggcatctgccaccacgcctggctcatttttttttgtatttttagtagggacagggtttcaccatgttggccaggttggtcttgaagtcctgacctcaagtgatccgcccacctcggcctcccaaagtgctgggattacaggcgtgagccaccgcgcccggccctgatcaatattttttagtgttccgtgttttgcttgagaagttgtattctctattatctgtatacagtttagcatatctgtgagtctatcttatttaggattatgtactcttagttcattttctacaaaattacctattagcgtgtttctgatttatgaaggaagttggtgcattttttggtgacagattttcataacttgttatagattcactgtgaattatggcttttagtattagaagtgtccttctggctgggcatggcccatacctgtaatccgagcactttgggaggccaaggcgggcagatcccctgaggtcaggagttcgagaccagtccagcctacatggtgaaaccttgtctctactcaaaatacacaaattagccaggcatggtggcacatacttacaatcccagctactcgggaggctgaggcaggagaatcacttgaacccgggaggcggaggttacaatgagccgagattgtgccactgcactccagcctaggtgacggagtgaaactctgtttcaaaaaaaaaaaaaaaaaagtgtccttccgtgtcatatttaatgtgttttgccctgaattccacgttgatagcaggattgcagccctggctcttttgtggtttccatctgcctgttctttttaagctgctctgagggtgtgttgggtgctgagattcacgcagctgccgttcccttgcttattgctgcctctttgcatttgtcttacagctccctccccttcagcttggatggaagcacagtctccctggagtgctatagatctttgagtgtgaggaggtgtgtgtccatatggctagctcagtcgccagagcttgagcctcgtcatggggaaggacagagtggcccacgttcagggcctgagctctccctctttgctggcctgccctgagttgtcctgtcagtttgcacctgagcgagcagctcctttctcagtgtcaggctcagcccagcctcttccctggcattgggattgtttcataataaacacagctcaggtggtaatgcaaaggacctttcccttcatttctgccccagcttacccactccacaaggagatctcatcatttcctcctgtatacaactcacgtatctcttaaaagtagaatcagatcagagccttatacaaatcaaatatgaaaaactgaaaagctacaaaataataaaagctctggtttgagctctgaaagctcagactgggaagtgatttgaaacagtttataatcatagcaaacacatgccatgctttagaaaatacaaaattgtggctgggcgctgtggctcactcctgtgatgccagcactttgtgggaggccaaggtgggcggatcacaaggtcaggagatcgagaccagcctggccaacatggtgaaaccccgtctctactaaaaatacaaaaacaagattagctgggcatggtggccgggtgcctgtagtcccagctacttgggagcctgaggcaggagagtggcgtgaacccaggaggtggagcttgcagtgagccgtgatcgcaccattgcactcctgcctgggtgacagagcaagactccgtctcaaaaaaataaagaaaaaaaaaagaaaatacagaattgcttaataagttgtttccagccgggcacagtggtaacgtgcctataatcccagcactttgcgaggctgaggtgggtggatcacctgaggtcaggagttcaagaccagcctaatatgatgaaaccccatctctactaaaatataaaaattagctgggtatggtggcatctgcctataattcccaactactcgggaggctgagataggagaattgcttgaacccaggaggcggaagttccagcctgggcagcaagagcaaaactccttctcaaaagaaaaaaaaaaaagttgtttccaaaggaagggattaggaaaaagtagttgtgacttatattaccatatattttaatgaagagatgggttttacttattcaaattagaacagaatttctgattatgaacaatacagacttatgaacaatttggcaaaccccaacagagataataaactcctggctgggcatggtggctcatgcctgtaatcccagcactttgggaggccaaggcaggcagatcaggagtttgagaccagcctggccaacatggcaaaagcctgtgtctactgaaaaagaaaagaaaaaaaacactgggcatggtggcacgcatctgtaaccgcagctacttggaagggtgaggcgtgagaatcgctagaacccaggaggcggaggttgcagtgagtgagccaagatcatgccattacacttcagctcgggggacagagtgagactctgtctcaagaaaaatgaaacttcccatcctcactaactttgcagctccctgtggcccattggagcagcgccccggcctgttagggcatttctcagaagtgatgccctggcagatacccttctccttaatttaacaaaaccggcgacagtcactttctttcagtttgccgtaaggattagtaaatgagtccattactgaacacactatcttaatcttggtgtttgatcacagaaaagtacgaagatctgagctcttctgacgagtcctgccctgctcctcagagacagaggccttgccggaagaagggtgtcagcatccacgagggaccgcgagccctggccaggatcacaggcattggcctgggcggcagagccccacggcctcgctatggtgagtggcccgcgtttcccgagggctctttctcattgcataccaggattttgtgttggcaagaatggaatagctcttaggctcctgaaatgtgggtcgctggacctcaggtggcagcgggacaggtggcccagctttcatgctcagggagactcaggattgagtcctgtgatggaaatgcattggtcacggactagctcttgttttttgctttatctcctggagtttccttttcgttggttaaatttaggaatagaactttctctcctgcagcagaaatgtagctaaggtcagatttcattcatcacataggtgggttggctcatacagggaggaggcaaagcgtgaagttcacttccctgccctgcccataccagctgggtcgggtgcgctgctgggggcaggaggccaagaaaacaggccctgctgttttctcagggcgatgaagttgtactcagaccctcctgagagagggcccgcttgttgacttgctggtgaagaatcctagcctttgggttttccagtctcgttcattctcagattcccagccccagggtgttgagcgttttgctcttggggagtgctggggtttctttttaggggagttgggtttggtgcctactctctattgctgtggtctgtcccagagctcagctggaggtgtgagttatgtcttcctttgatggctgtcacccactcatagccaggccaaggctgctggtctcacaggcctggtggctggtccttctcgggagcaaggcctctttgaggccaggacttggaagagtgagagtagacagtgtttcagccaggggtccaccagtaattgaattcccttctagaccccaggaacaagcagatgtgcagacttctgtcttcccaagcctgggtgctgggttgggaactggagacccaccttctcccatcatcctgggaagggtgagctgactgggccactgggaaggcctctctcgagctgctggccagccccaccacagcatgagggcccgcccgtgtcccgtccgctgagctgtgagcactggctctgggacaccgggctggtcgttctgagtggcagagtctcttccttccaaaaggtccctgccacctgctacagcctgaggtgtggtggggacaggaaggaagctgtcatcctggggctgagttggtaattaatctatatagctgtacaacaaatgctttaacaaaatcatacatgtctgaagccgcttgtgtgcggttctttgtatgtatccacagagaagtaatcatggtggtggtctcaggtgtggtatttcaggggatttttgttttctcataccttgtgaaatttaaattttctataagtgcatatattttatttgccagtaattaagaaatttggggccgggcgcagtggctcacgcctgtaatcccagcactttgggaggccgaggcaggtggatcaagagatccagaccatcctggccaacatggtgaaatcccatctttactaaaaatgcaaaaattagctgggcatggtagtacgtgcctataatcccagctactcgggaggctgaggcaggagaatcggttgaacccgggaggcggaggttgcagtgagccgagattgtgccactgcactccagtctggtgacagagcaagactccgtctcaaaaaaaaaaaaaaaaaattgggggggccaggtgcagtggcttatacctgtaatcccagcactttggaaggctgaggtaggaagattgcttgggctcaggagttgtgagaccagcctgggcaatgtagcaagaccctatctctacaaaaaattttgaaaattagccagatatggtggcccatgcctgtagccccagttacatgagaggctgaggtggaaggattgcttgagcccaggaggtcaaggctgtagtgacccatgatggtgccattgcattccagtctggataacacagcaagaccctgtctcaaaaacagtttagggggcaatgataaatagcatgtgctgattagaaaaacttctccataactaggaaaatacgtaaagaggaaagtaagttccccatggtcccatcaaccagtcctttgggttcttttttgagacagggtttcactgtagcccaggctggagtgcagtggcacgatcatagctcactgaaggctccagttcctgagctcaagcgatcctcctgtctcagcctcccaagtagctgagattacagacatgtgccaccgtgactggtcaagtcagtctttttatgtaaaggggcaaaactggagtgaaattgcctggtatacatgcccctttttctgcttggttttagaggcaggtagagttaggtaatttcatattattgttgttaatttttacctcaaggcctttttccttcctgctcagccaggtctctttttcgccggggttgactgaccagaggaggcccgctaagcgcctgtggttaaaggtcacagggacataaagacacgtggtcgatgggtgtctgtgtgaggtcattagctacctcctgctaaaaggaacactcatggtatagttttctctggtcaggcatctgtaaatacagctgaccatttgctacgttttccccttggaaaagaaatggagagggcccaggcttgacctggctgccagccctcgccccaccaggcacttgcttgggccactgactgaccctcagagcatcttttccacccacacaccacagatagagccatgccaggtcgcaggggcaagtaggtgaggtcatgactgggaagtcacctgcctccatcctgggcctcggcctctgaggaggtttcactttggagttccctgggcttatgggccccattctgtacacagagcaggctcctccccgtggctatgtcaccttcaacagcagtggcgagaaccccctggaagaagagggcctctgctgccgggatgtcacctcccccatcaatgagcgggatgtggagagcagcagcagcagcagcagtcggggtacgtgcacccccacccatccggcccgtggctcaggcaggtcctggagctcctgtgtgcccatccccacttatcccctgggcctggcgctggacacagccatccagcagaggacaggaaaggggtaggtgtggacggccctggttcttgtgaggaatgggagaagcttctggtccagcatccccgtgcggcttaagggagccgttccacagcaacaggtttagctccttgcttgggagcccctgaggctttcagggcaggccccagtaggaatgtctgttataactgcacctccgtgcagcagctgtttccatagtgcccaccgtgtgccaagcactgctccgggtgcttgggatttatcagtgaacaaaaaagacagaagccctgcccgtctgtatagaggggagggtttaggacaggcaggaagtttgaaatataaggaagcaaccgctgcaggccccaaggagtgccctggtggaggcggctcagcccggggcacgcccatgcgcagcacctcggtgagggctgcaggcggacgccctgtcttcccgccctcagaggaacatgctttctgtgccaacctggggcccgtccagagcagcagcagcagcgagggcctggccagagcccaggggctcagcagcgaagcttctgtggagagcaacgaggtacggattctttctttcttggtctcccatagccggtccctggctgggatgcctgacatcccccagttactttaagatgagcatgtatgtaagaagcagctgctgcacgtgtgtgctgcactgggacgtgctgtgtccagggtctggcttctcagacgacagcgaacgcaccggaagcccctgtgtggcgggtggggggtttcacgaagcctctcaagcccctgtgtggcgggtgggggtttcaccaaggctctcaagttagcccgcgcactctttcagatgcacgcctctcactgcaggactcggatcatgcctgtaaaagctcagctcgcaaacaagctaaaagttacatgaagaccaagaatcctgacagccagtggcctccccgcgctgcaactgacagggaaggctttctcgctgagtccagcccccagactcagagggccccctactcaggaccccag

SEQ ID NO: 15399 - DNA, 37688 bp, Homo sapiens
cgacggcagcccgagggcggcgcaaggcctgaggcccagcacaggtgggttccgcggcggcccggccccagcacttgccggcacctgcagcccgcctagacccggcgctcgggcgtcccgcgctgcacttgctcgccgcgtgactggaggaccgagcccccacattttctttatgtggttgtggtgggggcacagtaatgccctgtgcgccgtagcgttcctgtggggatgtggccggggggcgtcgggaagcgtcactgctgtgagttacgggtttgtcggccagggacccgccccggggccagtgagctacctttgcgatgcggttccacggggcgagagggggtgcctgggtgctttcacagacctcctctgtgggcgtgacagttaccaccagcatcacatttgttaagatttttaaaaattttttaatttttgtgggtacgtagtaggtgtatatatttatggcgtatatgagagattttgatacaggcatgcagttcgtaataatcacatgtaaaatgggggtctccatcccttcaagcatttatcctttgtgttacaaacaatatgattatactctttgaattatttttaaatgtgcagccgggcgcggtggctcactcacgcctgtaatcctagcactttgggaggcaaaggcgggcggatcacctgaagtcaaggatttgagaccagcctggccaacatggggacacttcgtctctactaaacatacgaaaactaggctggcatggtggctcatacctgtaatctcagctactcgggaagctgaggcaggagaatcgcttgaacccaggaggcggaggttgcattgagccgagatcacgccgctgcactctagcctgggtaacagagtgagattatgtctcaaaaaaaataataataaataaataaaatgtgcaattagattatattgactatagtcaccctgttgtgcggtcaaatactagatctttttttttttttttttttttttgagacggagtctcgctttgtcgcccaggctggagtgcagtggcttgatcaaatactagatcttattcattctgttttttttgtatccattaagcatccccaccctccactacccttcccagccttggttacactagaagtaaccatccttctactttctatgtccatgagttcagttgttttgatttttagataaccacaaataattgagaacatgcaatatttatctttctgtgcctggcttatttcactaaacataacgatctccgcttccatccatgtttttgcaaatgataggatctcattctttttttatggctgaatagtactccattgtgtctaagtaccacattttctttaggattcactgtaaaggtaacagatacttagcattttcagaatggacagaaccaaaaagttgaatgaaaactaaaacgtcttatctctaatgctactttacaccacaccactcgggatgggacattttagttttcactttagtgttttttttttgtttttttttttgagacagaatttcgctctgttgcccaggctggagtgcagtggcttgagctcggctcactgcaatcgcctcccaggctcaagcgattctcttgcctcagcctcctgagtactgagactacaggcgcccaccaccacacccagctaatttttgtaattttagtaaagatgggagttcaccattttggccagggtggtctcgaactcctggcctcaagtggtccgtcacgcttggtctggttctcattgtccttcagacctctggggatgtcagatatgcaagtctccagtaaatagagaacacggcctcaccctgcaggaggcctttggcgtggaagagacatgcccagtgaaggcttgagggaggtatggaagggactctgaactgaccctcagctcgtttggtttcttatccaggcttcgttggccagggctgttagggtgggattctcacctgcaaagtgagggaagggcactgcacgatcttgggctctgctagctgaagaggtggtggctccaggaaggagggctttgcttgccccaccgcacctacacacactcttcaccaagggtctgtgaagtgttcgtctcccacattggtggcttgtttctttagccatcttggctgtcacctggggcttggaagcattctttaatagaaactgaggtcctcatcgcatctattaactaccatagcacctgtaggtcatcacaacctgacaaggcctttgttttcgcctttgctccctttcctacccttgtttcctggcactcttgtacctaaggattctactaggaagctgatgaccttgccttgatttggggattcctggtgtgccgttacccatgtaggcccatctcggggaaagtgttacctcaccagttcaccggcctgttatatttccccccatagctctctcttcaaaggatgcctaagtggattcctattcagttgacggttgctgcgtgccaccagtcacatcctggtttgtctgttggggaattgctttctatttttttcagaaaaatttatttttacttttttgaaattttcaatttcataaccattccagaaaaattaatttatatttaaaatttacaggccaggtgcagtggctcacgcctatatttccaggactttgagaggctgaggcgggcggatcacctgaggtgaggagttcgagaccagcctggccaacatggtgaaacccccgtctctactaaaaatacaaaaattagcctaacatgatggcgcacacctgtaatctcagctattcaggtggctgaggctcaagaagcccttaaacccaggaggcagaggttccagtgagctgaaatcatgccactgcactccagcctgggcaacagagcgagactgtctcaaaaaaataaataaaatttacatacagtaaaattcattttggtgttcagttctgtggtttcataaaggcatggagtcacagatccaccgtcacagtcatacaggtctatcgtcccccaaattccctctctgccccaacctccaaccctttaattttgccttttccagaatgtcatgtaagtgaaattatactgtaggcaggcttcttccatttagcgtaaatcatttgaaattcattcacgtgttgcatgtcaactgttggatccttgtgtttaatgctgagtagcatccattatatggatgtgccaccgtttgtttatccattcttttatgtatcataatagcagcctttttagatatgtccccgttagacagtgaggcactagggattggagttgctaagtagcagagctgcttttttgttgttttttttttttgttttgtttttggagacaaagtcttgctctgtttcccaggctggagtgcaatggcgtgatcttggctcaccgcaacctccgcctcctcagttcaagtgatgctcctacctcagcctcccgagtagctggccttcatgcccagctaatttttgtatttttagtagagacaggatttcaccatgttggccaggctggtcttgaactcttgacctcaagtgatctgcccaccttggcctcccaaagtgctgggattacaggtgtgagccaccgcaccgggtccaagctgaattttgatcaaaccccaaatccagggttcttccccaccacatcaaggaactgattgggttaaacaacccaattagcatttcttcactgcccatccaagaggttgtcaggttcctagagttggtggagaattctcttttacctggtgcctgcggttggaaggaggagcaggtactccacagttaatgcctcaccatatgtgctcctctttactggtgtgatagcaggctcaccagatttagcatggttgggactgcccaaagcatacattatttcagcaaataaatttgtctgagttactcccggggttgactgcactgggttatcagtctgctagtgcagtggtgtagcaggggcaggaccagcctgtttcatgccctggaacaaccagccaggaaagatctaacccttgggccttcctcctcagtgatgtccgagctcagcgatgaagccagcgagccggaactcctgaaccgcagcttgtccatgtggcacgggctcgggacacaggtcagcggggaggagctggatgtccccctggatcttcacacagctgcttccattggccagtatgaagtggtgaaggagtgtgtgcagcggtaagagatctcggggaacttcctctcacattttgagcagcgcagtgatggcttcgatcccacgtgatggggctttgcacacagttgtggatgtttaatgcgtgtagaataggttaacctgcttatctcaggcagctgtcagtaagtattgatgctgagccctgacaaagaggccgtttttattcctaggaagaaaaagagggagtaaactttgatcagaagcttataaacagtcattctttaaccagactaattttattcactaattgcagaaatgcccaaacaaacaagcaaaataaaaataaagacagaaagtgatggcctggtgcggtggctcacacttgtaattccagcactttgggaggctgagatgggcgggtcacttgaggtcaggagtttgagaccattctggataacatgatgaaaccccatctctactaaaaatataaaagttagctgggtgtggtggcatgtacctgtaatcccagctactcaggaggctgaggcaggagaatcgcttgaacccgggaggtggaggttacagtgagctgagattgcgccactgcactctagcctgggcaacagagtgagactctgtctcaaaaacaaaaaaaagaaaaaagaaagtgatccctggccttcttttcccggagggttcattcgatccctgtgatccctgttcccctctagcttctgccatggaggaggagagaggctgggctttcagtgcctctggggaatgacctcccgacgtcactgcccacctgccctttgctaatctgtgtacaatagttagagacaatataaagcccctggcagggtccatggctgcgtcttgcccatagtaggatgtgatcatcttgtttttggaaaagggtcgtctcctcacttccacccccttatgttccacacacagcctaactctgtctcctggttctcatttgatattgtggtgcagcgacctctcttcctctctctgcgtgcctcttccagttcccagtgagccaaagcaaagcattgctgaagccccaggtctccggttcccaagttgtggccctcacttagacatacccagcccatggagtgctggtgcaccttggtacagggtggtctgttgcgctccctccacaggaggctctaggcataggcagctgggtatgcagtcagtacggcccctcaaagggtcacgtttggaattctcaggctcttaagtctttgggtgtcctgttaagatgcagagtccataaccgctccatagaggagcagggggaggcgtttgtgttgtgatgggattttgacactagctgaggtggaggcttgctgatagtaagcacaggatggggcctgaggggagctgggggcatcagaaggaaggggtggggctgaacgaggagtggtaagagagccccagggagatgctctgctgttgtgtaaaggaagatagtgttaggacgagctgggtgcattcgagccctgctgcagaggcatctccatgcagcccccctggccaggggctgccactgaaccctggtatcaggaccttctggaatggctgcccaggtgtgcatcccagagtcactgagggctgccaggcaatggaaggtagttgcctgctgtggtctaatatgtgaatcccggctgggcgcggtggctcacgcctgtaatccagcactttgggaggctaaggcgggtggatcacgaggtcaggagatcgagaccatcctggctaacacggtgaaaccccatctctactaaaaatacaaaaaactagctgggcgtagtggcgggcgcctgtagtcccagctacttgggaggctgaggcaggagaatggcgtgaacttgggaggcggagcttgcagtgagccgagatcgcgccactgcactccagcctgggcgacagagcgagactctgtctcaaaaaaacaacaaaaaagtgaatcccgtaaaagggacagatcctggggttcagtcaccagttgttatcccctctgcaggcaagaactggggaagggaaagaaggcctgtgggcgttaaccatgtaggatcccaggtaaccatgcaagtgggtattattttaaatgtgactcccttgtcccaaccccagagtcgcagctaggaagcccacagttttttcccatgggaaaatgcattgccagaattttaacagcaatcagtgagaaagatgggattctttggtcacagatttttcaagaatgtttctttaaggtgaggtgacaaaggatgaatcagtggcggtgggacttgtccacggtggagtcccttctttcctcactgctcctctccacccagcagtgggctagtagatgccaggcctgtggtggtcagggtttttcaactgtggctgtgttgacaatccaggctggatcattctttgctgtgggggctgtcctggacactgtgggatgtttagcggcagccttggcctccagcagcccttccctgcccagttgtgagaaccaaaaatgccttcacacattgccacatattccctggttgagtgccatctgcctatctggtggtgtgaaagagcatagctggccttgggctaggaggatgcgaaatcagagcaaggagacgaaggctcagggcctcacaaggcagtgtacgagcaactgtcagcatttttctgcctgcctgcctccaatccccacaacgtccagggtggcagataacttctgcttcctgtcaactcatcccgcctggcctagcctcgccaccagctttggtgaaccccacatgcgaggcggctggccatgtctagcatatcttgcgtttgtttaggagagagttagatttgaataagaagaatggtggtggctggaccccgctgatgtatgcctcctacattggccacgacacaatcgtgcacctgctgcttgaggcgggggtgagtgtgaatgtgccgaccccagaagggcagactccactgatgctggcctccagctgtggcaacgagagcatcgcctactttcttctccaggtgagctacgagggaactcaggcccagaaacctgaggggctccgtggccaccctgacagagatgcgaaccactgcaggccacggtgttcgtgtgtgctcgtgtaatcacttctgattcttgcagcatggccgcctggagggcgcccgccccacgcagaggagatgaggccgtaacgcacgttctgtgttctcttgaagcaaggtgcagagctagaaatgaaagacatccagggctggacagccctcttccactgtaccagcgccgggcaccagcacatggtcaggttcctcttggacagtggagccaatgccaacgtgaggtgattgccacatctttagtggccacaggagtggcctaggtgtcatctgactctaaggagggtggctctggaggcagctaaccagagtttagggccaccctgcttcggcacgagaggctcaagatgaggggtaggaccagagtccttccaggcacaggccttttcgtacatctgtgagatgcatctcttcaagccctctcagcttccttttctttatctgaaacccacctgggtcatacagttgtaagaattacatgttttattgtatgccaggggcctaacatactgaatggcatttaaatgtcatacattacatgcaaattccttccattttcttgctttttgtatggatgaggtgaggtgatgctttgaaacagtcatgaggccgggcgtggtggctcacgcctgtgatcccagctctttgggaggccgaggtaggcagatcacgaggtcaggagatcgagaccatcctggctaacatggtgaaaccccatctctactaaaaatacgaaaaaattagctgggcatggtgacgggcgcctgtagtcccagctactcgggaggctgaggcaagagaatggtgtgaacccgggaggtggagcttgcagtgagccgagattgcaccactgcactccagcctgggtgacagagcaagactccatctcaaaaaaaaaaaaacaaaaacaacagtcatgagttttggccgggctcagtggctcacacctgtaatcctagcactctgggaggccaaggcgggcagatcatgaggtcaggagttcgagaccagtctggccaacatggtgaaaccccgtctctactaaaaatacaaaaattagctgggcgtggtggcaggtgcctgtaatcccagctactcgggagtctgaggcgggagaatcacttgaaaccagaaggcagaggttgcagtgaactgagagatcgtgccactgcactccagcctgagcaacaagagcaaaactctgtctcaaaaacaaacaaaaaaccagtcatgagttttataagttggaagtgggattgttgtctaaagcttgtcatgataataatcacctttgaacaaacgcagcgggtaccaatgcagcacccaccctggctgtcattcattctaagacacctgataattttgtatgccactaagaaagaaaaaatatgctactaattaacattcaactcgcctgttgatttaaagatgttttctgacttgagagatgttaaaatatgaacactgtgtgtcttaagatggatgaaaaccagcatttcccatgcatggttcctgacttccaaaccagcatgagacaaggagggatttggaagccctctgaagacagtgccgagttagcataaccaagcatgaaaagcaagcttcaggagctaagcgtggcaaagatagcttagatcattagtacttgaacttttcagagtgggttcatggaggacgttgaacttgaagccaggatttggatgaatggatgggagatgctggctttctgtgaggaattagaacagctttttgaatatgattgaggtggagatttcagaggtagccagtgggaatagccaacaggtgggacgacaggcagacatctgtctttaggacaaagaccagccctggggacagacaccagaagagtaaatggagctgatgtgttatattcactgttctcatgtcacctgttaattctggaaagggacagtgttctacgcttagggatcggtgactcgtgcactgctcagggtttatcttcagcagggagtttttgcctggcggaacttgtctcttccaatcatctgactgtggcccacatcttgcagggagccgatatgtggatttactcccttgatggaagcagctgctgctggccatgagataatcgtgcagtattttctgaatcacgtaagtgaccctgattattagcatgtaatgtagtcacggcaaatgaggaatcatattactgaagtataagctattacagaattttcctttgcacagaaataactttcattcatttattcaacacattttcattatctattgacgcccggtgttgagtggtgcttaggcattaaggatacagtggtgagtagaaatagacacctattcctgtaataattttgaaaatactatctgaaaattatggaaaaatattttaaaagtaaatagcactcataatcctgtcacttagaaaaattatatagaataagaaggcagagatcctcctctctttttcaacctccctgatgcccacttggtttgagaaagagctgccctaggacttttcctctgctgtggaaagatgtgtctgtaggcaagtgtgtgcacattgctttgtgttttgaacaaagtgggattctacgtatagtctgtaacttagagacatcttatagacatcttatctttgtacagtattccgtgtacaatctgcctcagttaatttaatgagtttcttattagtagaaacttagtttttaacattttgcaattataaacagtgttccgggaatatccttttacacatagctttaatacatttgcagttatttctgtatgttgtatttctgttttattttattaatttatttttttgagacatggtgttgccctgtatcccaggctggagttcagtggcgagatcgtggctcactgcagcttcagcctcctgggctcaagcgatcctcctgcctcagcccccaagtagctgggactacaggtgcatgctaccatgccccggctaattatttaattttttttttttggtagagttgggggtctcagtatgttgtgcaggctagtcttgaattcctgagctcaagcgatcacctcagcctcccaaagtgctgggatcacaggtgcaagcctgtccacacagaaccttgtacataaatattcatagcagtattattcataattgccaaaaagtagaaaaacccacaagtccatctactgaggaattgataaacaaaatatatatctgtatagcaggatattattcggccctacaaagtaatgcagtactgctgcatgctgcggcaggggtgaaccctgatgcgttaggctgggctgggtgcggtggcgcacgccggtaatcccaacactttgggaggctgaggccagagggtcgcttcagccctggagttggaggttgcagtgagctatgattgcgccgccacactccattctgggtcacagagtggatcctgcctcaaaaagaaaaagaaaaggaaaacattcggctcagtgaaagaagccagacacaacaggccacacactaggtgatttcactcataggaaatgtccagaataagcaaatacatagacagaaaatagatgagtggtttcctgggtcttggggaatgggaagattggggtgataaaaatgtgctaaaattgtttgtggtgatggttgaacaactgtgaatatacgagaagccgttgaattgtacattgtaagtgggtgacttgttggtatgtggattatatctttataaggctgttaaacccaatggggggaagtgcaggcggtcctgatgaattcccactaccaaggttgtctgttgtcctgcccaccagtcatagacaaaggtgtccattttctcttgtcctcaccagtcctgatgtcagtcaaccttttgtcaatctggcgggtgaattgtagcgtctcattttagtttgtccttgttagagtagttgaaatttttttctttttttttttttttggagacagaagtcttgtgctgtgtcgcccaggctggaaggctggagtgcagtggcgtgatctcggctcactgcaacctctacctcccaagttcaagcagttcttctgcctcagcctcccgagtagctgggactgcaggcacccgcccgcacacctggctaattttttgtattttagtagagatgaggtttcaccatgttgcccaggctgctcttgaactcctgaactcaggcaatccacccaccttagcctcccaaagtgctaggattacaggcataagccactgcgcccagccagttgaacatttttaaattgatttcttagccatttgtatttcttttttttttttttttttgagactgagtctcactcagtcgcccaggctggagtacagtggcatgatctcagctcactgcaacctccacctcccaggtttaagagattgtcctgcctcagcctcccgagtagctgggactaaaaatacaaaaaatcccggctaattttttgtatttttagtagagacaaggtttcaccgtgttagccaggatggtctcgatctcctgacctcatgatctgcccgccctggcctcccaaagtgctgggattacaggtgtgagccactgtgcccggctggccatttgtatttctcttacgagctgtctatgtttattgcccaattttctattggatagtttgtttttttctcacttattggtgggaatttcttaaatagtgaaaaattcacatggtatctctttttaacaaagaattttgggacacaacatgcacatggtacacatgcagaccagaaggtgggtgcaccgcaggcctgtcccccaccctgcctgcgtctccttggcaccctccccacgggcgactctgggaatacacccacacatgctcatggtcctgccccatgtgcagctgctcccatcttgcattttttaaaaaacttaatcatgaagatttttctatattggtgtataaagagacggggccaggtgcattgtctcgctcctgtaatcccagcactttgagaggccaaggcagacagatcacttgaggtcaggagtttgagaccagcttggccaaggtggtgaaacccgcctctaccaaaaatacaaaaatacaaaatacaggtggctgacgctgtaatcccagctacttgggaggctgagacaggagaatcacttgaacctgggaggcagaggttgcgatgagccaagatgttgccactgcactccagcctgggtgacagagtgagactatctctaaataaataaataaataaataaataaataaatcaataaatcaataaagagatggggtcttgctctgtccctcaggctggagtggagtggtgcagtctcagctcactgcagccttgacctcctggtctcaagtgatcctcctgcctcagcctcccaagtagctgggattacaggtgcgtgccaccacgcccagccaatttttgtattttttttgtagagatggggttttgccacgttgcccaggctggtcttgaactcctgagctcaggcagttcgcctgcctcggtctcccaaagtgctgggattacaggcacgagccaacgcacccagcccctctcttttttttttttttttgagatggcgtcttgctctgttgcccaggctagagtgcagtggcacgatctcggctcactgcaacctcagacttccgggttcacaccattctcctgcctcagcctcccgagtagctgggaccacaggcgcccgccaccatgcccagctaatttttcatatttttagtagagacggggtttcaccgcgttagccaggatggtctcgatctcctgacctcgtgatccgcccaccttggcctcccaaagtgctgggattacaggcgtgagccaccgtgcctggcctctcttttttttttttttttttatggtggcatggtattccctgtagggatgaatcagagtttttttgtttgtttgtttgtttgttttgagatggagtctcgctctgtagccctggctggagtgcagtggcgcaatctcggctcattgcaacctctgcctcccaggttcaagcgattctcctgcctcagcctcctgagtagctgggattacaggcgtgtgccaccacgcccagctaattttgtatttttagtagacagggtttcggcatgttggtcaggatggtcttgaactcctgacctcaagtgatctaccactttggcctcccaaagtgctgagattacaggcatgagccactgcgcctggcctaccgttgacatttcttacacgtctttttaagcacatatgggaatttcttcaggagcttaggatgtgttcttcaaagtagagtctttgttgtgtgaggtgggttcagtcggtagtgggtagtgtaaacttgctttgttccatagtggtcctggttcacacccctccccttagggtgttagacttcttttttttttttgagatggagtctctctctgtcacccaggctggagtgcagtggcgcgatctcggctcactgcaacctctgcctcccaggttcaagcgattttcctgcctcagcctcccgagtagctgggactgtaggcactcgccaccatgcccagctaatttttgtatttttagtagagacagggtttcaccatgttggccaggatggtctcaatctcttgaccttgtgacccgcccgccttggtcttccaaagtgctgggattacaggcgtgagccaccgtgcctggccttttttttttttttttttttggggtggggtcttgctctgtccccaaggctggagtacagtggtgtgatctcagctcagtgcaacttctgactcccaggctcaagcaattcgcctggctcagcctcccgagtagctgggattccaggtgtgtgccaccatatccagctaatttttgtatttttagtggagacagggtttcaccatgttggccaggctggtctcgaactcctgacctcatgatctgtctgcctcagcctcccaaagtgctgggattacaggcgtgagccactgtgcctggccaggatgttagactttttggctccctggccatttgggtttctttttctgcaaataattatttttgtattttttatttattttttttatatagggtcttgctttgtcaccacactagagtgcagtggcctgatcatgggtcattgtagtctcaacctcctgggctgaagtaatccttctgcctcagcctcctcagtagctgggactacaggcacgcactaccacgcctggctgttttttttttgtagagacaaaaatctcactatgttgcccaggctggtcttgaactcctggcctcaagcaatcttcccaccttggcctcccaaagtgctggagttacagacctgagccaccatgcccggccagataattctttgacagataatcctgctgacatgaactagacttccttaagacacatcatagaatcaatagcccagaaccataaagagcctctacttgtaagtttagagtcattttaagtaaggtagaactggagatcataagagatatgtactcttataatttttgattgtatgtttgtttctttttgagacagagtctcactctgtttgcccatgctggagcacagtggcgcgatcatagtttgttgcagcctcaacctcccaggttcaagggatccttgcaactcagcctcctgagtagctgagaccacaagcgcatgctatcacactagctgatttgatttttttgtagagttggggtctcactaagttgcttaggctggtctcaaactcctggctgcaagtggtcctcccaccttggcctcccaaagcgctgggattacaggcaggaaccacggtgcttggccaacaatttgcatgcctttaccacattccccaaatgttaacatttcacctcattttcttatcagtctctttatgtataacatgcatatgttttctgaatcatttaaatgtaaattgtgacataatgccccttttcccctaaatatgtatttcctgagagtaagaatttcattatgtatttcctaaaagcaaaaatgttctctttcccagtcacacaaaattatcagactcaggaactcaacactgagttcttcctccagcacttgacaagaatcaaagtgttggttagtgactgctttgggggatggggcaggactggcagcaggtggcccgatggcctgggtggtttgcctgccagcgatgctggtgggcaagccctgcctggaagctcctctctcccacgtttttcctgccgcccagtagttagaccacctggagccagaggagggggcccacccggtttcccagcctgtccctccagagctgggctccatttctggaggtagagaatggggcaagtctgggcatcttgtgctctttgctaggggaggaaagggctgtggctgctttccttgtcccccatttcccttctgccagtggggccaagccccagcagctcagtcaggagaagaggatatggatctgtctgggcctctctctttaagagaaagttgattcgtgccttccggatagtcttgttccagggtttctaaactttctgatcccaccttcatgttaaaatgagttttgatcatgtgtctctttagtaatatggacattataaaataggaaaaaaaagtctcttaaagcctaagtagttaaaaatttattttcacatcaggcatagtggctcatgccagtaatcccagcacttttagaggccaaagtgggaagatcgcttgaggctggagttggagaccagtctgggcaatacagtgagaccttgtctctaaattaaaaaaaaaaaaaaaaaaaaaattggccaggcatggtggctcatgcctgtaatcccagcactttgggatgccaaggcaggtggatcacctgaggtcaggagttcaagaccagcctggccaacatggtgaaaccccattagcggggcgtggtggcgtgcccctgtagtcccagctacttgggaggctgaggcgggagaatcacttgaacccggaaggcagaggttgcagtgagccgagattgcgccattgcactccagcctgggtgacagagtgagactccgtctcaaaaaaaaaaagccagttgtggtgtgtgtttgtaatcccagggaggctgagaagggaggatcacttgagctggggaggtcagggttgcaatgagccagtgtaatccagcgtgggccacagagtgagattctgcctcaaaaacaaaaccaaaaatatataacgagttaaaatcctacagtaaagaggctactgttttattctggttaaaccttagggttccttctatcaaacttaaactagaattttttttttttcttgagatggagtcgccctctgtcgcccaggctggagtgcagcagcttactgcaatctctgcctcccgtgttgaagcgattctcctgcctcagcctcccgagtagctgggattacaggtgtgtgccaccactcccagctaacttttgtgtttttagtagatacaggctggtctcaaactcctgaccaggctggttgttggccaggctggtctcaaactcctgacctcaagtgatccgcccacctcagcctccaaaagtgctgggattacaggtgtgagcctctgtgcccagccaagaaattattttttatttttgagatagagtcttgcttcgtctgttgcccaggctggtgtgcagtggcgtgatcttggctcattgcaacttccacctcctggactcaggcaattctccttcctcagcttcctgagtagctgggagtacagacgtgtgccaccacgcccggctaatttttgtatttttagtagagatggggttttaccacgttttcccacattggccaggctggtcttgaactcctgacctcaggtgatccacccgtctcggcctaccaaagtgctgggattacaggcttgagccaccgtgcccagcttataaattattgttattatttattattatttttttgagatggaatctcagtctgtcgtcgaggctgtagtgcagtggcgcgatctcagctcactgcaacctccgcctcctggattcaaggatttctcctccctcagcctcctgagtagctgggatacaggcacgcaccaccacacctggctaatttttgtattttttagtagagacggggtttcaccacattgcccaggctggtctcgaactcatgacctatgatccacccaccttggtcccccaaagtgctgggattacaggcgtgagccactgtgcccggcctataaattattttttaaggcacaaagtctcataggtaatttttaatcagagtcaaaagtaggatggggggcactctagaaagtaaaactccttatactttgtgaaaacacagttttttgtcctgtatccctgcccagagaccacctctgcctcccccaccaactacatatgggggtcaaggttgaggccccctggtctaacgggagagacagttgccgtatgggtggtagcaaaactccttaagggttgtgatttttttttttttttttttttttgagttggagtctccgtgtgtcgcccaggctggagtccagtggtgcgatcttggctcactgcaacctccacctcctgggttcaagcgattctcctgcctcagccccccggagtagctgggactgcaggtgcccaccaccacgcccggctaatttctttttgtatttgtagtagagatgaggattcaccctgttggccaggctggtatggaactcctgaccttgtgctccgtccacctcggcctcccaaagtgctgggattacaggcatgagccacggcgcctggctgtgccttttttctcttaatgatgttttgtgcaccctagtccgtgtcaccgcaggtactcccacccaccacgtaaatgggcgggaggcgctctgttttctggatatgctctcacgtagctcattaatctcttattttaagttccttctgattctcactatgctgaatgccacagtgaaaattctaaattgtagtgtatgtcctgcattatttccttaggcgccgctgcacttcagcctgggtaacagagcaagatcctattaaaaaaaaaaaagcaaacatgcttatggtagtacattttaaaaacatagaagattggaaaattggaaaaatccccatcaaaaatagtaaataacttaaaaatagcaacattttgggtatgttaccttccaatattgttttctgtgtaatttttttggtctcattttgccggagttgtaatgtatatgtagttttgtatcatgatccttttttatttttttgagacaaggtctcgctctattgcccaggctggagtacagtggtgcgatctcagctcgctgcagcgtcaagctctgggacttaagtgatcctcctgcctcagcctcctgagtagctgggactacaggcatgtgccgccacaccctgctaattttttattaaagatgctccccctttccggggtcccgcctcctcctctgagctttggctctggcttccctgcctcccccagctgcctggtctgacaggagagaaggacagttacagtgtacagtgacaccaaaaacatgctgtattgattatagtttatttttttttcttgtagaggtgggttcatgctgtgttgcccaggttgttgtccaactcctgagccgagcgatccacctgccttggcctgtcaaatgctgggattacaggcatgagccacctcacttggccatgatcctttttcaacttgatcatacagctgtttgtaaatatcaccatctatggcaataacagaactgactgcttatccccctgagcattcaagttttctctaggtaggttttcattattgtgaatatgctgtgccaaacatcctttttttttttttttttttttttttgagacagagtctcactctgtcttcaggctggagtgcagtggcatgatctcagctcactgcagcctccgcttcccgggttcaagcaattctcctgcctcagcctcccgagtagctgagactataggcgttcaccaccacgcccggctaatttttgtatttttagtagagacggggtttcaccatgttggccaggatggtctcaatctcctgacctcgtgatctgcccacctcggcctcccaaagtgctgggattacaggcatgagccaccgcacccggcctgtgccaaacatctttgtgcactaaagccttttctgtatttagggttatttccttagggtcatggaagtggaattgttgcgctgcaagacctgtaaatacattatagagctttggatcaaagttacgaattctgcttcagaggatggtgctttcattctgactggtttaaaaggctgctttctttgaagacaagcgaagtgagtgggacacagcccaggcgcagaaggtgaaggctgggatctccgcatggtggctgccagccccctgcaagggaggtcatgagcgtgggagatgactccccagcccccagccctcctcatccttgtccctaagaagagagtgagagcaaaacttgtggctgcggtgcagacaagcctgcctctttctcatgcagatgtgatgtttcccacacagggaggcagtcagaaaccagcatatgcccttctgtcttcccagccagcagcccaggaagggcaggtgctttgaaggagaggcccctaaccccctttcacggacattcacagggagtcaaggtggacgcgagagaccacagtggagccacagcccggatgctggccaagcagtacggacacatgaagatcgtggccttgatggacacttactcgccctctctgcccaagagcctctatcggagcccaggtacccacacctgccagccgcgccctgctggggtctctggttgccttgagctttaggtgacctggcagagaaagatgtcccccgcttccccggctcccaccttctctgagatttggctctgcctcccccagctgcttacatgtcaaggttgaggcccctgctctaacaggagataaggatggttacgatggagagtggtacaaaaccaggctgttgtgaatgtagaggctttctgtagtatgcttgactaccgagtaggggcaggcccctcttagttttctgttttcactgtttcctgagctatggcttgttcattcttctatatgaacttgaatatcaacttgtctagctccttaaaaacagtattgatatttttactgagattgtgacaatgtataaattaactatatctttgtgttgttgtcttatccaagaacaagggatgacttcttgttccaatgtacttttgggtcttgcaggagggttttaaatttttcttcatctacattttgcatgtgacttaagtttattcctaagtgtttgatcatctttgtcgctattgtaaatggggttttccctatcattatatcctttttttccccccaactctcagggtattaattattcagtgctatttattttttatttcagtaggtttttggagaacaggtggtggttggatacgtgaataagtcctttagtggtgtcattatatcgtttcactgcatattgtcagtgcatttgaaggcagtggatttctgcaaacttttgttttttttttgatacgggagtttcgctcttgttgctcaggctggagtgcaatgaagcgatcttgcctcaccgcaacctcttcctcccaggttcaagcaattttgcctcagcctcccaggtagctgggattacaggcgtgcaccaccatgcccggctaattttttgtattttcagtagagatggggtttctccatgttggtcaggctggtctagaactcgcaacctcaggtgatccacccatctcagcctcccaaagtgctgggattacaggtgtgagccactgcactcagccctgcaaactaattttatattctgctaccttacagaattcttacattgttcaggttagttttgttattgattctttagggctttacaggtgtactaacatataatctttaagtatcgatggatacactgcttcctgctgattctcatgactctgactttgttgaattgcaccgttcttttgtttagttgctaacacctctagctcattgttcaacatagtggagatagtgagcctccttaccttggtcctgatcttagtggaaatgccacgttacatgagaggctgactgtaaaagggaaggcatatgttattttagcttattaacaaagtattcctcagttcttctattcctgagtggtgttttacaggagtaactattgaattgtgttcccatatctttggagacgatggtgaattttcatatggtagattgtcttcatgaacctcctaataatgaatcaaccttacattcttggcataaatcccacatgttgtactattttaatgtgtttttgaattctgtttattaatatttagtatttttctatggatattcagtcataagtgatactggtctatagttttctttcttctttttttttgtttttgaaatggagtcttgctctgttgcccaggctggactggagtggcgagatctcagctcactgcaacctccgcaacctccgcctcctgagttcaagcaattcttctgcctcagcctcccgagtagctgggatcacaggcgtgcaccactacacccagctaatttttgtatttttagtagagacggggtttcaccatgttggccaggctggtctcgaactcctgatctccagtgatccgcctgcctcagcctcccaaagtgctgggattacaggcgtgagccaccgctcccggcgtggtctatacttttctatttttgttctgtctatcaggtatgggtatcagtgtttacttcataaaaataatttggaagttttccttccttttttgtgttctaggacaatacacgtagcattagtgctacctggtcttagaagttttgatagaatcctcccatgaaaccatctggtctctttctgtgaggtggttcctcgataacagtttttctatttcttctatagagattggcctcctcatactttcttttcttatggggtcagttttggtaaattatattttcctgagagatcacttcatctaggatttcagacttatctgcagaggtctacaagataatattttctccctttttttttttttttttttgagacagagtttcactcttgttccccaggctggagtgcagtggctcgatcttgactcaccgcaacctctgcctcccgggttcaagtgattctcctgcctcagcgtcccaagtagatgggattacaggcatgcgctaccatgcctggataattttatgtttttagtagagacagggtttctccatgttggccgggctggtctcaaactcccgacctcaggtggtctgcccacctgggcctcccaaagtactgggattataggtgtgagccaccgcacccggccaatttttttctccttttaaaatattctgtttcagggccaggcgcggtggcttatgcctataatctcagcactttggaaggccgagttgggcggatcacctgaggtcgggagttcgagaccagcctgatcagtatggagaaaccccatctctactaaaaatataaaattagctgggcgtagtggtgcatgcctgtaatcccagctactcgggaggctgaggtgggagaatcccttgaacccgggaggcagaggttgaggtgagccgagatcgtgccattgcagtccagcctaggcaacaagagcgaaactctgtctcaaaaaaaaaaaaaaaaaaaaaattctgtttcaggctgggtgcagtggctcatgcctgtaatctcagcactttgggaggctgaggcgtgtggatcacttgaggtcaggagttcaagaccagcctggccaacatggtgaaaccccgtctccactaaaaatacaaaaataagccaatgtggtggtgtgcgccagctactctggaggctgaggcaggagaatcacttgaacccgggagggggagattgcagtaagccaaaatcacgccactgcactccagcttggcgacagagcgagactccatctcaaagaaaagtaaatagataaaataaaacaaaataaaatactctgtttcagtggttattttctcctgttattatctttttttggcatggaaaatattgatttattttttgtgacagggtcttgctttgtcacccaggctggagtccagtgacccaatctcgactcaatgcaacctccgcctcccaggctcaaaacgatccttctacctcagctctacgagtagctaggactgtaggtgcaccctaccacgcccagcttacgtttgtattttttgtagagaggtggttttgccatgttgaccaggctggtctcaagagtcctgagctcaagcaatccacccgcctcagcctcccaaagtgctgggactacaggcatgagctactgcacctgacctggaaaatatttatctcatttttaattgacacaaaataactacatatttatggggtacagtgtgtgatgttttgatacatgtatacactgtgtaatgatcaaattaaggtgattagcttatccatcacctcaaacatttatcatttcgaggtgagaacatttaaaatcatgtcttctagtagctattttgaggtataagctgttgttccgtatagtcactctactgtgaacaccagaacttctttcttcgatctgtaattttacacctattgaccaatctctcccactacctccccacccccaacctctgataatcactattctactctacatgtttgacatgagcttttaaaaatcctgtaaatgggtgacatcatgtagtcatgtagtcttttttgttgtttgtttggtttttgagacaggttctcgctttgtcacccaggctggagtgtggtggcataatcttggctcactgcagcctccaattcctgggctcaagtgatcctcctatctcagcctcccgagtagctggcactacaggcacctaccaccacacctggctaatgttttatttttttgtagagacggggtcttgctatactgaccaggttggttttgaactcctgggctcaagtgatcctctcgccttggcctcccagagtgttgggattacaagtgtgagtcaccacaacagctggcatttgtctttcttttctatgtctggcttattttactgaacatagtctcttccaggcttattcatgttgccacaaatgatcagatttcattctttatgtctgaataatattcaattgtgtatataaactcattttctgtcttcgttcatccactgatggacacaggttgattctctatctaggctactgtgaatactgcggcagtaaacatgagggtgtagacatctctttggtatactgatttcctttcttttggataaatacccagtagtggaattgctggatctcatttcttatattttttaatttttttttttttttgagatggagtttcgctcttgtttcctaggctggagtgcaatggcacgatcttggctcactgcaacctccacctcccgggttcaagcgattctcctgcctcagcctccctagtagctgggattacaggcatgtgccaccacgtctggctaattttgcatttttgggagagacagggtttctccatgttggtcagggtggtctcgaactcccgacataaggtggtccacccgactcggcctcccaaagtgctgggattacaggcatgaaccgctgcacccggcaaaaatttcttctattaaaaaaaatagagacagtgtctcagtatgttgcccaggctggtctcaaactcctgggcccaagcgatcctcccacctcagtctcccacagtgctgagattataggcatgagccactgcgcccggcctcacttcttattttgaatatttgtgtttgttctttttttttttttgagacagagtctcgctctgttgcccaggctggagtgcagtggcgcgatctcggctcactgcaacccccgcctcccaggttcaagcgattctcctgcctcagccttttgagtagctgggactacagggtgcccaccaccacacctggctaattttttttttgtatttttagtagagacagggtttcactgtgttagccaggatggtctcgatctcctcacctcgtgatctgcccacctcggcctcccaaactgctagaattacaggtgtgagccaccgtgcgcagcctcttcctttttttcttaagttaaatactagtactttgtctgtttagtggaaaaacaagaaaaacccatcggattttgatttattaatgagacctactgattgtctgtttaatttctgcttttatttttatttggcttactttgttgttctagttttttgagttggaaacttctttcattttcattgttgcccttttgttgctaaatgttagaggctgtgaatttttgctgattgctgctttaagtgtattctgggggttctgtatttaatactttccttgttatttttagaaattctgtaatttttatttatattttctccttcacccaggagttgtctaatagaagtattatgattgtttttgtttgttaatttctagatggaagggcctttttgatcttgcaattaatttctcatgttattctgattaactttaatgtgtctgatcagagagtgtttataattcttacatttacataacttccttgtcatcttatttatcatctactgatctatctatatatatatatatttttttcagatgtagtctcactctgtcacccaggctggagtgcccaagtgcgatcttgactcactgcaacctctgcctcccaggttcaagcgactctcctgcctcagcctcccgagtagttgggattccaggcatctgccaccacgcctggctcatttttttttgtatttttagtagggacagggtttcaccatgttggccaggttggtcttgaagtcctgacctcaagtgatccgcccacctcggcctcccaaagtgctgggattacaggcgtgagccaccgcgcccggccctgatcaatattttttagtgttccgtgttttgcttgagaagttgtattctctattatctgtatacagtttagcatatctgtgagtctatcttatttaggattatgtactcttagttcattttctacaaaattacctattagcgtgtttctgatttatgaaggaagttggtgcattttttggtgacagattttcataacttgttatagattcactgtgaattatggcttttagtattagaagtgtccttctggctgggcatggcccatacctgtaatccgagcactttgggaggccaaggcgggcagatcccctgaggtcaggagttcgagaccagtccagcctacatggtgaaaccttgtctctactcaaaatacacaaattagccaggcatggtggcacatacttacaatcccagctactcgggaggctgaggcaggagaatcacttgaacccgggaggcggaggttacaatgagccgagattgtgccactgcactccagcctaggtgacggagtgaaactctgtttcaaaaaaaaaaaaaaaaaagtgtccttccgtgtcatatttaatgtgttttgccctgaattccacgttgatagcaggattgcagccctggctcttttgtggtttccatctgcctgttctttttaagctgctctgagggtgtgttgggtgctgagattcacgcagctgccgttcccttgcttattgctgcctctttgcatttgtcttacagctccctccccttcagcttggatggaagcacagtctccctggagtgctatagatctttgagtgtgaggaggtgtgtgtccatatggctagctcagtcgccagagcttgagcctcgtcatggggaaggacagagtggcccacgttcagggcctgagctctccctctttgctggcctgccctgagttgtcctgtcagtttgcacctgagcgagcagctcctttctcagtgtcaggctcagcccagcctcttccctggcattgggattgtttcataataaacacagctcaggtggtaatgcaaaggacctttcccttcatttctgccccagcttacccactccacaaggagatctcatcatttcctcctgtatacaactcacgtatctcttaaaagtagaatcagatcagagccttatacaaatcaaatatgaaaaactgaaaagctacaaaataataaaagctctggtttgagctctgaaagctcagactgggaagtgatttgaaacagtttataatcatagcaaacacatgccatgctttagaaaatacaaaattgtggctgggcgctgtggctcactcctgtgatgccagcactttgtgggaggccaaggtgggcggatcacaaggtcaggagatcgagaccagcctggccaacatggtgaaaccccgtctctactaaaaatacaaaaacaagattagctgggcatggtggccgggtgcctgtagtcccagctacttgggagcctgaggcaggagagtggcgtgaacccaggaggtggagcttgcagtgagccgtgatcgcaccattgcactcctgcctgggtgacagagcaagactccgtctcaaaaaaataaagaaaaaaaaaagaaaatacagaattgcttaataagttgtttccagccgggcacagtggtaacgtgcctataatcccagcactttgcgaggctgaggtgggtggatcacctgaggtcaggagttcaagaccagcctaatatgatgaaaccccatctctactaaaatataaaaattagctgggtatggtggcatctgcctataattcccaactactcgggaggctgagataggagaattgcttgaacccaggaggcggaagttccagcctgggcagcaagagcaaaactccttctcaaaagaaaaaaaaaaaagttgtttccaaaggaagggattaggaaaaagtagttgtgacttatattaccatatattttaatgaagagatgggttttacttattcaaattagaacagaatttctgattatgaacaatacagacttatgaacaatttggcaaaccccaacagagataataaactcctggctgggcatggtggctcatgcctgtaatcccagcactttgggaggccaaggcaggcagatcaggagtttgagaccagcctggccaacatggcaaaagcctgtgtctactgaaaaagaaaagaaaaaaaacactgggcatggtggcacgcatctgtaaccgcagctacttggaagggtgaggcgtgagaatcgctagaacccaggaggcggaggttgcagtgagtgagccaagatcatgccattacacttcagctcgggggacagagtgagactctgtctcaagaaaaatgaaacttcccatcctcactaactttgcagctccctgtggcccattggagcagcgccccggcctgttagggcatttctcagaagtgatgccctggcagatacccttctccttaatttaacaaaaccggcgacagtcactttctttcagtttgccgtaaggattagtaaatgagtccattactgaacacactatcttaatcttggtgtttgatcacagaaaagtacgaagatctgagctcttctgacgagtcctgccctgctcctcagagacagaggccttgccggaagaagggtgtcagcatccacgagggaccgcgagccctggccaggatcacaggcattggcctgggcggcagagccccacggcctcgctatggtgagtggcccgcgtttcccgagggctctttctcattgcataccaggattttgtgttggcaagaatggaatagctcttaggctcctgaaatgtgggtcgctggacctcaggtggcagcgggacaggtggcccagctttcatgctcagggagactcaggattgagtcctgtgatggaaatgcattggtcacggactagctcttgttttttgctttatctcctggagtttccttttcgttggttaaatttaggaatagaactttctctcctgcagcagaaatgtagctaaggtcagatttcattcatcacataggtgggttggctcatacagggaggaggcaaagcgtgaagttcacttccctgccctgcccataccagctgggtcgggtgcgctgctgggggcaggaggccaagaaaacaggccctgctgttttctcagggcgatgaagttgtactcagaccctcctgagagagggcccgcttgttgacttgctggtgaagaatcctagcctttgggttttccagtctcgttcattctcagattcccagccccagggtgttgagcgttttgctcttggggagtgctggggtttctttttaggggagttgggtttggtgcctactctctattgctgtggtctgtcccagagctcagctggaggtgtgagttatgtcttcctttgatggctgtcacccactcatagccaggccaaggctgctggtctcacaggcctggtggctggtccttctcgggagcaaggcctctttgaggccaggacttggaagagtgagagtagacagtgtttcagccaggggtccaccagtaattgaattcccttctagaccccaggaacaagcagatgtgcagacttctgtcttcccaagcctgggtgctgggttgggaactggagacccaccttctcccatcatcctgggaagggtgagctgactgggccactgggaaggcctctctcgagctgctggccagccccaccacagcatgagggcccgcccgtgtcccgtccgctgagctgtgagcactggctctgggacaccgggctggtcgttctgagtggcagagtctcttccttccaaaaggtccctgccacctgctacagcctgaggtgtggtggggacaggaaggaagctgtcatcctggggctgagttggtaattaatctatatagctgtacaacaaatgctttaacaaaatcatacatgtctgaagccgcttgtgtgcggttctttgtatgtatccacagagaagtaatcatggtggtggtctcaggtgtggtatttcaggggatttttgttttctcataccttgtgaaatttaaattttctataagtgcatatattttatttgccagtaattaagaaatttggggccgggcgcagtggctcacgcctgtaatcccagcactttgggaggccgaggcaggtggatcaagagatccagaccatcctggccaacatggtgaaatcccatctttactaaaaatgcaaaaattagctgggcatggtagtacgtgcctataatcccagctactcgggaggctgaggcaggagaatcggttgaacccgggaggcggaggttgcagtgagccgagattgtgccactgcactccagtctggtgacagagcaagactccgtctcaaaaaaaaaaaaaaaaaattgggggggccaggtgcagtggcttatacctgtaatcccagcactttggaaggctgaggtaggaagattgcttgggctcaggagttgtgagaccagcctgggcaatgtagcaagaccctatctctacaaaaaattttgaaaattagccagatatggtggcccatgcctgtagccccagttacatgagaggctgaggtggaaggattgcttgagcccaggaggtcaaggctgtagtgacccatgatggtgccattgcattccagtctggataacacagcaagaccctgtctcaaaaacagtttagggggcaatgataaatagcatgtgctgattagaaaaacttctccataactaggaaaatacgtaaagaggaaagtaagttccccatggtcccatcaaccagtcctttgggttcttttttgagacagggtttcactgtagcccaggctggagtgcagtggcacgatcatagctcactgaaggctccagttcctgagctcaagcgatcctcctgtctcagcctcccaagtagctgagattacagacatgtgccaccgtgactggtcaagtcagtctttttatgtaaaggggcaaaactggagtgaaattgcctggtatacatgcccctttttctgcttggttttagaggcaggtagagttaggtaatttcatattattgttgttaatttttacctcaaggcctttttccttcctgctcagccaggtctctttttcgccggggttgactgaccagaggaggcccgctaagcgcctgtggttaaaggtcacagggacataaagacacgtggtcgatgggtgtctgtgtgaggtcattagctacctcctgctaaaaggaacactcatggtatagttttctctggtcaggcatctgtaaatacagctgaccatttgctacgttttccccttggaaaagaaatggagagggcccaggcttgacctggctgccagccctcgccccaccaggcacttgcttgggccactgactgaccctcagagcatcttttccacccacacaccacagatagagccatgccaggtcgcaggggcaagtaggtgaggtcatgactgggaagtcacctgcctccatcctgggcctcggcctctgaggaggtttcactttggagttccctgggcttatgggccccattctgtacacagagcaggctcctccccgtggctatgtcaccttcaacagcagtggcgagaaccccctggaagaagagggcctctgctgccgggatgtcacctcccccatcaatgagcgggatgtggagagcagcagcagcagcagcagtcggggtacgtgcacccccacccatccggcccgtggctcaggcaggtcctggagctcctgtgtgcccatccccacttatcccctgggcctggcgctggacacagccatccagcagaggacaggaaaggggtaggtgtggacggccctggttcttgtgaggaatgggagaagcttctggtccagcatccccgtgcggcttaagggagccgttccacagcaacaggtttagctccttgcttgggagcccctgaggctttcagggcaggccccagtaggaatgtctgttataactgcacctccgtgcagcagctgtttccatagtgcccaccgtgtgccaagcactgctccgggtgcttgggatttatcagtgaacaaaaaagacagaagccctgcccgtctgtatagaggggagggtttaggacaggcaggaagtttgaaatataaggaagcaaccgctgcaggccccaaggagtgccctggtggaggcggctcagcccggggcacgcccatgcgcagcacctcggtgagggctgcaggcggacgccctgtcttcccgccctcagaggaacatgctttctgtgccaacctggggcccgtccagagcagcagcagcagcgagggcctggccagagcccaggggctcagcagcgaagcttctgtggagagcaacgaggtacggattctttctttcttggtctcccatagccggtccctggctgggatgcctgacatcccccagttactttaagatgagcatgtatgtaagaagcagctgctgcacgtgtgtgctgcactgggacgtgctgtgtccagggtctggcttctcagacgacagcgaacgcaccggaagcccctgtgtggcgggtggggggtttcacgaagcctctcaagcccctgtgtggcgggtgggggtttcaccaaggctctcaagttagcccgcgcactctttcagatgcacgcctctcactgcaggactcggatcatgcctgtaaaagctcagctcgcaaacaagctaaaagttacatgaagaccaagaatcctgacagccagtggcctccccgcgctgcaactgacagggaaggctttctcgctgagtccagcccccagactcagagggccccctactcaggaccccaggtaagaccgcttgtgaaactggaggttacactcagagacggcactttttgtgacttaggaggcatgtgttgtgtatatgacgtgccaggcgctgctaggagaacagaatggcggtggcatccccatggcctgttaggctccacaggctcacagccggctccatggctggcagccccgctgcagcgcttctactctgttcctctccacggaaaggacctgtctccctgctttccatactggagttggcctccctgagcctggggagaagaaaagcacacttgacctcagagctgcctgcaggagtctgacaagatgtggttgaagcagagacaggaactacacacagtgtgtgcttggtgatggttacagctgccaccatcctcctcctttctgtggtccctctgaccacacattaccttagggatcagaggtgtgactcacagctcagctgtctcacctgtgtctgctgagttctcctaccctgtgtgggcagaagaggcacggagaggagaggcagagggaagctctggttggttatttggtttgtttgttcgagacggagtctcgcactgtcatctgggctggagtgcagtggcgcgatctcggctcactgcaacctcctcctcctgggttcaagcgattctcctgcctcagcctcccaagtagctgggattacaggcacccgccaccatgcccatctaattttttgtatttttagtagagacgggatttcactatgttggccaggctggtctcaaattcctgacatcgtgatccgcccgcctcgacctcccaaagtgctgggattacaggcgtgagccaccacacctggcctggtgccatgcccggcctggctggttatttgttaaagcactggctttgctgttcagtagagccttggatttgccggcttctccctgcagcccctggctcagtgagcaggcacacgtctcggtcccttcaacatacgttgagtggagtctggtcagggtagtgtcctaagtatgtttctttcagaaaatagcttgaagaaaatgtcagagtaacatttgtttgtccattaaaagcaataaactctcaaaagtaggatttctggagttgaaaagtaaatgaaatgaaaatatcactagacgagctcacagcagaattgagcaggcagaagagtcagacaacttgtgaacacaggtcacctgagatcatctcgcttgaggaacagaaagaatgagtaaaaaaaattaacagaaatctgtgatcccctcaagcacaccgacaccaccccatacagtggcattccagaaggagagcagaaacgatgggtgagaaacagcctgaccatctcagtggatcagaaacacggatcttacatccagggagctcggtgaactccagacaggtgaactcggagaagagctgcgcttagacaagtggaaatcagaacatccgacactgagactctagaattagagggcagcgctctccgcctacaaagcattgtcgagatcagcagctccatggtcccttcacagaactgagcatgtgtgggaggaggaggccagtttctggtgatgaacatacattgtccccacgtggccgaccatagtgtgaggactcacctgcctgcaacatcctgccctgcctgagccaccagagtaggaggggacagcctgggcgccacacacaaggcactgtcttggttctgagcctggggaagtggtggggctccgagtggaggaaaacgtctctgcttcgtcgtcagccactacctcccccaacctgtcccctgtgcctgccaggaccttgccgcactgctggagcagatcgggtgtctgaagtacctgcaggtgtttgaggagcaggacgtggacctccgcatctttctgaccctcactgagagcgacctgaaggaaattggcatcacgtgcgtccagaagggccgctctggccctcagcccggggttggggcaaactcccactcatgtaagcgctcttgggacgctgaggcatatcctggtcacattccccccgcaggctgtttgggcccaagaggaagatgacgtccgccattgcccgctggcacagcagtgcccgcccacccggggatgccctggagctggcctacgccgaccggctggaggctgagatgcaggagctcgccatccagctgcacaaggtgagtggctgggtgggggatgggggggcagggtgacacccgtgagttggctccatctctgacagaaaaggtgggtgctgtgtggaggggtcaggtggatgcagtggggagagggccccacacacaggacagggccgtggccaagggtctggcttgaccggccacctcccagcctccccgcgccccccacccccctgcagcgctgcgaggaggtagaggccacgcggggccaggtgtgtcaggagcaggagctgcgcgccgtggtggagagctgcctgctggagcaggaccgcgcccgcgaggacctccaggcccggctgcgggagacgtgggccctggcccgggatgctgccctcgtcctggaccagctgcggtgagtggctctgagctgccctgggctgggtctccagtggtcagccacctggcccctgggcccccacacatcctttcctcctgattttgtaactgaggggtggatttcagggtctggagccaccccacccccatttcatcaggcccttccttcctgcaggcagacccaggcaggagttgggtccgggaatctgcaccggtcgccctcctgctctttagtgcagcctcatggggcactggcccagcccatgagggccagctgcaaggacagggctgagcccctccctcccctagaaggtctgaggtgggggctctgcagcggccaggcctctgctctcaccaatatttgtttctgtgtctggcagagcctgtcaagctgagctgtcatctcgagtgaggcaggaccagccccctggtgcagccactctgggcctagccgtccccccagctggtaagagcagtggcctgactccgcactgggcagaggggaaggtgggggagccctgaagccaggtttgacccagtgggcttggcctggttctccggccggcagccactctcccaggtccctgtgtgcacatgatcccagagtccaaggaaaagagggggccctggggacccaagcccacttcctcacctgtgacaggaaaactgcctatcccccaggggtaggaggtactcgagaaaggccctgtgccttggctggctgtgctgtgctgagaccgccagtgacttctgtagcctccagccagggcccagacccgggtccccaccggcagagctttgccttctctcgggctgacccgggcctcgtagtgtttgctcagcctgtgggaggaagggcacaacagggcttccctgcctcggccttgggaggttgcttagacactgtcaggcgggtagggaggttctgatccaagcaggttctcctggttgcatgggctcagaataaagcagggcctgtggggacgcagacccccagctaactcggtccctgcacctgcaccacagactccaagggctggcaagcgtccctgcaggccatgagcctccccgagctctcgggagccctggaggaccgtgtccgtgagatgggtgagtctccggggaccagacgactgagcgctccttttgtttccgagggaggcaaagggacccctttccagggaaagcgggtttgtgtctctctaccccaaggctgacctcggggctggggccataacgggtgaggggcaggtcacatcctgcagctgagaccccggggcagcaccacccagccctcctgagcctggccgggagaggctcaaggtcatcattcctcagggcaagcactgtgcttagtgacccagagcctggagaagctgcaggtgctgaacgggaagaagtggcgggagacctagcctgcgggccggtgagtgtctgccagcctggatcccgcgtggtgggagcagcagggcctgtctgggcggctgcaggtgtgggtatgcacccacctgtccccctcccttctcaccggggctttttctttcagaatctgacgttgggtgattggtccaccctgaagctgtgtgccagggagtgaggaggacagtgagcaggtagctgccatgtgcagcccaggcccagtgggggccagaggatcaggccccgggagcagccggcagacagaggcaagacgggggctgcggccctggctcggcagctcgggccagcactgaggcgggacgagggcctcacccagaacctcgtggtgaggcccagagttcatgggctgccctggcccataccaggcagggccctggggggaaagtgtatccatatacacgcacaggtgccaactgaggtgggaccttaggaatgaggactggggcacctggaaaatgccattttttggaaaataaaatttaagaacagct

SEQ ID NO: 15400 - DNA, 34501 bp, Homo sapiens
cgggggcggtgccccggcgagggagcgtggcggcgagctgtttggggggggttggcgacggcagcccgagggcggcgcaaggcctgaggcccagcacaggtgggttccgcggcggcccggccccagcacttgccggcacctgcagcccgcctagacccggcgctcgggcgtcccgcgctgcacttgctcgccgcgtgactggaggaccgagcccccacattttctttatgtggttgtggtgggggcacagtaatgccctgtgcgccgtagcgttcctgtggggatgtggccggggggcgtcgggaagcgtcactgctgtgagttacgggtttgtcggccagggacccgccccggggccagtgagctacctttgcgatgcggttccacggggcgagagggggtgcctgggtgctttcacagacctcctctgtgggcgtgacagttaccaccagcatcacatttgttaagatttttaaaaattttttaatttttgtgggtacgtagtaggtgtatatatttatggcgtatatgagagattttgatacaggcatgcagttcgtaataatcacatgtaaaatgggggtctccatcccttcaagcatttatcctttgtgttacaaacaatatgattatactctttgaattatttttaaatgtgcagccgggcgcggtggctcactcacgcctgtaatcctagcactttgggaggcaaaggcgggcggatcacctgaagtcaaggatttgagaccagcctggccaacatggggacacttcgtctctactaaacatacgaaaactaggctggcatggtggctcatacctgtaatctcagctactcgggaagctgaggcaggagaatcgcttgaacccaggaggcggaggttgcattgagccgagatcacgccgctgcactctagcctgggtaacagagtgagattatgtctcaaaaaaaataataataaataaataaaatgtgcaattagattatattgactatagtcaccctgttgtgcggtcaaatactagatctttttttttttttttttttttttgagacggagtctcgctttgtcgcccaggctggagtgcagtggcttgatcaaatactagatcttattcattctgttttttttgtatccattaagcatccccaccctccactacccttcccagccttggttacactagaagtaaccatccttctactttctatgtccatgagttcagttgttttgatttttagataaccacaaataattgagaacatgcaatatttatctttctgtgcctggcttatttcactaaacataacgatctccgcttccatccatgtttttgcaaatgataggatctcattctttttttatggctgaatagtactccattgtgtctaagtaccacattttctttaggattcactgtaaaggtaacagatacttagcattttcagaatggacagaaccaaaaagttgaatgaaaactaaaacgtcttatctctaatgctactttacaccacaccactcgggatgggacattttagttttcactttagtgttttttttttgtttttttttttgagacagaatttcgctctgttgcccaggctggagtgcagtggcttgagctcggctcactgcaatcgcctcccaggctcaagcgattctcttgcctcagcctcctgagtactgagactacaggcgcccaccaccacacccagctaatttttgtaattttagtaaagatgggagttcaccattttggccagggtggtctcgaactcctggcctcaagtggtccgtcacgcttggtctggttctcattgtccttcagacctctggggatgtcagatatgcaagtctccagtaaatagagaacacggcctcaccctgcaggaggcctttggcgtggaagagacatgcccagtgaaggcttgagggaggtatggaagggactctgaactgaccctcagctcgtttggtttcttatccaggcttcgttggccagggctgttagggtgggattctcacctgcaaagtgagggaagggcactgcacgatcttgggctctgctagctgaagaggtggtggctccaggaaggagggctttgcttgccccaccgcacctacacacactcttcaccaagggtctgtgaagtgttcgtctcccacattggtggcttgtttctttagccatcttggctgtcacctggggcttggaagcattctttaatagaaactgaggtcctcatcgcatctattaactaccatagcacctgtaggtcatcacaacctgacaaggcctttgttttcgcctttgctccctttcctacccttgtttcctggcactcttgtacctaaggattctactaggaagctgatgaccttgccttgatttggggattcctggtgtgccgttacccatgtaggcccatctcggggaaagtgttacctcaccagttcaccggcctgttatatttccccccatagctctctcttcaaaggatgcctaagtggattcctattcagttgacggttgctgcgtgccaccagtcacatcctggtttgtctgttggggaattgctttctatttttttcagaaaaatttatttttacttttttgaaattttcaatttcataaccattccagaaaaattaatttatatttaaaatttacaggccaggtgcagtggctcacgcctatatttccaggactttgagaggctgaggcgggcggatcacctgaggtgaggagttcgagaccagcctggccaacatggtgaaacccccgtctctactaaaaatacaaaaattagcctaacatgatggcgcacacctgtaatctcagctattcaggtggctgaggctcaagaagcccttaaacccaggaggcagaggttccagtgagctgaaatcatgccactgcactccagcctgggcaacagagcgagactgtctcaaaaaaataaataaaatttacatacagtaaaattcattttggtgttcagttctgtggtttcataaaggcatggagtcacagatccaccgtcacagtcatacaggtctatcgtcccccaaattccctctctgccccaacctccaaccctttaattttgccttttccagaatgtcatgtaagtgaaattatactgtaggcaggcttcttccatttagcgtaaatcatttgaaattcattcacgtgttgcatgtcaactgttggatccttgtgtttaatgctgagtagcatccattatatggatgtgccaccgtttgtttatccattcttttatgtatcataatagcagcctttttagatatgtccccgttagacagtgaggcactagggattggagttgctaagtagcagagctgcttttttgttgttttttttttttgttttgtttttggagacaaagtcttgctctgtttcccaggctggagtgcaatggcgtgatcttggctcaccgcaacctccgcctcctcagttcaagtgatgctcctacctcagcctcccgagtagctggccttcatgcccagctaatttttgtatttttagtagagacaggatttcaccatgttggccaggctggtcttgaactcttgacctcaagtgatctgcccaccttggcctcccaaagtgctgggattacaggtgtgagccaccgcaccgggtccaagctgaattttgatcaaaccccaaatccagggttcttccccaccacatcaaggaactgattgggttaaacaacccaattagcatttcttcactgcccatccaagaggttgtcaggttcctagagttggtggagaattctcttttacctggtgcctgcggttggaaggaggagcaggtactccacagttaatgcctcaccatatgtgctcctctttactggtgtgatagcaggctcaccagatttagcatggttgggactgcccaaagcatacattatttcagcaaataaatttgtctgagttactcccggggttgactgcactgggttatcagtctgctagtgcagtggtgtagcaggggcaggaccagcctgtttcatgccctggaacaaccagccaggaaagatctaacccttgggccttcctcctcagtgatgtccgagctcagcgatgaagccagcgagccggaactcctgaaccgcagcttgtccatgtggcacgggctcgggacacaggtcagcggggaggagctggatgtccccctggatcttcacacagctgcttccattggccagtatgaagtggtgaaggagtgtgtgcagcggtaagagatctcggggaacttcctctcacattttgagcagcgcagtgatggcttcgatcccacgtgatggggctttgcacacagttgtggatgtttaatgcgtgtagaataggttaacctgcttatctcaggcagctgtcagtaagtattgatgctgagccctgacaaagaggccgtttttattcctaggaagaaaaagagggagtaaactttgatcagaagcttataaacagtcattctttaaccagactaattttattcactaattgcagaaatgcccaaacaaacaagcaaaataaaaataaagacagaaagtgatggcctggtgcggtggctcacacttgtaattccagcactttgggaggctgagatgggcgggtcacttgaggtcaggagtttgagaccattctggataacatgatgaaaccccatctctactaaaaatataaaagttagctgggtgtggtggcatgtacctgtaatcccagctactcaggaggctgaggcaggagaatcgcttgaacccgggaggtggaggttacagtgagctgagattgcgccactgcactctagcctgggcaacagagtgagactctgtctcaaaaacaaaaaaaagaaaaaagaaagtgatccctggccttcttttcccggagggttcattcgatccctgtgatccctgttcccctctagcttctgccatggaggaggagagaggctgggctttcagtgcctctggggaatgacctcccgacgtcactgcccacctgccctttgctaatctgtgtacaatagttagagacaatataaagcccctggcagggtccatggctgcgtcttgcccatagtaggatgtgatcatcttgtttttggaaaagggtcgtctcctcacttccacccccttatgttccacacacagcctaactctgtctcctggttctcatttgatattgtggtgcagcgacctctcttcctctctctgcgtgcctcttccagttcccagtgagccaaagcaaagcattgctgaagccccaggtctccggttcccaagttgtggccctcacttagacatacccagcccatggagtgctggtgcaccttggtacagggtggtctgttgcgctccctccacaggaggctctaggcataggcagctgggtatgcagtcagtacggcccctcaaagggtcacgtttggaattctcaggctcttaagtctttgggtgtcctgttaagatgcagagtccataaccgctccatagaggagcagggggaggcgtttgtgttgtgatgggattttgacactagctgaggtggaggcttgctgatagtaagcacaggatggggcctgaggggagctgggggcatcagaaggaaggggtggggctgaacgaggagtggtaagagagccccagggagatgctctgctgttgtgtaaaggaagatagtgttaggacgagctgggtgcattcgagccctgctgcagaggcatctccatgcagcccccctggccaggggctgccactgaaccctggtatcaggaccttctggaatggctgcccaggtgtgcatcccagagtcactgagggctgccaggcaatggaaggtagttgcctgctgtggtctaatatgtgaatcccggctgggcgcggtggctcacgcctgtaatccagcactttgggaggctaaggcgggtggatcacgaggtcaggagatcgagaccatcctggctaacacggtgaaaccccatctctactaaaaatacaaaaaactagctgggcgtagtggcgggcgcctgtagtcccagctacttgggaggctgaggcaggagaatggcgtgaacttgggaggcggagcttgcagtgagccgagatcgcgccactgcactccagcctgggcgacagagcgagactctgtctcaaaaaaacaacaaaaaagtgaatcccgtaaaagggacagatcctggggttcagtcaccagttgttatcccctctgcaggcaagaactggggaagggaaagaaggcctgtgggcgttaaccatgtaggatcccaggtaaccatgcaagtgggtattattttaaatgtgactcccttgtcccaaccccagagtcgcagctaggaagcccacagttttttcccatgggaaaatgcattgccagaattttaacagcaatcagtgagaaagatgggattctttggtcacagatttttcaagaatgtttctttaaggtgaggtgacaaaggatgaatcagtggcggtgggacttgtccacggtggagtcccttctttcctcactgctcctctccacccagcagtgggctagtagatgccaggcctgtggtggtcagggtttttcaactgtggctgtgttgacaatccaggctggatcattctttgctgtgggggctgtcctggacactgtgggatgtttagcggcagccttggcctccagcagcccttccctgcccagttgtgagaaccaaaaatgccttcacacattgccacatattccctggttgagtgccatctgcctatctggtggtgtgaaagagcatagctggccttgggctaggaggatgcgaaatcagagcaaggagacgaaggctcagggcctcacaaggcagtgtacgagcaactgtcagcatttttctgcctgcctgcctccaatccccacaacgtccagggtggcagataacttctgcttcctgtcaactcatcccgcctggcctagcctcgccaccagctttggtgaaccccacatgcgaggcggctggccatgtctagcatatcttgcgtttgtttaggagagagttagatttgaataagaagaatggtggtggctggaccccgctgatgtatgcctcctacattggccacgacacaatcgtgcacctgctgcttgaggcgggggtgagtgtgaatgtgccgaccccagaagggcagactccactgatgctggcctccagctgtggcaacgagagcatcgcctactttcttctccaggtgagctacgagggaactcaggcccagaaacctgaggggctccgtggccaccctgacagagatgcgaaccactgcaggccacggtgttcgtgtgtgctcgtgtaatcacttctgattcttgcagcatggccgcctggagggcgcccgccccacgcagaggagatgaggccgtaacgcacgttctgtgttctcttgaagcaaggtgcagagctagaaatgaaagacatccagggctggacagccctcttccactgtaccagcgccgggcaccagcacatggtcaggttcctcttggacagtggagccaatgccaacgtgaggtgattgccacatctttagtggccacaggagtggcctaggtgtcatctgactctaaggagggtggctctggaggcagctaaccagagtttagggccaccctgcttcggcacgagaggctcaagatgaggggtaggaccagagtccttccaggcacaggccttttcgtacatctgtgagatgcatctcttcaagccctctcagcttccttttctttatctgaaacccacctgggtcatacagttgtaagaattacatgttttattgtatgccaggggcctaacatactgaatggcatttaaatgtcatacattacatgcaaattccttccattttcttgctttttgtatggatgaggtgaggtgatgctttgaaacagtcatgaggccgggcgtggtggctcacgcctgtgatcccagctctttgggaggccgaggtaggcagatcacgaggtcaggagatcgagaccatcctggctaacatggtgaaaccccatctctactaaaaatacgaaaaaattagctgggcatggtgacgggcgcctgtagtcccagctactcgggaggctgaggcaagagaatggtgtgaacccgggaggtggagcttgcagtgagccgagattgcaccactgcactccagcctgggtgacagagcaagactccatctcaaaaaaaaaaaaacaaaaacaacagtcatgagttttggccgggctcagtggctcacacctgtaatcctagcactctgggaggccaaggcgggcagatcatgaggtcaggagttcgagaccagtctggccaacatggtgaaaccccgtctctactaaaaatacaaaaattagctgggcgtggtggcaggtgcctgtaatcccagctactcgggagtctgaggcgggagaatcacttgaaaccagaaggcagaggttgcagtgaactgagagatcgtgccactgcactccagcctgagcaacaagagcaaaactctgtctcaaaaacaaacaaaaaaccagtcatgagttttataagttggaagtgggattgttgtctaaagcttgtcatgataataatcacctttgaacaaacgcagcgggtaccaatgcagcacccaccctggctgtcattcattctaagacacctgataattttgtatgccactaagaaagaaaaaatatgctactaattaacattcaactcgcctgttgatttaaagatgttttctgacttgagagatgttaaaatatgaacactgtgtgtcttaagatggatgaaaaccagcatttcccatgcatggttcctgacttccaaaccagcatgagacaaggagggatttggaagccctctgaagacagtgccgagttagcataaccaagcatgaaaagcaagcttcaggagctaagcgtggcaaagatagcttagatcattagtacttgaacttttcagagtgggttcatggaggacgttgaacttgaagccaggatttggatgaatggatgggagatgctggctttctgtgaggaattagaacagctttttgaatatgattgaggtggagatttcagaggtagccagtgggaatagccaacaggtgggacgacaggcagacatctgtctttaggacaaagaccagccctggggacagacaccagaagagtaaatggagctgatgtgttatattcactgttctcatgtcacctgttaattctggaaagggacagtgttctacgcttagggatcggtgactcgtgcactgctcagggtttatcttcagcagggagtttttgcctggcggaacttgtctcttccaatcatctgactgtggcccacatcttgcagggagccgatatgtggatttactcccttgatggaagcagctgctgctggccatgagataatcgtgcagtattttctgaatcacgtaagtgaccctgattattagcatgtaatgtagtcacggcaaatgaggaatcatattactgaagtataagctattacagaattttcctttgcacagaaataactttcattcatttattcaacacattttcattatctattgacgcccggtgttgagtggtgcttaggcattaaggatacagtggtgagtagaaatagacacctattcctgtaataattttgaaaatactatctgaaaattatggaaaaatattttaaaagtaaatagcactcataatcctgtcacttagaaaaattatatagaataagaaggcagagatcctcctctctttttcaacctccctgatgcccacttggtttgagaaagagctgccctaggacttttcctctgctgtggaaagatgtgtctgtaggcaagtgtgtgcacattgctttgtgttttgaacaaagtgggattctacgtatagtctgtaacttagagacatcttatagacatcttatctttgtacagtattccgtgtacaatctgcctcagttaatttaatgagtttcttattagtagaaacttagtttttaacattttgcaattataaacagtgttccgggaatatccttttacacatagctttaatacatttgcagttatttctgtatgttgtatttctgttttattttattaatttatttttttgagacatggtgttgccctgtatcccaggctggagttcagtggcgagatcgtggctcactgcagcttcagcctcctgggctcaagcgatcctcctgcctcagcccccaagtagctgggactacaggtgcatgctaccatgccccggctaattatttaattttttttttttggtagagttgggggtctcagtatgttgtgcaggctagtcttgaattcctgagctcaagcgatcacctcagcctcccaaagtgctgggatcacaggtgcaagcctgtccacacagaaccttgtacataaatattcatagcagtattattcataattgccaaaaagtagaaaaacccacaagtccatctactgaggaattgataaacaaaatatatatctgtatagcaggatattattcggccctacaaagtaatgcagtactgctgcatgctgcggcaggggtgaaccctgatgcgttaggctgggctgggtgcggtggcgcacgccggtaatcccaacactttgggaggctgaggccagagggtcgcttcagccctggagttggaggttgcagtgagctatgattgcgccgccacactccattctgggtcacagagtggatcctgcctcaaaaagaaaaagaaaaggaaaacattcggctcagtgaaagaagccagacacaacaggccacacactaggtgatttcactcataggaaatgtccagaataagcaaatacatagacagaaaatagatgagtggtttcctgggtcttggggaatgggaagattggggtgataaaaatgtgctaaaattgtttgtggtgatggttgaacaactgtgaatatacgagaagccgttgaattgtacattgtaagtgggtgacttgttggtatgtggattatatctttataaggctgttaaacccaatggggggaagtgcaggcggtcctgatgaattcccactaccaaggttgtctgttgtcctgcccaccagtcatagacaaaggtgtccattttctcttgtcctcaccagtcctgatgtcagtcaaccttttgtcaatctggcgggtgaattgtagcgtctcattttagtttgtccttgttagagtagttgaaatttttttctttttttttttttttggagacagaagtcttgtgctgtgtcgcccaggctggaaggctggagtgcagtggcgtgatctcggctcactgcaacctctacctcccaagttcaagcagttcttctgcctcagcctcccgagtagctgggactgcaggcacccgcccgcacacctggctaattttttgtattttagtagagatgaggtttcaccatgttgcccaggctgctcttgaactcctgaactcaggcaatccacccaccttagcctcccaaagtgctaggattacaggcataagccactgcgcccagccagttgaacatttttaaattgatttcttagccatttgtatttcttttttttttttttttttgagactgagtctcactcagtcgcccaggctggagtacagtggcatgatctcagctcactgcaacctccacctcccaggtttaagagattgtcctgcctcagcctcccgagtagctgggactaaaaatacaaaaaatcccggctaattttttgtatttttagtagagacaaggtttcaccgtgttagccaggatggtctcgatctcctgacctcatgatctgcccgccctggcctcccaaagtgctgggattacaggtgtgagccactgtgcccggctggccatttgtatttctcttacgagctgtctatgtttattgcccaattttctattggatagtttgtttttttctcacttattggtgggaatttcttaaatagtgaaaaattcacatggtatctctttttaacaaagaattttgggacacaacatgcacatggtacacatgcagaccagaaggtgggtgcaccgcaggcctgtcccccaccctgcctgcgtctccttggcaccctccccacgggcgactctgggaatacacccacacatgctcatggtcctgccccatgtgcagctgctcccatcttgcattttttaaaaaacttaatcatgaagatttttctatattggtgtataaagagacggggccaggtgcattgtctcgctcctgtaatcccagcactttgagaggccaaggcagacagatcacttgaggtcaggagtttgagaccagcttggccaaggtggtgaaacccgcctctaccaaaaatacaaaaatacaaaatacaggtggctgacgctgtaatcccagctacttgggaggctgagacaggagaatcacttgaacctgggaggcagaggttgcgatgagccaagatgttgccactgcactccagcctgggtgacagagtgagactatctctaaataaataaataaataaataaataaataaatcaataaatcaataaagagatggggtcttgctctgtccctcaggctggagtggagtggtgcagtctcagctcactgcagccttgacctcctggtctcaagtgatcctcctgcctcagcctcccaagtagctgggattacaggtgcgtgccaccacgcccagccaatttttgtattttttttgtagagatggggttttgccacgttgcccaggctggtcttgaactcctgagctcaggcagttcgcctgcctcggtctcccaaagtgctgggattacaggcacgagccaacgcacccagcccctctcttttttttttttttttgagatggcgtcttgctctgttgcccaggctagagtgcagtggcacgatctcggctcactgcaacctcagacttccgggttcacaccattctcctgcctcagcctcccgagtagctgggaccacaggcgcccgccaccatgcccagctaatttttcatatttttagtagagacggggtttcaccgcgttagccaggatggtctcgatctcctgacctcgtgatccgcccaccttggcctcccaaagtgctgggattacaggcgtgagccaccgtgcctggcctctcttttttttttttttttttatggtggcatggtattccctgtagggatgaatcagagtttttttgtttgtttgtttgtttgttttgagatggagtctcgctctgtagccctggctggagtgcagtggcgcaatctcggctcattgcaacctctgcctcccaggttcaagcgattctcctgcctcagcctcctgagtagctgggattacaggcgtgtgccaccacgcccagctaattttgtatttttagtagacagggtttcggcatgttggtcaggatggtcttgaactcctgacctcaagtgatctaccactttggcctcccaaagtgctgagattacaggcatgagccactgcgcctggcctaccgttgacatttcttacacgtctttttaagcacatatgggaatttcttcaggagcttaggatgtgttcttcaaagtagagtctttgttgtgtgaggtgggttcagtcggtagtgggtagtgtaaacttgctttgttccatagtggtcctggttcacacccctccccttagggtgttagacttcttttttttttttgagatggagtctctctctgtcacccaggctggagtgcagtggcgcgatctcggctcactgcaacctctgcctcccaggttcaagcgattttcctgcctcagcctcccgagtagctgggactgtaggcactcgccaccatgcccagctaatttttgtatttttagtagagacagggtttcaccatgttggccaggatggtctcaatctcttgaccttgtgacccgcccgccttggtcttccaaagtgctgggattacaggcgtgagccaccgtgcctggccttttttttttttttttttttggggtggggtcttgctctgtccccaaggctggagtacagtggtgtgatctcagctcagtgcaacttctgactcccaggctcaagcaattcgcctggctcagcctcccgagtagctgggattccaggtgtgtgccaccatatccagctaatttttgtatttttagtggagacagggtttcaccatgttggccaggctggtctcgaactcctgacctcatgatctgtctgcctcagcctcccaaagtgctgggattacaggcgtgagccactgtgcctggccaggatgttagactttttggctccctggccatttgggtttctttttctgcaaataattatttttgtattttttatttattttttttatatagggtcttgctttgtcaccacactagagtgcagtggcctgatcatgggtcattgtagtctcaacctcctgggctgaagtaatccttctgcctcagcctcctcagtagctgggactacaggcacgcactaccacgcctggctgttttttttttgtagagacaaaaatctcactatgttgcccaggctggtcttgaactcctggcctcaagcaatcttcccaccttggcctcccaaagtgctggagttacagacctgagccaccatgcccggccagataattctttgacagataatcctgctgacatgaactagacttccttaagacacatcatagaatcaatagcccagaaccataaagagcctctacttgtaagtttagagtcattttaagtaaggtagaactggagatcataagagatatgtactcttataatttttgattgtatgtttgtttctttttgagacagagtctcactctgtttgcccatgctggagcacagtggcgcgatcatagtttgttgcagcctcaacctcccaggttcaagggatccttgcaactcagcctcctgagtagctgagaccacaagcgcatgctatcacactagctgatttgatttttttgtagagttggggtctcactaagttgcttaggctggtctcaaactcctggctgcaagtggtcctcccaccttggcctcccaaagcgctgggattacaggcaggaaccacggtgcttggccaacaatttgcatgcctttaccacattccccaaatgttaacatttcacctcattttcttatcagtctctttatgtataacatgcatatgttttctgaatcatttaaatgtaaattgtgacataatgccccttttcccctaaatatgtatttcctgagagtaagaatttcattatgtatttcctaaaagcaaaaatgttctctttcccagtcacacaaaattatcagactcaggaactcaacactgagttcttcctccagcacttgacaagaatcaaagtgttggttagtgactgctttgggggatggggcaggactggcagcaggtggcccgatggcctgggtggtttgcctgccagcgatgctggtgggcaagccctgcctggaagctcctctctcccacgtttttcctgccgcccagtagttagaccacctggagccagaggagggggcccacccggtttcccagcctgtccctccagagctgggctccatttctggaggtagagaatggggcaagtctgggcatcttgtgctctttgctaggggaggaaagggctgtggctgctttccttgtcccccatttcccttctgccagtggggccaagccccagcagctcagtcaggagaagaggatatggatctgtctgggcctctctctttaagagaaagttgattcgtgccttccggatagtcttgttccagggtttctaaactttctgatcccaccttcatgttaaaatgagttttgatcatgtgtctctttagtaatatggacattataaaataggaaaaaaaagtctcttaaagcctaagtagttaaaaatttattttcacatcaggcatagtggctcatgccagtaatcccagcacttttagaggccaaagtgggaagatcgcttgaggctggagttggagaccagtctgggcaatacagtgagaccttgtctctaaattaaaaaaaaaaaaaaaaaaaaaattggccaggcatggtggctcatgcctgtaatcccagcactttgggatgccaaggcaggtggatcacctgaggtcaggagttcaagaccagcctggccaacatggtgaaaccccattagcggggcgtggtggcgtgcccctgtagtcccagctacttgggaggctgaggcgggagaatcacttgaacccggaaggcagaggttgcagtgagccgagattgcgccattgcactccagcctgggtgacagagtgagactccgtctcaaaaaaaaaaagccagttgtggtgtgtgtttgtaatcccagggaggctgagaagggaggatcacttgagctggggaggtcagggttgcaatgagccagtgtaatccagcgtgggccacagagtgagattctgcctcaaaaacaaaaccaaaaatatataacgagttaaaatcctacagtaaagaggctactgttttattctggttaaaccttagggttccttctatcaaacttaaactagaattttttttttttcttgagatggagtcgccctctgtcgcccaggctggagtgcagcagcttactgcaatctctgcctcccgtgttgaagcgattctcctgcctcagcctcccgagtagctgggattacaggtgtgtgccaccactcccagctaacttttgtgtttttagtagatacaggctggtctcaaactcctgaccaggctggttgttggccaggctggtctcaaactcctgacctcaagtgatccgcccacctcagcctccaaaagtgctgggattacaggtgtgagcctctgtgcccagccaagaaattattttttatttttgagatagagtcttgcttcgtctgttgcccaggctggtgtgcagtggcgtgatcttggctcattgcaacttccacctcctggactcaggcaattctccttcctcagcttcctgagtagctgggagtacagacgtgtgccaccacgcccggctaatttttgtatttttagtagagatggggttttaccacgttttcccacattggccaggctggtcttgaactcctgacctcaggtgatccacccgtctcggcctaccaaagtgctgggattacaggcttgagccaccgtgcccagcttataaattattgttattatttattattatttttttgagatggaatctcagtctgtcgtcgaggctgtagtgcagtggcgcgatctcagctcactgcaacctccgcctcctggattcaaggatttctcctccctcagcctcctgagtagctgggatacaggcacgcaccaccacacctggctaatttttgtattttttagtagagacggggtttcaccacattgcccaggctggtctcgaactcatgacctatgatccacccaccttggtcccccaaagtgctgggattacaggcgtgagccactgtgcccggcctataaattattttttaaggcacaaagtctcataggtaatttttaatcagagtcaaaagtaggatggggggcactctagaaagtaaaactccttatactttgtgaaaacacagttttttgtcctgtatccctgcccagagaccacctctgcctcccccaccaactacatatgggggtcaaggttgaggccccctggtctaacgggagagacagttgccgtatgggtggtagcaaaactccttaagggttgtgatttttttttttttttttttttttgagttggagtctccgtgtgtcgcccaggctggagtccagtggtgcgatcttggctcactgcaacctccacctcctgggttcaagcgattctcctgcctcagccccccggagtagctgggactgcaggtgcccaccaccacgcccggctaatttctttttgtatttgtagtagagatgaggattcaccctgttggccaggctggtatggaactcctgaccttgtgctccgtccacctcggcctcccaaagtgctgggattacaggcatgagccacggcgcctggctgtgccttttttctcttaatgatgttttgtgcaccctagtccgtgtcaccgcaggtactcccacccaccacgtaaatgggcgggaggcgctctgttttctggatatgctctcacgtagctcattaatctcttattttaagttccttctgattctcactatgctgaatgccacagtgaaaattctaaattgtagtgtatgtcctgcattatttccttaggcgccgctgcacttcagcctgggtaacagagcaagatcctattaaaaaaaaaaaagcaaacatgcttatggtagtacattttaaaaacatagaagattggaaaattggaaaaatccccatcaaaaatagtaaataacttaaaaatagcaacattttgggtatgttaccttccaatattgttttctgtgtaatttttttggtctcattttgccggagttgtaatgtatatgtagttttgtatcatgatccttttttatttttttgagacaaggtctcgctctattgcccaggctggagtacagtggtgcgatctcagctcgctgcagcgtcaagctctgggacttaagtgatcctcctgcctcagcctcctgagtagctgggactacaggcatgtgccgccacaccctgctaattttttattaaagatgctccccctttccggggtcccgcctcctcctctgagctttggctctggcttccctgcctcccccagctgcctggtctgacaggagagaaggacagttacagtgtacagtgacaccaaaaacatgctgtattgattatagtttatttttttttcttgtagaggtgggttcatgctgtgttgcccaggttgttgtccaactcctgagccgagcgatccacctgccttggcctgtcaaatgctgggattacaggcatgagccacctcacttggccatgatcctttttcaacttgatcatacagctgtttgtaaatatcaccatctatggcaataacagaactgactgcttatccccctgagcattcaagttttctctaggtaggttttcattattgtgaatatgctgtgccaaacatcctttttttttttttttttttttttttgagacagagtctcactctgtcttcaggctggagtgcagtggcatgatctcagctcactgcagcctccgcttcccgggttcaagcaattctcctgcctcagcctcccgagtagctgagactataggcgttcaccaccacgcccggctaatttttgtatttttagtagagacggggtttcaccatgttggccaggatggtctcaatctcctgacctcgtgatctgcccacctcggcctcccaaagtgctgggattacaggcatgagccaccgcacccggcctgtgccaaacatctttgtgcactaaagccttttctgtatttagggttatttccttagggtcatggaagtggaattgttgcgctgcaagacctgtaaatacattatagagctttggatcaaagttacgaattctgcttcagaggatggtgctttcattctgactggtttaaaaggctgctttctttgaagacaagcgaagtgagtgggacacagcccaggcgcagaaggtgaaggctgggatctccgcatggtggctgccagccccctgcaagggaggtcatgagcgtgggagatgactccccagcccccagccctcctcatccttgtccctaagaagagagtgagagcaaaacttgtggctgcggtgcagacaagcctgcctctttctcatgcagatgtgatgtttcccacacagggaggcagtcagaaaccagcatatgcccttctgtcttcccagccagcagcccaggaagggcaggtgctttgaaggagaggcccctaaccccctttcacggacattcacagggagtcaaggtggacgcgagagaccacagtggagccacagcccggatgctggccaagcagtacggacacatgaagatcgtggccttgatggacacttactcgccctctctgcccaagagcctctatcggagcccaggtacccacacctgccagccgcgccctgctggggtctctggttgccttgagctttaggtgacctggcagagaaagatgtcccccgcttccccggctcccaccttctctgagatttggctctgcctcccccagctgcttacatgtcaaggttgaggcccctgctctaacaggagataaggatggttacgatggagagtggtacaaaaccaggctgttgtgaatgtagaggctttctgtagtatgcttgactaccgagtaggggcaggcccctcttagttttctgttttcactgtttcctgagctatggcttgttcattcttctatatgaacttgaatatcaacttgtctagctccttaaaaacagtattgatatttttactgagattgtgacaatgtataaattaactatatctttgtgttgttgtcttatccaagaacaagggatgacttcttgttccaatgtacttttgggtcttgcaggagggttttaaatttttcttcatctacattttgcatgtgacttaagtttattcctaagtgtttgatcatctttgtcgctattgtaaatggggttttccctatcattatatcctttttttccccccaactctcagggtattaattattcagtgctatttattttttatttcagtaggtttttggagaacaggtggtggttggatacgtgaataagtcctttagtggtgtcattatatcgtttcactgcatattgtcagtgcatttgaaggcagtggatttctgcaaacttttgttttttttttgatacgggagtttcgctcttgttgctcaggctggagtgcaatgaagcgatcttgcctcaccgcaacctcttcctcccaggttcaagcaattttgcctcagcctcccaggtagctgggattacaggcgtgcaccaccatgcccggctaattttttgtattttcagtagagatggggtttctccatgttggtcaggctggtctagaactcgcaacctcaggtgatccacccatctcagcctcccaaagtgctgggattacaggtgtgagccactgcactcagccctgcaaactaattttatattctgctaccttacagaattcttacattgttcaggttagttttgttattgattctttagggctttacaggtgtactaacatataatctttaagtatcgatggatacactgcttcctgctgattctcatgactctgactttgttgaattgcaccgttcttttgtttagttgctaacacctctagctcattgttcaacatagtggagatagtgagcctccttaccttggtcctgatcttagtggaaatgccacgttacatgagaggctgactgtaaaagggaaggcatatgttattttagcttattaacaaagtattcctcagttcttctattcctgagtggtgttttacaggagtaactattgaattgtgttcccatatctttggagacgatggtgaattttcatatggtagattgtcttcatgaacctcctaataatgaatcaaccttacattcttggcataaatcccacatgttgtactattttaatgtgtttttgaattctgtttattaatatttagtatttttctatggatattcagtcataagtgatactggtctatagttttctttcttctttttttttgtttttgaaatggagtcttgctctgttgcccaggctggactggagtggcgagatctcagctcactgcaacctccgcaacctccgcctcctgagttcaagcaattcttctgcctcagcctcccgagtagctgggatcacaggcgtgcaccactacacccagctaatttttgtatttttagtagagacggggtttcaccatgttggccaggctggtctcgaactcctgatctccagtgatccgcctgcctcagcctcccaaagtgctgggattacaggcgtgagccaccgctcccggcgtggtctatacttttctatttttgttctgtctatcaggtatgggtatcagtgtttacttcataaaaataatttggaagttttccttccttttttgtgttctaggacaatacacgtagcattagtgctacctggtcttagaagttttgatagaatcctcccatgaaaccatctggtctctttctgtgaggtggttcctcgataacagtttttctatttcttctatagagattggcctcctcatactttcttttcttatggggtcagttttggtaaattatattttcctgagagatcacttcatctaggatttcagacttatctgcagaggtctacaagataatattttctccctttttttttttttttttttgagacagagtttcactcttgttccccaggctggagtgcagtggctcgatcttgactcaccgcaacctctgcctcccgggttcaagtgattctcctgcctcagcgtcccaagtagatgggattacaggcatgcgctaccatgcctggataattttatgtttttagtagagacagggtttctccatgttggccgggctggtctcaaactcccgacctcaggtggtctgcccacctgggcctcccaaagtactgggattataggtgtgagccaccgcacccggccaatttttttctccttttaaaatattctgtttcagggccaggcgcggtggcttatgcctataatctcagcactttggaaggccgagttgggcggatcacctgaggtcgggagttcgagaccagcctgatcagtatggagaaaccccatctctactaaaaatataaaattagctgggcgtagtggtgcatgcctgtaatcccagctactcgggaggctgaggtgggagaatcccttgaacccgggaggcagaggttgaggtgagccgagatcgtgccattgcagtccagcctaggcaacaagagcgaaactctgtctcaaaaaaaaaaaaaaaaaaaaaattctgtttcaggctgggtgcagtggctcatgcctgtaatctcagcactttgggaggctgaggcgtgtggatcacttgaggtcaggagttcaagaccagcctggccaacatggtgaaaccccgtctccactaaaaatacaaaaataagccaatgtggtggtgtgcgccagctactctggaggctgaggcaggagaatcacttgaacccgggagggggagattgcagtaagccaaaatcacgccactgcactccagcttggcgacagagcgagactccatctcaaagaaaagtaaatagataaaataaaacaaaataaaatactctgtttcagtggttattttctcctgttattatctttttttggcatggaaaatattgatttattttttgtgacagggtcttgctttgtcacccaggctggagtccagtgacccaatctcgactcaatgcaacctccgcctcccaggctcaaaacgatccttctacctcagctctacgagtagctaggactgtaggtgcaccctaccacgcccagcttacgtttgtattttttgtagagaggtggttttgccatgttgaccaggctggtctcaagagtcctgagctcaagcaatccacccgcctcagcctcccaaagtgctgggactacaggcatgagctactgcacctgacctggaaaatatttatctcatttttaattgacacaaaataactacatatttatggggtacagtgtgtgatgttttgatacatgtatacactgtgtaatgatcaaattaaggtgattagcttatccatcacctcaaacatttatcatttcgaggtgagaacatttaaaatcatgtcttctagtagctattttgaggtataagctgttgttccgtatagtcactctactgtgaacaccagaacttctttcttcgatctgtaattttacacctattgaccaatctctcccactacctccccacccccaacctctgataatcactattctactctacatgtttgacatgagcttttaaaaatcctgtaaatgggtgacatcatgtagtcatgtagtcttttttgttgtttgtttggtttttgagacaggttctcgctttgtcacccaggctggagtgtggtggcataatcttggctcactgcagcctccaattcctgggctcaagtgatcctcctatctcagcctcccgagtagctggcactacaggcacctaccaccacacctggctaatgttttatttttttgtagagacggggtcttgctatactgaccaggttggttttgaactcctgggctcaagtgatcctctcgccttggcctcccagagtgttgggattacaagtgtgagtcaccacaacagctggcatttgtctttcttttctatgtctggcttattttactgaacatagtctcttccaggcttattcatgttgccacaaatgatcagatttcattctttatgtctgaataatattcaattgtgtatataaactcattttctgtcttcgttcatccactgatggacacaggttgattctctatctaggctactgtgaatactgcggcagtaaacatgagggtgtagacatctctttggtatactgatttcctttcttttggataaatacccagtagtggaattgctggatctcatttcttatattttttaatttttttttttttttgagatggagtttcgctcttgtttcctaggctggagtgcaatggcacgatcttggctcactgcaacctccacctcccgggttcaagcgattctcctgcctcagcctccctagtagctgggattacaggcatgtgccaccacgtctggctaattttgcatttttgggagagacagggtttctccatgttggtcagggtggtctcgaactcccgacataaggtggtccacccgactcggcctcccaaagtgctgggattacaggcatgaaccgctgcacccggcaaaaatttcttctattaaaaaaaatagagacagtgtctcagtatgttgcccaggctggtctcaaactcctgggcccaagcgatcctcccacctcagtctcccacagtgctgagattataggcatgagccactgcgcccggcctcacttcttattttgaatatttgtgtttgttctttttttttttttgagacagagtctcgctctgttgcccaggctggagtgcagtggcgcgatctcggctcactgcaacccccgcctcccaggttcaagcgattctcctgcctcagccttttgagtagctgggactacagggtgcccaccaccacacctggctaattttttttttgtatttttagtagagacagggtttcactgtgttagccaggatggtctcgatctcctcacctcgtgatctgcccacctcggcctcccaaactgctagaattacaggtgtgagccaccgtgcgcagcctcttcctttttttcttaagttaaatactagtactttgtctgtttagtggaaaaacaagaaaaacccatcggattttgatttattaatgagacctactgattgtctgtttaatttctgcttttatttttatttggcttactttgttgttctagttttttgagttggaaacttctttcattttcattgttgcccttttgttgctaaatgttagaggctgtgaatttttgctgattgctgctttaagtgtattctgggggttctgtatttaatactttccttgttatttttagaaattctgtaatttttatttatattttctccttcacccaggagttgtctaatagaagtattatgattgtttttgtttgttaatttctagatggaagggcctttttgatcttgcaattaatttctcatgttattctgattaactttaatgtgtctgatcagagagtgtttataattcttacatttacataacttccttgtcatcttatttatcatctactgatctatctatatatatatatatttttttcagatgtagtctcactctgtcacccaggctggagtgcccaagtgcgatcttgactcactgcaacctctgcctcccaggttcaagcgactctcctgcctcagcctcccgagtagttgggattccaggcatctgccaccacgcctggctcatttttttttgtatttttagtagggacagggtttcaccatgttggccaggttggtcttgaagtcctgacctcaagtgatccgcccacctcggcctcccaaagtgctgggattacaggcgtgagccaccgcgcccggccctgatcaatattttttagtgttccgtgttttgcttgagaagttgtattctctattatctgtatacagtttagcatatctgtgagtctatcttatttaggattatgtactcttagttcattttctacaaaattacctattagcgtgtttctgatttatgaaggaagttggtgcattttttggtgacagattttcataacttgttatagattcactgtgaattatggcttttagtattagaagtgtccttctggctgggcatggcccatacctgtaatccgagcactttgggaggccaaggcgggcagatcccctgaggtcaggagttcgagaccagtccagcctacatggtgaaaccttgtctctactcaaaatacacaaattagccaggcatggtggcacatacttacaatcccagctactcgggaggctgaggcaggagaatcacttgaacccgggaggcggaggttacaatgagccgagattgtgccactgcactccagcctaggtgacggagtgaaactctgtttcaaaaaaaaaaaaaaaaaagtgtccttccgtgtcatatttaatgtgttttgccctgaattccacgttgatagcaggattgcagccctggctcttttgtggtttccatctgcctgttctttttaagctgctctgagggtgtgttgggtgctgagattcacgcagctgccgttcccttgcttattgctgcctctttgcatttgtcttacagctccctccccttcagcttggatggaagcacagtctccctggagtgctatagatctttgagtgtgaggaggtgtgtgtccatatggctagctcagtcgccagagcttgagcctcgtcatggggaaggacagagtggcccacgttcagggcctgagctctccctctttgctggcctgccctgagttgtcctgtcagtttgcacctgagcgagcagctcctttctcagtgtcaggctcagcccagcctcttccctggcattgggattgtttcataataaacacagctcaggtggtaatgcaaaggacctttcccttcatttctgccccagcttacccactccacaaggagatctcatcatttcctcctgtatacaactcacgtatctcttaaaagtagaatcagatcagagccttatacaaatcaaatatgaaaaactgaaaagctacaaaataataaaagctctggtttgagctctgaaagctcagactgggaagtgatttgaaacagtttataatcatagcaaacacatgccatgctttagaaaatacaaaattgtggctgggcgctgtggctcactcctgtgatgccagcactttgtgggaggccaaggtgggcggatcacaaggtcaggagatcgagaccagcctggccaacatggtgaaaccccgtctctactaaaaatacaaaaacaagattagctgggcatggtggccgggtgcctgtagtcccagctacttgggagcctgaggcaggagagtggcgtgaacccaggaggtggagcttgcagtgagccgtgatcgcaccattgcactcctgcctgggtgacagagcaagactccgtctcaaaaaaataaagaaaaaaaaaagaaaatacagaattgcttaataagttgtttccagccgggcacagtggtaacgtgcctataatcccagcactttgcgaggctgaggtgggtggatcacctgaggtcaggagttcaagaccagcctaatatgatgaaaccccatctctactaaaatataaaaattagctgggtatggtggcatctgcctataattcccaactactcgggaggctgagataggagaattgcttgaacccaggaggcggaagttccagcctgggcagcaagagcaaaactccttctcaaaagaaaaaaaaaaaagttgtttccaaaggaagggattaggaaaaagtagttgtgacttatattaccatatattttaatgaagagatgggttttacttattcaaattagaacagaatttctgattatgaacaatacagacttatgaacaatttggcaaaccccaacagagataataaactcctggctgggcatggtggctcatgcctgtaatcccagcactttgggaggccaaggcaggcagatcaggagtttgagaccagcctggccaacatggcaaaagcctgtgtctactgaaaaagaaaagaaaaaaaacactgggcatggtggcacgcatctgtaaccgcagctacttggaagggtgaggcgtgagaatcgctagaacccaggaggcggaggttgcagtgagtgagccaagatcatgccattacacttcagctcgggggacagagtgagactctgtctcaagaaaaatgaaacttcccatcctcactaactttgcagctccctgtggcccattggagcagcgccccggcctgttagggcatttctcagaagtgatgccctggcagatacccttctccttaatttaacaaaaccggcgacagtcactttctttcagtttgccgtaaggattagtaaatgagtccattactgaacacactatcttaatcttggtgtttgatcacagaaaagtacgaagatctgagctcttctgacgagtcctgccctgctcctcagagacagaggccttgccggaagaagggtgtcagcatccacgagggaccgcgagccctggccaggatcacaggcattggcctgggcggcagagccccacggcctcgctatggtgagtggcccgcgtttcccgagggctctttctcattgcataccaggattttgtgttggcaagaatggaatagctcttaggctcctgaaatgtgggtcgctggacctcaggtggcagcgggacaggtggcccagctttcatgctcagggagactcaggattgagtcctgtgatggaaatgcattggtcacggactagctcttgttttttgctttatctcctggagtttccttttcgttggttaaatttaggaatagaactttctctcctgcagcagaaatgtagctaaggtcagatttcattcatcacataggtgggttggctcatacagggaggaggcaaagcgtgaagttcacttccctgccctgcccataccagctgggtcgggtgcgctgctgggggcaggaggccaagaaaacaggccctgctgttttctcagggcgatgaagttgtactcagaccctcctgagagagggcccgcttgttgacttgctggtgaagaatcctagcctttgggttttccagtctcgttcattctcagattcccagccccagggtgttgagcgttttgctcttggggagtgctggggtttctttttaggggagttgggtttggtgcctactctctattgctgtggtctgtcccagagctcagctggaggtgtgagttatgtcttcctttgatggctgtcacccactcatagccaggccaaggctgctggtctcacaggcctggtggctggtccttctcgggagcaaggcctctttgaggccaggacttggaagagtgagagtagacagtgtttcagccaggggtccaccagtaattgaattcccttctagaccccaggaacaagcagatgtgcagacttctgtcttcccaagcctgggtgctgggttgggaactggagacccaccttctcccatcatcctgggaagggtgagctgactgggccactgggaaggcctctctcgagctgctggccagccccaccacagcatgagggcccgcccgtgtcccgtccgctgagctgtgagcactggctctgggacaccgggctggtcgttctgagtggcagagtctcttccttccaaaaggtccctgccacctgctacagcctgaggtgtggtggggacaggaaggaagctgtcatcctggggctgagttggtaattaatctatatagctgtacaacaaatgctttaacaaaatcatacatgtctgaagccgcttgtgtgcggttctttgtatgtatccacagagaagtaatcatggtggtggtctcaggtgtggtatttcaggggatttttgttttctcataccttgtgaaatttaaattttctataagtgcatatattttatttgccagtaattaagaaatttggggccgggcgcagtggctcacgcctgtaatcccagcactttgggaggccgaggcaggtggatcaagagatccagaccatcctggccaacatggtgaaatcccatctttactaaaaatgcaaaaattagctgggcatggtagtacgtgcctataatcccagctactcgggaggctgaggcaggagaatcggttgaacccgggaggcggaggttgcagtgagccgagattgtgccactgcactccagtctggtgacagagcaagactccgtctcaaaaaaaaaaaaaaaaaattgggggggccaggtgcagtggcttatacctgtaatcccagcactttggaaggctgaggtaggaagattgcttgggctcaggagttgtgagaccagcctgggcaatgtagcaagaccctatctctacaaaaaattttgaaaattagccagatatggtggcccatgcctgtagccccagttacatgagaggctgaggtggaaggattgcttgagcccaggaggtcaaggctgtagtgacccatgatggtgccattgcattccagtctggataacacagcaagaccctgtctcaaaaacagtttagggggcaatgataaatagcatgtgctgattagaaaaacttctccataactaggaaaatacgtaaagaggaaagtaagttccccatggtcccatcaaccagtcctttgggttcttttttgagacagggtttcactgtagcccaggctggagtgcagtggcacgatcatagctcactgaaggctccagttcctgagctcaagcgatcctcctgtctcagcctcccaagtagctgagattacagacatgtgccaccgtgactggtcaagtcagtctttttatgtaaaggggcaaaactggagtgaaattgcctggtatacatgcccctttttctgcttggttttagaggcaggtagagttaggtaatttcatattattgttgttaatttttacctcaaggcctttttccttcctgctcagccaggtctctttttcgccggggttgactgaccagaggaggcccgctaagcgcctgtggttaaaggtcacagggacataaagacacgtggtcgatgggtgtctgtgtgaggtcattagctacctcctgctaaaaggaacactcatggtatagttttctctggtcaggcatctgtaaatacagctgaccatttgctacgttttccccttggaaaagaaatggagagggcccaggcttgacctggctgccagccctcgccccaccaggcacttgcttgggccactgactgaccctcagagcatcttttccacccacacaccacagatagagccatgccaggtcgcaggggcaagtaggtgaggtcatgactgggaagtcacctgcctccatcctgggcctcggcctctgaggaggtttcactttggagttccctgggcttatgggccccattctgtacacagagcaggctcctccccgtggctatgtcaccttcaacagcagtggcgagaaccccctggaagaagagggcctctgctgccgggatgtcacctcccccatcaatgagcgggatgtggagagcagcagcagcagcagcagtcggggtacgtgcacccccacccatccggcccgtggctcaggcaggtcctggagctcctgtgtgcccatccccacttatcccctgggcctggcgctggacacagccatccagcagaggacaggaaaggggtaggtgtggacggccctggttcttgtgaggaatgggagaagcttctggtccagcatccccgtgcggcttaagggagccgttccacagcaacaggtttagctccttgcttgggagcccctgaggctttcagggcaggccccagtaggaatgtctgttataactgcacctccgtgcagcagctgtttccatagtgcccaccgtgtgccaagcactgctccgggtgcttgggatttatcagtgaacaaaaaagacagaagccctgcccgtctgtatagaggggagggtttaggacaggcaggaagtttgaaatataaggaagcaaccgctgcaggccccaaggagtgccctggtggaggcggctcagcccggggcacgcccatgcgcagcacctcggtgagggctgcaggcggacgccctgtcttcccgccctcagaggaacatgctttctgtgccaacctggggcccgtccagagcagcagcagcagcgagggcctggccagagcccaggggctcagcagcgaagcttctgtggagagcaacgaggtacggattctttctttcttggtctcccatagccggtccctggctgggatgcctgacatcccccagttactttaagatgagcatgtatgtaagaagcagctgctgcacgtgtgtgctgcactgggacgtgctgtgtccagggtctggcttctcagacgacagcgaacgcaccggaagcccctgtgtggcgggtggggggtttcacgaagcctctcaagcccctgtgtggcgggtgggggtttcaccaaggctctcaagttagcccgcgcactctttcagatgcacgcctctcactgcaggactcggatcatgcctgtaaaagctcagctcgcaaacaagctaaaagttacatgaagaccaagaatcctgacagccagtggcctccccgcgctgcaactgacagggaaggctttctcgctgagtccagcccccagactcagagggccccctactcaggaccccaggtaagaccgcttgtgaaactggaggttacactcagagacggcactttttgtgacttaggaggcatgtgttgtgtatatgacgtgccaggcgctgctaggagaacagaatggcggtggcatccccatggcctgttaggctccacaggctcacagccggctccatggctggcagccccgctgcagcgcttctactctgttcctctccacggaaaggacctgtctccctgctttccatactggagttggcctccctgagcctggggagaagaaaagcacacttgacctcagagctgcctgcaggagtctgacaagatgtggttgaagcagagacaggaactacacacagtgtgtgcttggtgatggttacagctgccaccatcctcctcctttctgtggtccctctgaccacacattaccttagggatcagaggtgtgactcacagctcagctgtctcacctgtgtctgctgagttctcctaccctgtgtgggcagaagaggcacggagaggagaggcagagggaagctctggttggttatttggtttgtttgttcgagacggagtctcgcactgtcatctgggctggagtgcagtggcgcgatctcggctcactgcaacctcctcctcctgggttcaagcgattctcctgcctcagcctcccaagtagctgggattacaggcacccgccaccatgcccatctaattttttgtatttttagtagagacgggatttcactatgttggccaggctggtctcaaattcctgacatcgtgatccgcccgcctcgacctcccaaagtgctgggattacaggcgtgagccaccacacctggcctggtgccatgcccggcctggctggttatttgttaaagcactggctttgctgttcagtagagccttggatttgccggcttctccctgcagcccctggctcagtgagcaggcacacgtctcggtcccttcaacatacgttgagtggagtctggtcagggtagtgtcctaagtatgtttctttcagaaaatagcttgaagaaaatgtcagagtaacatttgtttgtccattaaaagcaataaactctcaaaagtaggatttctggagttgaaaagtaaatgaaatgaaaatatcactagacgagctcacagcagaattgagcaggcagaagagtcagacaacttgtgaacacaggtcacctgagatcatctcgcttgaggaacag

SEQ ID NO: 15401 - DNA, 30658 bp, Homo sapiens
tagatttgaataagaagaatggtggtggctggaccccgctgatgtatgcctcctacattggccacgacacaatcgtgcacctgctgcttgaggcgggggtgagtgtgaatgtgccgaccccagaagggcagactccactgatgctggcctccagctgtggcaacgagagcatcgcctactttcttctccaggtgagctacgagggaactcaggcccagaaacctgaggggctccgtggccaccctgacagagatgcgaaccactgcaggccacggtgttcgtgtgtgctcgtgtaatcacttctgattcttgcagcatggccgcctggagggcgcccgccccacgcagaggagatgaggccgtaacgcacgttctgtgttctcttgaagcaaggtgcagagctagaaatgaaagacatccagggctggacagccctcttccactgtaccagcgccgggcaccagcacatggtcaggttcctcttggacagtggagccaatgccaacgtgaggtgattgccacatctttagtggccacaggagtggcctaggtgtcatctgactctaaggagggtggctctggaggcagctaaccagagtttagggccaccctgcttcggcacgagaggctcaagatgaggggtaggaccagagtccttccaggcacaggccttttcgtacatctgtgagatgcatctcttcaagccctctcagcttccttttctttatctgaaacccacctgggtcatacagttgtaagaattacatgttttattgtatgccaggggcctaacatactgaatggcatttaaatgtcatacattacatgcaaattccttccattttcttgctttttgtatggatgaggtgaggtgatgctttgaaacagtcatgaggccgggcgtggtggctcacgcctgtgatcccagctctttgggaggccgaggtaggcagatcacgaggtcaggagatcgagaccatcctggctaacatggtgaaaccccatctctactaaaaatacgaaaaaattagctgggcatggtgacgggcgcctgtagtcccagctactcgggaggctgaggcaagagaatggtgtgaacccgggaggtggagcttgcagtgagccgagattgcaccactgcactccagcctgggtgacagagcaagactccatctcaaaaaaaaaaaaacaaaaacaacagtcatgagttttggccgggctcagtggctcacacctgtaatcctagcactctgggaggccaaggcgggcagatcatgaggtcaggagttcgagaccagtctggccaacatggtgaaaccccgtctctactaaaaatacaaaaattagctgggcgtggtggcaggtgcctgtaatcccagctactcgggagtctgaggcgggagaatcacttgaaaccagaaggcagaggttgcagtgaactgagagatcgtgccactgcactccagcctgagcaacaagagcaaaactctgtctcaaaaacaaacaaaaaaccagtcatgagttttataagttggaagtgggattgttgtctaaagcttgtcatgataataatcacctttgaacaaacgcagcgggtaccaatgcagcacccaccctggctgtcattcattctaagacacctgataattttgtatgccactaagaaagaaaaaatatgctactaattaacattcaactcgcctgttgatttaaagatgttttctgacttgagagatgttaaaatatgaacactgtgtgtcttaagatggatgaaaaccagcatttcccatgcatggttcctgacttccaaaccagcatgagacaaggagggatttggaagccctctgaagacagtgccgagttagcataaccaagcatgaaaagcaagcttcaggagctaagcgtggcaaagatagcttagatcattagtacttgaacttttcagagtgggttcatggaggacgttgaacttgaagccaggatttggatgaatggatgggagatgctggctttctgtgaggaattagaacagctttttgaatatgattgaggtggagatttcagaggtagccagtgggaatagccaacaggtgggacgacaggcagacatctgtctttaggacaaagaccagccctggggacagacaccagaagagtaaatggagctgatgtgttatattcactgttctcatgtcacctgttaattctggaaagggacagtgttctacgcttagggatcggtgactcgtgcactgctcagggtttatcttcagcagggagtttttgcctggcggaacttgtctcttccaatcatctgactgtggcccacatcttgcagggagccgatatgtggatttactcccttgatggaagcagctgctgctggccatgagataatcgtgcagtattttctgaatcacgtaagtgaccctgattattagcatgtaatgtagtcacggcaaatgaggaatcatattactgaagtataagctattacagaattttcctttgcacagaaataactttcattcatttattcaacacattttcattatctattgacgcccggtgttgagtggtgcttaggcattaaggatacagtggtgagtagaaatagacacctattcctgtaataattttgaaaatactatctgaaaattatggaaaaatattttaaaagtaaatagcactcataatcctgtcacttagaaaaattatatagaataagaaggcagagatcctcctctctttttcaacctccctgatgcccacttggtttgagaaagagctgccctaggacttttcctctgctgtggaaagatgtgtctgtaggcaagtgtgtgcacattgctttgtgttttgaacaaagtgggattctacgtatagtctgtaacttagagacatcttatagacatcttatctttgtacagtattccgtgtacaatctgcctcagttaatttaatgagtttcttattagtagaaacttagtttttaacattttgcaattataaacagtgttccgggaatatccttttacacatagctttaatacatttgcagttatttctgtatgttgtatttctgttttattttattaatttatttttttgagacatggtgttgccctgtatcccaggctggagttcagtggcgagatcgtggctcactgcagcttcagcctcctgggctcaagcgatcctcctgcctcagcccccaagtagctgggactacaggtgcatgctaccatgccccggctaattatttaattttttttttttggtagagttgggggtctcagtatgttgtgcaggctagtcttgaattcctgagctcaagcgatcacctcagcctcccaaagtgctgggatcacaggtgcaagcctgtccacacagaaccttgtacataaatattcatagcagtattattcataattgccaaaaagtagaaaaacccacaagtccatctactgaggaattgataaacaaaatatatatctgtatagcaggatattattcggccctacaaagtaatgcagtactgctgcatgctgcggcaggggtgaaccctgatgcgttaggctgggctgggtgcggtggcgcacgccggtaatcccaacactttgggaggctgaggccagagggtcgcttcagccctggagttggaggttgcagtgagctatgattgcgccgccacactccattctgggtcacagagtggatcctgcctcaaaaagaaaaagaaaaggaaaacattcggctcagtgaaagaagccagacacaacaggccacacactaggtgatttcactcataggaaatgtccagaataagcaaatacatagacagaaaatagatgagtggtttcctgggtcttggggaatgggaagattggggtgataaaaatgtgctaaaattgtttgtggtgatggttgaacaactgtgaatatacgagaagccgttgaattgtacattgtaagtgggtgacttgttggtatgtggattatatctttataaggctgttaaacccaatggggggaagtgcaggcggtcctgatgaattcccactaccaaggttgtctgttgtcctgcccaccagtcatagacaaaggtgtccattttctcttgtcctcaccagtcctgatgtcagtcaaccttttgtcaatctggcgggtgaattgtagcgtctcattttagtttgtccttgttagagtagttgaaatttttttctttttttttttttttggagacagaagtcttgtgctgtgtcgcccaggctggaaggctggagtgcagtggcgtgatctcggctcactgcaacctctacctcccaagttcaagcagttcttctgcctcagcctcccgagtagctgggactgcaggcacccgcccgcacacctggctaattttttgtattttagtagagatgaggtttcaccatgttgcccaggctgctcttgaactcctgaactcaggcaatccacccaccttagcctcccaaagtgctaggattacaggcataagccactgcgcccagccagttgaacatttttaaattgatttcttagccatttgtatttcttttttttttttttttttgagactgagtctcactcagtcgcccaggctggagtacagtggcatgatctcagctcactgcaacctccacctcccaggtttaagagattgtcctgcctcagcctcccgagtagctgggactaaaaatacaaaaaatcccggctaattttttgtatttttagtagagacaaggtttcaccgtgttagccaggatggtctcgatctcctgacctcatgatctgcccgccctggcctcccaaagtgctgggattacaggtgtgagccactgtgcccggctggccatttgtatttctcttacgagctgtctatgtttattgcccaattttctattggatagtttgtttttttctcacttattggtgggaatttcttaaatagtgaaaaattcacatggtatctctttttaacaaagaattttgggacacaacatgcacatggtacacatgcagaccagaaggtgggtgcaccgcaggcctgtcccccaccctgcctgcgtctccttggcaccctccccacgggcgactctgggaatacacccacacatgctcatggtcctgccccatgtgcagctgctcccatcttgcattttttaaaaaacttaatcatgaagatttttctatattggtgtataaagagacggggccaggtgcattgtctcgctcctgtaatcccagcactttgagaggccaaggcagacagatcacttgaggtcaggagtttgagaccagcttggccaaggtggtgaaacccgcctctaccaaaaatacaaaaatacaaaatacaggtggctgacgctgtaatcccagctacttgggaggctgagacaggagaatcacttgaacctgggaggcagaggttgcgatgagccaagatgttgccactgcactccagcctgggtgacagagtgagactatctctaaataaataaataaataaataaataaataaatcaataaatcaataaagagatggggtcttgctctgtccctcaggctggagtggagtggtgcagtctcagctcactgcagccttgacctcctggtctcaagtgatcctcctgcctcagcctcccaagtagctgggattacaggtgcgtgccaccacgcccagccaatttttgtattttttttgtagagatggggttttgccacgttgcccaggctggtcttgaactcctgagctcaggcagttcgcctgcctcggtctcccaaagtgctgggattacaggcacgagccaacgcacccagcccctctcttttttttttttttttgagatggcgtcttgctctgttgcccaggctagagtgcagtggcacgatctcggctcactgcaacctcagacttccgggttcacaccattctcctgcctcagcctcccgagtagctgggaccacaggcgcccgccaccatgcccagctaatttttcatatttttagtagagacggggtttcaccgcgttagccaggatggtctcgatctcctgacctcgtgatccgcccaccttggcctcccaaagtgctgggattacaggcgtgagccaccgtgcctggcctctcttttttttttttttttttatggtggcatggtattccctgtagggatgaatcagagtttttttgtttgtttgtttgtttgttttgagatggagtctcgctctgtagccctggctggagtgcagtggcgcaatctcggctcattgcaacctctgcctcccaggttcaagcgattctcctgcctcagcctcctgagtagctgggattacaggcgtgtgccaccacgcccagctaattttgtatttttagtagacagggtttcggcatgttggtcaggatggtcttgaactcctgacctcaagtgatctaccactttggcctcccaaagtgctgagattacaggcatgagccactgcgcctggcctaccgttgacatttcttacacgtctttttaagcacatatgggaatttcttcaggagcttaggatgtgttcttcaaagtagagtctttgttgtgtgaggtgggttcagtcggtagtgggtagtgtaaacttgctttgttccatagtggtcctggttcacacccctccccttagggtgttagacttcttttttttttttgagatggagtctctctctgtcacccaggctggagtgcagtggcgcgatctcggctcactgcaacctctgcctcccaggttcaagcgattttcctgcctcagcctcccgagtagctgggactgtaggcactcgccaccatgcccagctaatttttgtatttttagtagagacagggtttcaccatgttggccaggatggtctcaatctcttgaccttgtgacccgcccgccttggtcttccaaagtgctgggattacaggcgtgagccaccgtgcctggccttttttttttttttttttttggggtggggtcttgctctgtccccaaggctggagtacagtggtgtgatctcagctcagtgcaacttctgactcccaggctcaagcaattcgcctggctcagcctcccgagtagctgggattccaggtgtgtgccaccatatccagctaatttttgtatttttagtggagacagggtttcaccatgttggccaggctggtctcgaactcctgacctcatgatctgtctgcctcagcctcccaaagtgctgggattacaggcgtgagccactgtgcctggccaggatgttagactttttggctccctggccatttgggtttctttttctgcaaataattatttttgtattttttatttattttttttatatagggtcttgctttgtcaccacactagagtgcagtggcctgatcatgggtcattgtagtctcaacctcctgggctgaagtaatccttctgcctcagcctcctcagtagctgggactacaggcacgcactaccacgcctggctgttttttttttgtagagacaaaaatctcactatgttgcccaggctggtcttgaactcctggcctcaagcaatcttcccaccttggcctcccaaagtgctggagttacagacctgagccaccatgcccggccagataattctttgacagataatcctgctgacatgaactagacttccttaagacacatcatagaatcaatagcccagaaccataaagagcctctacttgtaagtttagagtcattttaagtaaggtagaactggagatcataagagatatgtactcttataatttttgattgtatgtttgtttctttttgagacagagtctcactctgtttgcccatgctggagcacagtggcgcgatcatagtttgttgcagcctcaacctcccaggttcaagggatccttgcaactcagcctcctgagtagctgagaccacaagcgcatgctatcacactagctgatttgatttttttgtagagttggggtctcactaagttgcttaggctggtctcaaactcctggctgcaagtggtcctcccaccttggcctcccaaagcgctgggattacaggcaggaaccacggtgcttggccaacaatttgcatgcctttaccacattccccaaatgttaacatttcacctcattttcttatcagtctctttatgtataacatgcatatgttttctgaatcatttaaatgtaaattgtgacataatgccccttttcccctaaatatgtatttcctgagagtaagaatttcattatgtatttcctaaaagcaaaaatgttctctttcccagtcacacaaaattatcagactcaggaactcaacactgagttcttcctccagcacttgacaagaatcaaagtgttggttagtgactgctttgggggatggggcaggactggcagcaggtggcccgatggcctgggtggtttgcctgccagcgatgctggtgggcaagccctgcctggaagctcctctctcccacgtttttcctgccgcccagtagttagaccacctggagccagaggagggggcccacccggtttcccagcctgtccctccagagctgggctccatttctggaggtagagaatggggcaagtctgggcatcttgtgctctttgctaggggaggaaagggctgtggctgctttccttgtcccccatttcccttctgccagtggggccaagccccagcagctcagtcaggagaagaggatatggatctgtctgggcctctctctttaagagaaagttgattcgtgccttccggatagtcttgttccagggtttctaaactttctgatcccaccttcatgttaaaatgagttttgatcatgtgtctctttagtaatatggacattataaaataggaaaaaaaagtctcttaaagcctaagtagttaaaaatttattttcacatcaggcatagtggctcatgccagtaatcccagcacttttagaggccaaagtgggaagatcgcttgaggctggagttggagaccagtctgggcaatacagtgagaccttgtctctaaattaaaaaaaaaaaaaaaaaaaaaattggccaggcatggtggctcatgcctgtaatcccagcactttgggatgccaaggcaggtggatcacctgaggtcaggagttcaagaccagcctggccaacatggtgaaaccccattagcggggcgtggtggcgtgcccctgtagtcccagctacttgggaggctgaggcgggagaatcacttgaacccggaaggcagaggttgcagtgagccgagattgcgccattgcactccagcctgggtgacagagtgagactccgtctcaaaaaaaaaaagccagttgtggtgtgtgtttgtaatcccagggaggctgagaagggaggatcacttgagctggggaggtcagggttgcaatgagccagtgtaatccagcgtgggccacagagtgagattctgcctcaaaaacaaaaccaaaaatatataacgagttaaaatcctacagtaaagaggctactgttttattctggttaaaccttagggttccttctatcaaacttaaactagaattttttttttttcttgagatggagtcgccctctgtcgcccaggctggagtgcagcagcttactgcaatctctgcctcccgtgttgaagcgattctcctgcctcagcctcccgagtagctgggattacaggtgtgtgccaccactcccagctaacttttgtgtttttagtagatacaggctggtctcaaactcctgaccaggctggttgttggccaggctggtctcaaactcctgacctcaagtgatccgcccacctcagcctccaaaagtgctgggattacaggtgtgagcctctgtgcccagccaagaaattattttttatttttgagatagagtcttgcttcgtctgttgcccaggctggtgtgcagtggcgtgatcttggctcattgcaacttccacctcctggactcaggcaattctccttcctcagcttcctgagtagctgggagtacagacgtgtgccaccacgcccggctaatttttgtatttttagtagagatggggttttaccacgttttcccacattggccaggctggtcttgaactcctgacctcaggtgatccacccgtctcggcctaccaaagtgctgggattacaggcttgagccaccgtgcccagcttataaattattgttattatttattattatttttttgagatggaatctcagtctgtcgtcgaggctgtagtgcagtggcgcgatctcagctcactgcaacctccgcctcctggattcaaggatttctcctccctcagcctcctgagtagctgggatacaggcacgcaccaccacacctggctaatttttgtattttttagtagagacggggtttcaccacattgcccaggctggtctcgaactcatgacctatgatccacccaccttggtcccccaaagtgctgggattacaggcgtgagccactgtgcccggcctataaattattttttaaggcacaaagtctcataggtaatttttaatcagagtcaaaagtaggatggggggcactctagaaagtaaaactccttatactttgtgaaaacacagttttttgtcctgtatccctgcccagagaccacctctgcctcccccaccaactacatatgggggtcaaggttgaggccccctggtctaacgggagagacagttgccgtatgggtggtagcaaaactccttaagggttgtgatttttttttttttttttttttttgagttggagtctccgtgtgtcgcccaggctggagtccagtggtgcgatcttggctcactgcaacctccacctcctgggttcaagcgattctcctgcctcagccccccggagtagctgggactgcaggtgcccaccaccacgcccggctaatttctttttgtatttgtagtagagatgaggattcaccctgttggccaggctggtatggaactcctgaccttgtgctccgtccacctcggcctcccaaagtgctgggattacaggcatgagccacggcgcctggctgtgccttttttctcttaatgatgttttgtgcaccctagtccgtgtcaccgcaggtactcccacccaccacgtaaatgggcgggaggcgctctgttttctggatatgctctcacgtagctcattaatctcttattttaagttccttctgattctcactatgctgaatgccacagtgaaaattctaaattgtagtgtatgtcctgcattatttccttaggcgccgctgcacttcagcctgggtaacagagcaagatcctattaaaaaaaaaaaagcaaacatgcttatggtagtacattttaaaaacatagaagattggaaaattggaaaaatccccatcaaaaatagtaaataacttaaaaatagcaacattttgggtatgttaccttccaatattgttttctgtgtaatttttttggtctcattttgccggagttgtaatgtatatgtagttttgtatcatgatccttttttatttttttgagacaaggtctcgctctattgcccaggctggagtacagtggtgcgatctcagctcgctgcagcgtcaagctctgggacttaagtgatcctcctgcctcagcctcctgagtagctgggactacaggcatgtgccgccacaccctgctaattttttattaaagatgctccccctttccggggtcccgcctcctcctctgagctttggctctggcttccctgcctcccccagctgcctggtctgacaggagagaaggacagttacagtgtacagtgacaccaaaaacatgctgtattgattatagtttatttttttttcttgtagaggtgggttcatgctgtgttgcccaggttgttgtccaactcctgagccgagcgatccacctgccttggcctgtcaaatgctgggattacaggcatgagccacctcacttggccatgatcctttttcaacttgatcatacagctgtttgtaaatatcaccatctatggcaataacagaactgactgcttatccccctgagcattcaagttttctctaggtaggttttcattattgtgaatatgctgtgccaaacatcctttttttttttttttttttttttttgagacagagtctcactctgtcttcaggctggagtgcagtggcatgatctcagctcactgcagcctccgcttcccgggttcaagcaattctcctgcctcagcctcccgagtagctgagactataggcgttcaccaccacgcccggctaatttttgtatttttagtagagacggggtttcaccatgttggccaggatggtctcaatctcctgacctcgtgatctgcccacctcggcctcccaaagtgctgggattacaggcatgagccaccgcacccggcctgtgccaaacatctttgtgcactaaagccttttctgtatttagggttatttccttagggtcatggaagtggaattgttgcgctgcaagacctgtaaatacattatagagctttggatcaaagttacgaattctgcttcagaggatggtgctttcattctgactggtttaaaaggctgctttctttgaagacaagcgaagtgagtgggacacagcccaggcgcagaaggtgaaggctgggatctccgcatggtggctgccagccccctgcaagggaggtcatgagcgtgggagatgactccccagcccccagccctcctcatccttgtccctaagaagagagtgagagcaaaacttgtggctgcggtgcagacaagcctgcctctttctcatgcagatgtgatgtttcccacacagggaggcagtcagaaaccagcatatgcccttctgtcttcccagccagcagcccaggaagggcaggtgctttgaaggagaggcccctaaccccctttcacggacattcacagggagtcaaggtggacgcgagagaccacagtggagccacagcccggatgctggccaagcagtacggacacatgaagatcgtggccttgatggacacttactcgccctctctgcccaagagcctctatcggagcccaggtacccacacctgccagccgcgccctgctggggtctctggttgccttgagctttaggtgacctggcagagaaagatgtcccccgcttccccggctcccaccttctctgagatttggctctgcctcccccagctgcttacatgtcaaggttgaggcccctgctctaacaggagataaggatggttacgatggagagtggtacaaaaccaggctgttgtgaatgtagaggctttctgtagtatgcttgactaccgagtaggggcaggcccctcttagttttctgttttcactgtttcctgagctatggcttgttcattcttctatatgaacttgaatatcaacttgtctagctccttaaaaacagtattgatatttttactgagattgtgacaatgtataaattaactatatctttgtgttgttgtcttatccaagaacaagggatgacttcttgttccaatgtacttttgggtcttgcaggagggttttaaatttttcttcatctacattttgcatgtgacttaagtttattcctaagtgtttgatcatctttgtcgctattgtaaatggggttttccctatcattatatcctttttttccccccaactctcagggtattaattattcagtgctatttattttttatttcagtaggtttttggagaacaggtggtggttggatacgtgaataagtcctttagtggtgtcattatatcgtttcactgcatattgtcagtgcatttgaaggcagtggatttctgcaaacttttgttttttttttgatacgggagtttcgctcttgttgctcaggctggagtgcaatgaagcgatcttgcctcaccgcaacctcttcctcccaggttcaagcaattttgcctcagcctcccaggtagctgggattacaggcgtgcaccaccatgcccggctaattttttgtattttcagtagagatggggtttctccatgttggtcaggctggtctagaactcgcaacctcaggtgatccacccatctcagcctcccaaagtgctgggattacaggtgtgagccactgcactcagccctgcaaactaattttatattctgctaccttacagaattcttacattgttcaggttagttttgttattgattctttagggctttacaggtgtactaacatataatctttaagtatcgatggatacactgcttcctgctgattctcatgactctgactttgttgaattgcaccgttcttttgtttagttgctaacacctctagctcattgttcaacatagtggagatagtgagcctccttaccttggtcctgatcttagtggaaatgccacgttacatgagaggctgactgtaaaagggaaggcatatgttattttagcttattaacaaagtattcctcagttcttctattcctgagtggtgttttacaggagtaactattgaattgtgttcccatatctttggagacgatggtgaattttcatatggtagattgtcttcatgaacctcctaataatgaatcaaccttacattcttggcataaatcccacatgttgtactattttaatgtgtttttgaattctgtttattaatatttagtatttttctatggatattcagtcataagtgatactggtctatagttttctttcttctttttttttgtttttgaaatggagtcttgctctgttgcccaggctggactggagtggcgagatctcagctcactgcaacctccgcaacctccgcctcctgagttcaagcaattcttctgcctcagcctcccgagtagctgggatcacaggcgtgcaccactacacccagctaatttttgtatttttagtagagacggggtttcaccatgttggccaggctggtctcgaactcctgatctccagtgatccgcctgcctcagcctcccaaagtgctgggattacaggcgtgagccaccgctcccggcgtggtctatacttttctatttttgttctgtctatcaggtatgggtatcagtgtttacttcataaaaataatttggaagttttccttccttttttgtgttctaggacaatacacgtagcattagtgctacctggtcttagaagttttgatagaatcctcccatgaaaccatctggtctctttctgtgaggtggttcctcgataacagtttttctatttcttctatagagattggcctcctcatactttcttttcttatggggtcagttttggtaaattatattttcctgagagatcacttcatctaggatttcagacttatctgcagaggtctacaagataatattttctccctttttttttttttttttttgagacagagtttcactcttgttccccaggctggagtgcagtggctcgatcttgactcaccgcaacctctgcctcccgggttcaagtgattctcctgcctcagcgtcccaagtagatgggattacaggcatgcgctaccatgcctggataattttatgtttttagtagagacagggtttctccatgttggccgggctggtctcaaactcccgacctcaggtggtctgcccacctgggcctcccaaagtactgggattataggtgtgagccaccgcacccggccaatttttttctccttttaaaatattctgtttcagggccaggcgcggtggcttatgcctataatctcagcactttggaaggccgagttgggcggatcacctgaggtcgggagttcgagaccagcctgatcagtatggagaaaccccatctctactaaaaatataaaattagctgggcgtagtggtgcatgcctgtaatcccagctactcgggaggctgaggtgggagaatcccttgaacccgggaggcagaggttgaggtgagccgagatcgtgccattgcagtccagcctaggcaacaagagcgaaactctgtctcaaaaaaaaaaaaaaaaaaaaaattctgtttcaggctgggtgcagtggctcatgcctgtaatctcagcactttgggaggctgaggcgtgtggatcacttgaggtcaggagttcaagaccagcctggccaacatggtgaaaccccgtctccactaaaaatacaaaaataagccaatgtggtggtgtgcgccagctactctggaggctgaggcaggagaatcacttgaacccgggagggggagattgcagtaagccaaaatcacgccactgcactccagcttggcgacagagcgagactccatctcaaagaaaagtaaatagataaaataaaacaaaataaaatactctgtttcagtggttattttctcctgttattatctttttttggcatggaaaatattgatttattttttgtgacagggtcttgctttgtcacccaggctggagtccagtgacccaatctcgactcaatgcaacctccgcctcccaggctcaaaacgatccttctacctcagctctacgagtagctaggactgtaggtgcaccctaccacgcccagcttacgtttgtattttttgtagagaggtggttttgccatgttgaccaggctggtctcaagagtcctgagctcaagcaatccacccgcctcagcctcccaaagtgctgggactacaggcatgagctactgcacctgacctggaaaatatttatctcatttttaattgacacaaaataactacatatttatggggtacagtgtgtgatgttttgatacatgtatacactgtgtaatgatcaaattaaggtgattagcttatccatcacctcaaacatttatcatttcgaggtgagaacatttaaaatcatgtcttctagtagctattttgaggtataagctgttgttccgtatagtcactctactgtgaacaccagaacttctttcttcgatctgtaattttacacctattgaccaatctctcccactacctccccacccccaacctctgataatcactattctactctacatgtttgacatgagcttttaaaaatcctgtaaatgggtgacatcatgtagtcatgtagtcttttttgttgtttgtttggtttttgagacaggttctcgctttgtcacccaggctggagtgtggtggcataatcttggctcactgcagcctccaattcctgggctcaagtgatcctcctatctcagcctcccgagtagctggcactacaggcacctaccaccacacctggctaatgttttatttttttgtagagacggggtcttgctatactgaccaggttggttttgaactcctgggctcaagtgatcctctcgccttggcctcccagagtgttgggattacaagtgtgagtcaccacaacagctggcatttgtctttcttttctatgtctggcttattttactgaacatagtctcttccaggcttattcatgttgccacaaatgatcagatttcattctttatgtctgaataatattcaattgtgtatataaactcattttctgtcttcgttcatccactgatggacacaggttgattctctatctaggctactgtgaatactgcggcagtaaacatgagggtgtagacatctctttggtatactgatttcctttcttttggataaatacccagtagtggaattgctggatctcatttcttatattttttaatttttttttttttttgagatggagtttcgctcttgtttcctaggctggagtgcaatggcacgatcttggctcactgcaacctccacctcccgggttcaagcgattctcctgcctcagcctccctagtagctgggattacaggcatgtgccaccacgtctggctaattttgcatttttgggagagacagggtttctccatgttggtcagggtggtctcgaactcccgacataaggtggtccacccgactcggcctcccaaagtgctgggattacaggcatgaaccgctgcacccggcaaaaatttcttctattaaaaaaaatagagacagtgtctcagtatgttgcccaggctggtctcaaactcctgggcccaagcgatcctcccacctcagtctcccacagtgctgagattataggcatgagccactgcgcccggcctcacttcttattttgaatatttgtgtttgttctttttttttttttgagacagagtctcgctctgttgcccaggctggagtgcagtggcgcgatctcggctcactgcaacccccgcctcccaggttcaagcgattctcctgcctcagccttttgagtagctgggactacagggtgcccaccaccacacctggctaattttttttttgtatttttagtagagacagggtttcactgtgttagccaggatggtctcgatctcctcacctcgtgatctgcccacctcggcctcccaaactgctagaattacaggtgtgagccaccgtgcgcagcctcttcctttttttcttaagttaaatactagtactttgtctgtttagtggaaaaacaagaaaaacccatcggattttgatttattaatgagacctactgattgtctgtttaatttctgcttttatttttatttggcttactttgttgttctagttttttgagttggaaacttctttcattttcattgttgcccttttgttgctaaatgttagaggctgtgaatttttgctgattgctgctttaagtgtattctgggggttctgtatttaatactttccttgttatttttagaaattctgtaatttttatttatattttctccttcacccaggagttgtctaatagaagtattatgattgtttttgtttgttaatttctagatggaagggcctttttgatcttgcaattaatttctcatgttattctgattaactttaatgtgtctgatcagagagtgtttataattcttacatttacataacttccttgtcatcttatttatcatctactgatctatctatatatatatatatttttttcagatgtagtctcactctgtcacccaggctggagtgcccaagtgcgatcttgactcactgcaacctctgcctcccaggttcaagcgactctcctgcctcagcctcccgagtagttgggattccaggcatctgccaccacgcctggctcatttttttttgtatttttagtagggacagggtttcaccatgttggccaggttggtcttgaagtcctgacctcaagtgatccgcccacctcggcctcccaaagtgctgggattacaggcgtgagccaccgcgcccggccctgatcaatattttttagtgttccgtgttttgcttgagaagttgtattctctattatctgtatacagtttagcatatctgtgagtctatcttatttaggattatgtactcttagttcattttctacaaaattacctattagcgtgtttctgatttatgaaggaagttggtgcattttttggtgacagattttcataacttgttatagattcactgtgaattatggcttttagtattagaagtgtccttctggctgggcatggcccatacctgtaatccgagcactttgggaggccaaggcgggcagatcccctgaggtcaggagttcgagaccagtccagcctacatggtgaaaccttgtctctactcaaaatacacaaattagccaggcatggtggcacatacttacaatcccagctactcgggaggctgaggcaggagaatcacttgaacccgggaggcggaggttacaatgagccgagattgtgccactgcactccagcctaggtgacggagtgaaactctgtttcaaaaaaaaaaaaaaaaaagtgtccttccgtgtcatatttaatgtgttttgccctgaattccacgttgatagcaggattgcagccctggctcttttgtggtttccatctgcctgttctttttaagctgctctgagggtgtgttgggtgctgagattcacgcagctgccgttcccttgcttattgctgcctctttgcatttgtcttacagctccctccccttcagcttggatggaagcacagtctccctggagtgctatagatctttgagtgtgaggaggtgtgtgtccatatggctagctcagtcgccagagcttgagcctcgtcatggggaaggacagagtggcccacgttcagggcctgagctctccctctttgctggcctgccctgagttgtcctgtcagtttgcacctgagcgagcagctcctttctcagtgtcaggctcagcccagcctcttccctggcattgggattgtttcataataaacacagctcaggtggtaatgcaaaggacctttcccttcatttctgccccagcttacccactccacaaggagatctcatcatttcctcctgtatacaactcacgtatctcttaaaagtagaatcagatcagagccttatacaaatcaaatatgaaaaactgaaaagctacaaaataataaaagctctggtttgagctctgaaagctcagactgggaagtgatttgaaacagtttataatcatagcaaacacatgccatgctttagaaaatacaaaattgtggctgggcgctgtggctcactcctgtgatgccagcactttgtgggaggccaaggtgggcggatcacaaggtcaggagatcgagaccagcctggccaacatggtgaaaccccgtctctactaaaaatacaaaaacaagattagctgggcatggtggccgggtgcctgtagtcccagctacttgggagcctgaggcaggagagtggcgtgaacccaggaggtggagcttgcagtgagccgtgatcgcaccattgcactcctgcctgggtgacagagcaagactccgtctcaaaaaaataaagaaaaaaaaaagaaaatacagaattgcttaataagttgtttccagccgggcacagtggtaacgtgcctataatcccagcactttgcgaggctgaggtgggtggatcacctgaggtcaggagttcaagaccagcctaatatgatgaaaccccatctctactaaaatataaaaattagctgggtatggtggcatctgcctataattcccaactactcgggaggctgagataggagaattgcttgaacccaggaggcggaagttccagcctgggcagcaagagcaaaactccttctcaaaagaaaaaaaaaaaagttgtttccaaaggaagggattaggaaaaagtagttgtgacttatattaccatatattttaatgaagagatgggttttacttattcaaattagaacagaatttctgattatgaacaatacagacttatgaacaatttggcaaaccccaacagagataataaactcctggctgggcatggtggctcatgcctgtaatcccagcactttgggaggccaaggcaggcagatcaggagtttgagaccagcctggccaacatggcaaaagcctgtgtctactgaaaaagaaaagaaaaaaaacactgggcatggtggcacgcatctgtaaccgcagctacttggaagggtgaggcgtgagaatcgctagaacccaggaggcggaggttgcagtgagtgagccaagatcatgccattacacttcagctcgggggacagagtgagactctgtctcaagaaaaatgaaacttcccatcctcactaactttgcagctccctgtggcccattggagcagcgccccggcctgttagggcatttctcagaagtgatgccctggcagatacccttctccttaatttaacaaaaccggcgacagtcactttctttcagtttgccgtaaggattagtaaatgagtccattactgaacacactatcttaatcttggtgtttgatcacagaaaagtacgaagatctgagctcttctgacgagtcctgccctgctcctcagagacagaggccttgccggaagaagggtgtcagcatccacgagggaccgcgagccctggccaggatcacaggcattggcctgggcggcagagccccacggcctcgctatggtgagtggcccgcgtttcccgagggctctttctcattgcataccaggattttgtgttggcaagaatggaatagctcttaggctcctgaaatgtgggtcgctggacctcaggtggcagcgggacaggtggcccagctttcatgctcagggagactcaggattgagtcctgtgatggaaatgcattggtcacggactagctcttgttttttgctttatctcctggagtttccttttcgttggttaaatttaggaatagaactttctctcctgcagcagaaatgtagctaaggtcagatttcattcatcacataggtgggttggctcatacagggaggaggcaaagcgtgaagttcacttccctgccctgcccataccagctgggtcgggtgcgctgctgggggcaggaggccaagaaaacaggccctgctgttttctcagggcgatgaagttgtactcagaccctcctgagagagggcccgcttgttgacttgctggtgaagaatcctagcctttgggttttccagtctcgttcattctcagattcccagccccagggtgttgagcgttttgctcttggggagtgctggggtttctttttaggggagttgggtttggtgcctactctctattgctgtggtctgtcccagagctcagctggaggtgtgagttatgtcttcctttgatggctgtcacccactcatagccaggccaaggctgctggtctcacaggcctggtggctggtccttctcgggagcaaggcctctttgaggccaggacttggaagagtgagagtagacagtgtttcagccaggggtccaccagtaattgaattcccttctagaccccaggaacaagcagatgtgcagacttctgtcttcccaagcctgggtgctgggttgggaactggagacccaccttctcccatcatcctgggaagggtgagctgactgggccactgggaaggcctctctcgagctgctggccagccccaccacagcatgagggcccgcccgtgtcccgtccgctgagctgtgagcactggctctgggacaccgggctggtcgttctgagtggcagagtctcttccttccaaaaggtccctgccacctgctacagcctgaggtgtggtggggacaggaaggaagctgtcatcctggggctgagttggtaattaatctatatagctgtacaacaaatgctttaacaaaatcatacatgtctgaagccgcttgtgtgcggttctttgtatgtatccacagagaagtaatcatggtggtggtctcaggtgtggtatttcaggggatttttgttttctcataccttgtgaaatttaaattttctataagtgcatatattttatttgccagtaattaagaaatttggggccgggcgcagtggctcacgcctgtaatcccagcactttgggaggccgaggcaggtggatcaagagatccagaccatcctggccaacatggtgaaatcccatctttactaaaaatgcaaaaattagctgggcatggtagtacgtgcctataatcccagctactcgggaggctgaggcaggagaatcggttgaacccgggaggcggaggttgcagtgagccgagattgtgccactgcactccagtctggtgacagagcaagactccgtctcaaaaaaaaaaaaaaaaaattgggggggccaggtgcagtggcttatacctgtaatcccagcactttggaaggctgaggtaggaagattgcttgggctcaggagttgtgagaccagcctgggcaatgtagcaagaccctatctctacaaaaaattttgaaaattagccagatatggtggcccatgcctgtagccccagttacatgagaggctgaggtggaaggattgcttgagcccaggaggtcaaggctgtagtgacccatgatggtgccattgcattccagtctggataacacagcaagaccctgtctcaaaaacagtttagggggcaatgataaatagcatgtgctgattagaaaaacttctccataactaggaaaatacgtaaagaggaaagtaagttccccatggtcccatcaaccagtcctttgggttcttttttgagacagggtttcactgtagcccaggctggagtgcagtggcacgatcatagctcactgaaggctccagttcctgagctcaagcgatcctcctgtctcagcctcccaagtagctgagattacagacatgtgccaccgtgactggtcaagtcagtctttttatgtaaaggggcaaaactggagtgaaattgcctggtatacatgcccctttttctgcttggttttagaggcaggtagagttaggtaatttcatattattgttgttaatttttacctcaaggcctttttccttcctgctcagccaggtctctttttcgccggggttgactgaccagaggaggcccgctaagcgcctgtggttaaaggtcacagggacataaagacacgtggtcgatgggtgtctgtgtgaggtcattagctacctcctgctaaaaggaacactcatggtatagttttctctggtcaggcatctgtaaatacagctgaccatttgctacgttttccccttggaaaagaaatggagagggcccaggcttgacctggctgccagccctcgccccaccaggcacttgcttgggccactgactgaccctcagagcatcttttccacccacacaccacagatagagccatgccaggtcgcaggggcaagtaggtgaggtcatgactgggaagtcacctgcctccatcctgggcctcggcctctgaggaggtttcactttggagttccctgggcttatgggccccattctgtacacagagcaggctcctccccgtggctatgtcaccttcaacagcagtggcgagaaccccctggaagaagagggcctctgctgccgggatgtcacctcccccatcaatgagcgggatgtggagagcagcagcagcagcagcagtcggggtacgtgcacccccacccatccggcccgtggctcaggcaggtcctggagctcctgtgtgcccatccccacttatcccctgggcctggcgctggacacagccatccagcagaggacaggaaaggggtaggtgtggacggccctggttcttgtgaggaatgggagaagcttctggtccagcatccccgtgcggcttaagggagccgttccacagcaacaggtttagctccttgcttgggagcccctgaggctttcagggcaggccccagtaggaatgtctgttataactgcacctccgtgcagcagctgtttccatagtgcccaccgtgtgccaagcactgctccgggtgcttgggatttatcagtgaacaaaaaagacagaagccctgcccgtctgtatagaggggagggtttaggacaggcaggaagtttgaaatataaggaagcaaccgctgcaggccccaaggagtgccctggtggaggcggctcagcccggggcacgcccatgcgcagcacctcggtgagggctgcaggcggacgccctgtcttcccgccctcagaggaacatgctttctgtgccaacctggggcccgtccagagcagcagcagcagcgagggcctggccagagcccaggggctcagcagcgaagcttctgtggagagcaacgaggtacggattctttctttcttggtctcccatagccggtccctggctgggatgcctgacatcccccagttactttaagatgagcatgtatgtaagaagcagctgctgcacgtgtgtgctgcactgggacgtgctgtgtccagggtctggcttctcagacgacagcgaacgcaccggaagcccctgtgtggcgggtggggggtttcacgaagcctctcaagcccctgtgtggcgggtgggggtttcaccaaggctctcaagttagcccgcgcactctttcagatgcacgcctctcactgcaggactcggatcatgcctgtaaaagctcagctcgcaaacaagctaaaagttacatgaagaccaagaatcctgacagccagtggcctccccgcgctgcaactgacagggaaggctttctcgctgagtccagcccccagactcagagggccccctactcaggaccccaggtaagaccgcttgtgaaactggaggttacactcagagacggcactttttgtgacttaggaggcatgtgttgtgtatatgacgtgccaggcgctgctaggagaacagaatggcggtggcatccccatggcctgttaggctccacaggctcacagccggctccatggctggcagccccgctgcagcgcttctactctgttcctctccacggaaaggacctgtctccctgctttccatactggagttggcctccctgagcctggggagaagaaaagcacacttgacctcagagctgcctgcaggagtctgacaagatgtggttgaagcagagacaggaactacacacagtgtgtgcttggtgatggttacagctgccaccatcctcctcctttctgtggtccctctgaccacacattaccttagggatcagaggtgtgactcacagctcagctgtctcacctgtgtctgctgagttctcctaccctgtgtgggcagaagaggcacggagaggagaggcagagggaagctctggttggttatttggtttgtttgttcgagacggagtctcgcactgtcatctgggctggagtgcagtggcgcgatctcggctcactgcaacctcctcctcctgggttcaagcgattctcctgcctcagcctcccaagtagctgggattacaggcacccgccaccatgcccatctaattttttgtatttttagtagagacgggatttcactatgttggccaggctggtctcaaattcctgacatcgtgatccgcccgcctcgacctcccaaagtgctgggattacaggcgtgagccaccacacctggcctggtgccatgcccggcctggctggttatttgttaaagcactggctttgctgttcagtagagccttggatttgccggcttctccctgcagcccctggctcagtgagcaggcacacgtctcggtcccttcaacatacgttgagtggagtctggtcagggtagtgtcctaagtatgtttctttcagaaaatagcttgaagaaaatgtcagagtaacatttgtttgtccattaaaagcaataaactctcaaaagtaggatttctggagttgaaaagtaaatgaaatgaaaatatcactagacgagctcacagcagaattgagcaggcagaagagtcagacaacttgtgaacacaggtcacctgagatcatctcgcttgaggaacagaaagaatgagtaaaaaaaattaacagaaatctgtgatcccctcaagcacaccgacaccaccccatacagtggcattccagaaggagagcagaaacgatgggtgagaaacagcctgaccatctcagtggatcagaaacacggatcttacatccagggagctcggtgaactccagacaggtgaactcggagaagagctgcgcttagacaagtggaaatcagaacatccgacactgagactctagaattagagggcagcgctctccgcctacaaagcattgtcgagatcagcagctccatggtcccttcacagaactgagcatgtgtgggaggaggaggccagtttctggtgatgaacatacattgtccccacgtggccgaccatagtgtgaggactcacctgcctgcaacatcctgccctgcctgagccaccagagtaggaggggacagcctgggcgccacacacaaggcactgtcttggttctgagcctggggaagtggtggggctccgagtggaggaaaacgtctctgcttcgtcgtcagccactacctcccccaacctgtcccctgtgcctgccaggaccttgccgcactgctggagcagatcgggtgtctgaagtacctgcaggtgtttgaggagcaggacgtggacctccgcatctttctgaccctcactgagagcgacctgaaggaaattggcatcacgtgcgtccagaagggccgctctggccctcagcccggggttggggcaaactcccactcatgtaagcgctcttgggacgctgaggcatatcctggtcacattccccccgcaggctgtttgggcccaagaggaagatgacgtccgccattgcccgctggcacagcagtgcccgcccacccggggatgccctggagctggcctacgccgaccggctggaggctgagatgcaggagctcgccatccagctgcacaaggtgagtggctgggtgggggatgggggggcagggtgacacccgtgagttggctccatctctgacagaaaaggtgggtgctgtgtggaggggtcaggtggatgcagtggggagagggccccacacacaggacagggccgtggccaagggtctggcttgaccggccacctcccagcctccccgcgccccccacccccctgcagcgctgcgaggaggtagaggccacgcggggccaggtgtgtcaggagcaggagctgcgcgccgtggtggagagctgcctgctggagcaggaccgcgcccgcgaggacctccaggcccggctgcgggagacgtgggccctggcccgggatgctgccctcgtcctggaccagctgcggtgagtggctctgagctgccctgggctgggtctccagtggtcagccacctggcccctgggcccccacacatcctttcctcctgattttgtaactgaggggtggatttcagggtctggagccaccccacccccatttcatcaggcccttccttcctgcaggcagacccaggcaggagttgggtccgggaatctgcaccggtcgccctcctgctctttagtgcagcctcatggggcactggcccagcccatgagggccagctgcaaggacagggctgagcccctccctcccctagaaggtctgaggtgggggctctgcagcggccaggcctctgctctcaccaatatttgtttctgtgtctggcagagcctgtcaagctgagctgtcatctcgagtgaggcaggaccagccccctggtgcagccactctgggcctagccgtccccccagctggtaagagcagtggcctgactccgcactgggcagaggggaaggtgggggagccctgaagccaggtttgacccagtgggcttggcctggttctccggccggcagccactctcccaggtccctgtgtgcacatgatcccagagtccaaggaaaagagggggccctggggacccaagcccacttcctcacctgtgacaggaaaactgcctatcccccaggggtaggaggtactcgagaaaggccctgtgccttggctggctgtgctgtgctgagaccgccagtgacttctgtagcctccagccagggcccagacccgggtccccaccggcagagctttgccttctctcgggctgacccgggcctcgtagtgtttgctcagcctgtgggaggaagggcacaacagggcttccctgcctcggccttgggaggttgcttagacactgtcaggcgggtagggaggttctgatccaagcaggttctcctggttgcatgggctcagaataaagcagggcctgtggggacgcagacccccagctaactcggtccctgcacctgcaccacagactccaagggctggcaagcgtccctgcaggccatgagcctccccgagctctcgggagccctggaggaccgtgtccgtgagatgggtgagtctccggggaccagacgactgagcgctccttttgtttccgagggaggcaaagggacccctttccagggaaagcgggtttgtgtctctctaccccaaggctgacctcggggctggggccataacgggtgaggggcaggtcacatcctgcagctgagaccccggggcagcaccacccagccctcctgagcctggccgggagaggctcaaggtcatcattcctcagggcaagcactgtgcttagtgacccagagcctggagaagctgcaggtgctgaacgggaagaagtggcgggagacctagcctgcgggccggtgagtgtctgccagcctggatcccgcgtggtgggagcagcagggcctgtctgggcggctgcaggtgtgggtatgcacccacctgtccccctcccttctcaccggggctttttctttcagaatctgacgttgggtgattggtccaccctgaagctgtgtgccagggagtgaggaggacagtgagcaggtagctgccatgtgcagcccaggcccagtgggggccagaggatcaggccccgggagcagccggcagacagaggcaagacgggggctgcggccctggctcggcagctcgggccagcactgaggcgggacgagggcctcacccagaacctcgtggtgaggcccagagttcatgggctgccctggcccataccaggcagggccctggggggaaagtgtatccatatacacgcacaggtgccaactgaggtgggaccttaggaatgaggactggggcacctggaaaatgccattttttggaaaataaaatttaagaacagct

SEQ ID NO: 15402 - DNA, 31567 bp, Homo sapiens
gcgagactctgtctcaaaaaaacaacaaaaaagtgaatcccgtaaaagggacagatcctggggttcagtcaccagttgttatcccctctgcaggcaagaactggggaagggaaagaaggcctgtgggcgttaaccatgtaggatcccaggtaaccatgcaagtgggtattattttaaatgtgactcccttgtcccaaccccagagtcgcagctaggaagcccacagttttttcccatgggaaaatgcattgccagaattttaacagcaatcagtgagaaagatgggattctttggtcacagatttttcaagaatgtttctttaaggtgaggtgacaaaggatgaatcagtggcggtgggacttgtccacggtggagtcccttctttcctcactgctcctctccacccagcagtgggctagtagatgccaggcctgtggtggtcagggtttttcaactgtggctgtgttgacaatccaggctggatcattctttgctgtgggggctgtcctggacactgtgggatgtttagcggcagccttggcctccagcagcccttccctgcccagttgtgagaaccaaaaatgccttcacacattgccacatattccctggttgagtgccatctgcctatctggtggtgtgaaagagcatagctggccttgggctaggaggatgcgaaatcagagcaaggagacgaaggctcagggcctcacaaggcagtgtacgagcaactgtcagcatttttctgcctgcctgcctccaatccccacaacgtccagggtggcagataacttctgcttcctgtcaactcatcccgcctggcctagcctcgccaccagctttggtgaaccccacatgcgaggcggctggccatgtctagcatatcttgcgtttgtttaggagagagttagatttgaataagaagaatggtggtggctggaccccgctgatgtatgcctcctacattggccacgacacaatcgtgcacctgctgcttgaggcgggggtgagtgtgaatgtgccgaccccagaagggcagactccactgatgctggcctccagctgtggcaacgagagcatcgcctactttcttctccaggtgagctacgagggaactcaggcccagaaacctgaggggctccgtggccaccctgacagagatgcgaaccactgcaggccacggtgttcgtgtgtgctcgtgtaatcacttctgattcttgcagcatggccgcctggagggcgcccgccccacgcagaggagatgaggccgtaacgcacgttctgtgttctcttgaagcaaggtgcagagctagaaatgaaagacatccagggctggacagccctcttccactgtaccagcgccgggcaccagcacatggtcaggttcctcttggacagtggagccaatgccaacgtgaggtgattgccacatctttagtggccacaggagtggcctaggtgtcatctgactctaaggagggtggctctggaggcagctaaccagagtttagggccaccctgcttcggcacgagaggctcaagatgaggggtaggaccagagtccttccaggcacaggccttttcgtacatctgtgagatgcatctcttcaagccctctcagcttccttttctttatctgaaacccacctgggtcatacagttgtaagaattacatgttttattgtatgccaggggcctaacatactgaatggcatttaaatgtcatacattacatgcaaattccttccattttcttgctttttgtatggatgaggtgaggtgatgctttgaaacagtcatgaggccgggcgtggtggctcacgcctgtgatcccagctctttgggaggccgaggtaggcagatcacgaggtcaggagatcgagaccatcctggctaacatggtgaaaccccatctctactaaaaatacgaaaaaattagctgggcatggtgacgggcgcctgtagtcccagctactcgggaggctgaggcaagagaatggtgtgaacccgggaggtggagcttgcagtgagccgagattgcaccactgcactccagcctgggtgacagagcaagactccatctcaaaaaaaaaaaaacaaaaacaacagtcatgagttttggccgggctcagtggctcacacctgtaatcctagcactctgggaggccaaggcgggcagatcatgaggtcaggagttcgagaccagtctggccaacatggtgaaaccccgtctctactaaaaatacaaaaattagctgggcgtggtggcaggtgcctgtaatcccagctactcgggagtctgaggcgggagaatcacttgaaaccagaaggcagaggttgcagtgaactgagagatcgtgccactgcactccagcctgagcaacaagagcaaaactctgtctcaaaaacaaacaaaaaaccagtcatgagttttataagttggaagtgggattgttgtctaaagcttgtcatgataataatcacctttgaacaaacgcagcgggtaccaatgcagcacccaccctggctgtcattcattctaagacacctgataattttgtatgccactaagaaagaaaaaatatgctactaattaacattcaactcgcctgttgatttaaagatgttttctgacttgagagatgttaaaatatgaacactgtgtgtcttaagatggatgaaaaccagcatttcccatgcatggttcctgacttccaaaccagcatgagacaaggagggatttggaagccctctgaagacagtgccgagttagcataaccaagcatgaaaagcaagcttcaggagctaagcgtggcaaagatagcttagatcattagtacttgaacttttcagagtgggttcatggaggacgttgaacttgaagccaggatttggatgaatggatgggagatgctggctttctgtgaggaattagaacagctttttgaatatgattgaggtggagatttcagaggtagccagtgggaatagccaacaggtgggacgacaggcagacatctgtctttaggacaaagaccagccctggggacagacaccagaagagtaaatggagctgatgtgttatattcactgttctcatgtcacctgttaattctggaaagggacagtgttctacgcttagggatcggtgactcgtgcactgctcagggtttatcttcagcagggagtttttgcctggcggaacttgtctcttccaatcatctgactgtggcccacatcttgcagggagccgatatgtggatttactcccttgatggaagcagctgctgctggccatgagataatcgtgcagtattttctgaatcacgtaagtgaccctgattattagcatgtaatgtagtcacggcaaatgaggaatcatattactgaagtataagctattacagaattttcctttgcacagaaataactttcattcatttattcaacacattttcattatctattgacgcccggtgttgagtggtgcttaggcattaaggatacagtggtgagtagaaatagacacctattcctgtaataattttgaaaatactatctgaaaattatggaaaaatattttaaaagtaaatagcactcataatcctgtcacttagaaaaattatatagaataagaaggcagagatcctcctctctttttcaacctccctgatgcccacttggtttgagaaagagctgccctaggacttttcctctgctgtggaaagatgtgtctgtaggcaagtgtgtgcacattgctttgtgttttgaacaaagtgggattctacgtatagtctgtaacttagagacatcttatagacatcttatctttgtacagtattccgtgtacaatctgcctcagttaatttaatgagtttcttattagtagaaacttagtttttaacattttgcaattataaacagtgttccgggaatatccttttacacatagctttaatacatttgcagttatttctgtatgttgtatttctgttttattttattaatttatttttttgagacatggtgttgccctgtatcccaggctggagttcagtggcgagatcgtggctcactgcagcttcagcctcctgggctcaagcgatcctcctgcctcagcccccaagtagctgggactacaggtgcatgctaccatgccccggctaattatttaattttttttttttggtagagttgggggtctcagtatgttgtgcaggctagtcttgaattcctgagctcaagcgatcacctcagcctcccaaagtgctgggatcacaggtgcaagcctgtccacacagaaccttgtacataaatattcatagcagtattattcataattgccaaaaagtagaaaaacccacaagtccatctactgaggaattgataaacaaaatatatatctgtatagcaggatattattcggccctacaaagtaatgcagtactgctgcatgctgcggcaggggtgaaccctgatgcgttaggctgggctgggtgcggtggcgcacgccggtaatcccaacactttgggaggctgaggccagagggtcgcttcagccctggagttggaggttgcagtgagctatgattgcgccgccacactccattctgggtcacagagtggatcctgcctcaaaaagaaaaagaaaaggaaaacattcggctcagtgaaagaagccagacacaacaggccacacactaggtgatttcactcataggaaatgtccagaataagcaaatacatagacagaaaatagatgagtggtttcctgggtcttggggaatgggaagattggggtgataaaaatgtgctaaaattgtttgtggtgatggttgaacaactgtgaatatacgagaagccgttgaattgtacattgtaagtgggtgacttgttggtatgtggattatatctttataaggctgttaaacccaatggggggaagtgcaggcggtcctgatgaattcccactaccaaggttgtctgttgtcctgcccaccagtcatagacaaaggtgtccattttctcttgtcctcaccagtcctgatgtcagtcaaccttttgtcaatctggcgggtgaattgtagcgtctcattttagtttgtccttgttagagtagttgaaatttttttctttttttttttttttggagacagaagtcttgtgctgtgtcgcccaggctggaaggctggagtgcagtggcgtgatctcggctcactgcaacctctacctcccaagttcaagcagttcttctgcctcagcctcccgagtagctgggactgcaggcacccgcccgcacacctggctaattttttgtattttagtagagatgaggtttcaccatgttgcccaggctgctcttgaactcctgaactcaggcaatccacccaccttagcctcccaaagtgctaggattacaggcataagccactgcgcccagccagttgaacatttttaaattgatttcttagccatttgtatttcttttttttttttttttttgagactgagtctcactcagtcgcccaggctggagtacagtggcatgatctcagctcactgcaacctccacctcccaggtttaagagattgtcctgcctcagcctcccgagtagctgggactaaaaatacaaaaaatcccggctaattttttgtatttttagtagagacaaggtttcaccgtgttagccaggatggtctcgatctcctgacctcatgatctgcccgccctggcctcccaaagtgctgggattacaggtgtgagccactgtgcccggctggccatttgtatttctcttacgagctgtctatgtttattgcccaattttctattggatagtttgtttttttctcacttattggtgggaatttcttaaatagtgaaaaattcacatggtatctctttttaacaaagaattttgggacacaacatgcacatggtacacatgcagaccagaaggtgggtgcaccgcaggcctgtcccccaccctgcctgcgtctccttggcaccctccccacgggcgactctgggaatacacccacacatgctcatggtcctgccccatgtgcagctgctcccatcttgcattttttaaaaaacttaatcatgaagatttttctatattggtgtataaagagacggggccaggtgcattgtctcgctcctgtaatcccagcactttgagaggccaaggcagacagatcacttgaggtcaggagtttgagaccagcttggccaaggtggtgaaacccgcctctaccaaaaatacaaaaatacaaaatacaggtggctgacgctgtaatcccagctacttgggaggctgagacaggagaatcacttgaacctgggaggcagaggttgcgatgagccaagatgttgccactgcactccagcctgggtgacagagtgagactatctctaaataaataaataaataaataaataaataaatcaataaatcaataaagagatggggtcttgctctgtccctcaggctggagtggagtggtgcagtctcagctcactgcagccttgacctcctggtctcaagtgatcctcctgcctcagcctcccaagtagctgggattacaggtgcgtgccaccacgcccagccaatttttgtattttttttgtagagatggggttttgccacgttgcccaggctggtcttgaactcctgagctcaggcagttcgcctgcctcggtctcccaaagtgctgggattacaggcacgagccaacgcacccagcccctctcttttttttttttttttgagatggcgtcttgctctgttgcccaggctagagtgcagtggcacgatctcggctcactgcaacctcagacttccgggttcacaccattctcctgcctcagcctcccgagtagctgggaccacaggcgcccgccaccatgcccagctaatttttcatatttttagtagagacggggtttcaccgcgttagccaggatggtctcgatctcctgacctcgtgatccgcccaccttggcctcccaaagtgctgggattacaggcgtgagccaccgtgcctggcctctcttttttttttttttttttatggtggcatggtattccctgtagggatgaatcagagtttttttgtttgtttgtttgtttgttttgagatggagtctcgctctgtagccctggctggagtgcagtggcgcaatctcggctcattgcaacctctgcctcccaggttcaagcgattctcctgcctcagcctcctgagtagctgggattacaggcgtgtgccaccacgcccagctaattttgtatttttagtagacagggtttcggcatgttggtcaggatggtcttgaactcctgacctcaagtgatctaccactttggcctcccaaagtgctgagattacaggcatgagccactgcgcctggcctaccgttgacatttcttacacgtctttttaagcacatatgggaatttcttcaggagcttaggatgtgttcttcaaagtagagtctttgttgtgtgaggtgggttcagtcggtagtgggtagtgtaaacttgctttgttccatagtggtcctggttcacacccctccccttagggtgttagacttcttttttttttttgagatggagtctctctctgtcacccaggctggagtgcagtggcgcgatctcggctcactgcaacctctgcctcccaggttcaagcgattttcctgcctcagcctcccgagtagctgggactgtaggcactcgccaccatgcccagctaatttttgtatttttagtagagacagggtttcaccatgttggccaggatggtctcaatctcttgaccttgtgacccgcccgccttggtcttccaaagtgctgggattacaggcgtgagccaccgtgcctggccttttttttttttttttttttggggtggggtcttgctctgtccccaaggctggagtacagtggtgtgatctcagctcagtgcaacttctgactcccaggctcaagcaattcgcctggctcagcctcccgagtagctgggattccaggtgtgtgccaccatatccagctaatttttgtatttttagtggagacagggtttcaccatgttggccaggctggtctcgaactcctgacctcatgatctgtctgcctcagcctcccaaagtgctgggattacaggcgtgagccactgtgcctggccaggatgttagactttttggctccctggccatttgggtttctttttctgcaaataattatttttgtattttttatttattttttttatatagggtcttgctttgtcaccacactagagtgcagtggcctgatcatgggtcattgtagtctcaacctcctgggctgaagtaatccttctgcctcagcctcctcagtagctgggactacaggcacgcactaccacgcctggctgttttttttttgtagagacaaaaatctcactatgttgcccaggctggtcttgaactcctggcctcaagcaatcttcccaccttggcctcccaaagtgctggagttacagacctgagccaccatgcccggccagataattctttgacagataatcctgctgacatgaactagacttccttaagacacatcatagaatcaatagcccagaaccataaagagcctctacttgtaagtttagagtcattttaagtaaggtagaactggagatcataagagatatgtactcttataatttttgattgtatgtttgtttctttttgagacagagtctcactctgtttgcccatgctggagcacagtggcgcgatcatagtttgttgcagcctcaacctcccaggttcaagggatccttgcaactcagcctcctgagtagctgagaccacaagcgcatgctatcacactagctgatttgatttttttgtagagttggggtctcactaagttgcttaggctggtctcaaactcctggctgcaagtggtcctcccaccttggcctcccaaagcgctgggattacaggcaggaaccacggtgcttggccaacaatttgcatgcctttaccacattccccaaatgttaacatttcacctcattttcttatcagtctctttatgtataacatgcatatgttttctgaatcatttaaatgtaaattgtgacataatgccccttttcccctaaatatgtatttcctgagagtaagaatttcattatgtatttcctaaaagcaaaaatgttctctttcccagtcacacaaaattatcagactcaggaactcaacactgagttcttcctccagcacttgacaagaatcaaagtgttggttagtgactgctttgggggatggggcaggactggcagcaggtggcccgatggcctgggtggtttgcctgccagcgatgctggtgggcaagccctgcctggaagctcctctctcccacgtttttcctgccgcccagtagttagaccacctggagccagaggagggggcccacccggtttcccagcctgtccctccagagctgggctccatttctggaggtagagaatggggcaagtctgggcatcttgtgctctttgctaggggaggaaagggctgtggctgctttccttgtcccccatttcccttctgccagtggggccaagccccagcagctcagtcaggagaagaggatatggatctgtctgggcctctctctttaagagaaagttgattcgtgccttccggatagtcttgttccagggtttctaaactttctgatcccaccttcatgttaaaatgagttttgatcatgtgtctctttagtaatatggacattataaaataggaaaaaaaagtctcttaaagcctaagtagttaaaaatttattttcacatcaggcatagtggctcatgccagtaatcccagcacttttagaggccaaagtgggaagatcgcttgaggctggagttggagaccagtctgggcaatacagtgagaccttgtctctaaattaaaaaaaaaaaaaaaaaaaaaattggccaggcatggtggctcatgcctgtaatcccagcactttgggatgccaaggcaggtggatcacctgaggtcaggagttcaagaccagcctggccaacatggtgaaaccccattagcggggcgtggtggcgtgcccctgtagtcccagctacttgggaggctgaggcgggagaatcacttgaacccggaaggcagaggttgcagtgagccgagattgcgccattgcactccagcctgggtgacagagtgagactccgtctcaaaaaaaaaaagccagttgtggtgtgtgtttgtaatcccagggaggctgagaagggaggatcacttgagctggggaggtcagggttgcaatgagccagtgtaatccagcgtgggccacagagtgagattctgcctcaaaaacaaaaccaaaaatatataacgagttaaaatcctacagtaaagaggctactgttttattctggttaaaccttagggttccttctatcaaacttaaactagaattttttttttttcttgagatggagtcgccctctgtcgcccaggctggagtgcagcagcttactgcaatctctgcctcccgtgttgaagcgattctcctgcctcagcctcccgagtagctgggattacaggtgtgtgccaccactcccagctaacttttgtgtttttagtagatacaggctggtctcaaactcctgaccaggctggttgttggccaggctggtctcaaactcctgacctcaagtgatccgcccacctcagcctccaaaagtgctgggattacaggtgtgagcctctgtgcccagccaagaaattattttttatttttgagatagagtcttgcttcgtctgttgcccaggctggtgtgcagtggcgtgatcttggctcattgcaacttccacctcctggactcaggcaattctccttcctcagcttcctgagtagctgggagtacagacgtgtgccaccacgcccggctaatttttgtatttttagtagagatggggttttaccacgttttcccacattggccaggctggtcttgaactcctgacctcaggtgatccacccgtctcggcctaccaaagtgctgggattacaggcttgagccaccgtgcccagcttataaattattgttattatttattattatttttttgagatggaatctcagtctgtcgtcgaggctgtagtgcagtggcgcgatctcagctcactgcaacctccgcctcctggattcaaggatttctcctccctcagcctcctgagtagctgggatacaggcacgcaccaccacacctggctaatttttgtattttttagtagagacggggtttcaccacattgcccaggctggtctcgaactcatgacctatgatccacccaccttggtcccccaaagtgctgggattacaggcgtgagccactgtgcccggcctataaattattttttaaggcacaaagtctcataggtaatttttaatcagagtcaaaagtaggatggggggcactctagaaagtaaaactccttatactttgtgaaaacacagttttttgtcctgtatccctgcccagagaccacctctgcctcccccaccaactacatatgggggtcaaggttgaggccccctggtctaacgggagagacagttgccgtatgggtggtagcaaaactccttaagggttgtgatttttttttttttttttttttttgagttggagtctccgtgtgtcgcccaggctggagtccagtggtgcgatcttggctcactgcaacctccacctcctgggttcaagcgattctcctgcctcagccccccggagtagctgggactgcaggtgcccaccaccacgcccggctaatttctttttgtatttgtagtagagatgaggattcaccctgttggccaggctggtatggaactcctgaccttgtgctccgtccacctcggcctcccaaagtgctgggattacaggcatgagccacggcgcctggctgtgccttttttctcttaatgatgttttgtgcaccctagtccgtgtcaccgcaggtactcccacccaccacgtaaatgggcgggaggcgctctgttttctggatatgctctcacgtagctcattaatctcttattttaagttccttctgattctcactatgctgaatgccacagtgaaaattctaaattgtagtgtatgtcctgcattatttccttaggcgccgctgcacttcagcctgggtaacagagcaagatcctattaaaaaaaaaaaagcaaacatgcttatggtagtacattttaaaaacatagaagattggaaaattggaaaaatccccatcaaaaatagtaaataacttaaaaatagcaacattttgggtatgttaccttccaatattgttttctgtgtaatttttttggtctcattttgccggagttgtaatgtatatgtagttttgtatcatgatccttttttatttttttgagacaaggtctcgctctattgcccaggctggagtacagtggtgcgatctcagctcgctgcagcgtcaagctctgggacttaagtgatcctcctgcctcagcctcctgagtagctgggactacaggcatgtgccgccacaccctgctaattttttattaaagatgctccccctttccggggtcccgcctcctcctctgagctttggctctggcttccctgcctcccccagctgcctggtctgacaggagagaaggacagttacagtgtacagtgacaccaaaaacatgctgtattgattatagtttatttttttttcttgtagaggtgggttcatgctgtgttgcccaggttgttgtccaactcctgagccgagcgatccacctgccttggcctgtcaaatgctgggattacaggcatgagccacctcacttggccatgatcctttttcaacttgatcatacagctgtttgtaaatatcaccatctatggcaataacagaactgactgcttatccccctgagcattcaagttttctctaggtaggttttcattattgtgaatatgctgtgccaaacatcctttttttttttttttttttttttttgagacagagtctcactctgtcttcaggctggagtgcagtggcatgatctcagctcactgcagcctccgcttcccgggttcaagcaattctcctgcctcagcctcccgagtagctgagactataggcgttcaccaccacgcccggctaatttttgtatttttagtagagacggggtttcaccatgttggccaggatggtctcaatctcctgacctcgtgatctgcccacctcggcctcccaaagtgctgggattacaggcatgagccaccgcacccggcctgtgccaaacatctttgtgcactaaagccttttctgtatttagggttatttccttagggtcatggaagtggaattgttgcgctgcaagacctgtaaatacattatagagctttggatcaaagttacgaattctgcttcagaggatggtgctttcattctgactggtttaaaaggctgctttctttgaagacaagcgaagtgagtgggacacagcccaggcgcagaaggtgaaggctgggatctccgcatggtggctgccagccccctgcaagggaggtcatgagcgtgggagatgactccccagcccccagccctcctcatccttgtccctaagaagagagtgagagcaaaacttgtggctgcggtgcagacaagcctgcctctttctcatgcagatgtgatgtttcccacacagggaggcagtcagaaaccagcatatgcccttctgtcttcccagccagcagcccaggaagggcaggtgctttgaaggagaggcccctaaccccctttcacggacattcacagggagtcaaggtggacgcgagagaccacagtggagccacagcccggatgctggccaagcagtacggacacatgaagatcgtggccttgatggacacttactcgccctctctgcccaagagcctctatcggagcccaggtacccacacctgccagccgcgccctgctggggtctctggttgccttgagctttaggtgacctggcagagaaagatgtcccccgcttccccggctcccaccttctctgagatttggctctgcctcccccagctgcttacatgtcaaggttgaggcccctgctctaacaggagataaggatggttacgatggagagtggtacaaaaccaggctgttgtgaatgtagaggctttctgtagtatgcttgactaccgagtaggggcaggcccctcttagttttctgttttcactgtttcctgagctatggcttgttcattcttctatatgaacttgaatatcaacttgtctagctccttaaaaacagtattgatatttttactgagattgtgacaatgtataaattaactatatctttgtgttgttgtcttatccaagaacaagggatgacttcttgttccaatgtacttttgggtcttgcaggagggttttaaatttttcttcatctacattttgcatgtgacttaagtttattcctaagtgtttgatcatctttgtcgctattgtaaatggggttttccctatcattatatcctttttttccccccaactctcagggtattaattattcagtgctatttattttttatttcagtaggtttttggagaacaggtggtggttggatacgtgaataagtcctttagtggtgtcattatatcgtttcactgcatattgtcagtgcatttgaaggcagtggatttctgcaaacttttgttttttttttgatacgggagtttcgctcttgttgctcaggctggagtgcaatgaagcgatcttgcctcaccgcaacctcttcctcccaggttcaagcaattttgcctcagcctcccaggtagctgggattacaggcgtgcaccaccatgcccggctaattttttgtattttcagtagagatggggtttctccatgttggtcaggctggtctagaactcgcaacctcaggtgatccacccatctcagcctcccaaagtgctgggattacaggtgtgagccactgcactcagccctgcaaactaattttatattctgctaccttacagaattcttacattgttcaggttagttttgttattgattctttagggctttacaggtgtactaacatataatctttaagtatcgatggatacactgcttcctgctgattctcatgactctgactttgttgaattgcaccgttcttttgtttagttgctaacacctctagctcattgttcaacatagtggagatagtgagcctccttaccttggtcctgatcttagtggaaatgccacgttacatgagaggctgactgtaaaagggaaggcatatgttattttagcttattaacaaagtattcctcagttcttctattcctgagtggtgttttacaggagtaactattgaattgtgttcccatatctttggagacgatggtgaattttcatatggtagattgtcttcatgaacctcctaataatgaatcaaccttacattcttggcataaatcccacatgttgtactattttaatgtgtttttgaattctgtttattaatatttagtatttttctatggatattcagtcataagtgatactggtctatagttttctttcttctttttttttgtttttgaaatggagtcttgctctgttgcccaggctggactggagtggcgagatctcagctcactgcaacctccgcaacctccgcctcctgagttcaagcaattcttctgcctcagcctcccgagtagctgggatcacaggcgtgcaccactacacccagctaatttttgtatttttagtagagacggggtttcaccatgttggccaggctggtctcgaactcctgatctccagtgatccgcctgcctcagcctcccaaagtgctgggattacaggcgtgagccaccgctcccggcgtggtctatacttttctatttttgttctgtctatcaggtatgggtatcagtgtttacttcataaaaataatttggaagttttccttccttttttgtgttctaggacaatacacgtagcattagtgctacctggtcttagaagttttgatagaatcctcccatgaaaccatctggtctctttctgtgaggtggttcctcgataacagtttttctatttcttctatagagattggcctcctcatactttcttttcttatggggtcagttttggtaaattatattttcctgagagatcacttcatctaggatttcagacttatctgcagaggtctacaagataatattttctccctttttttttttttttttttgagacagagtttcactcttgttccccaggctggagtgcagtggctcgatcttgactcaccgcaacctctgcctcccgggttcaagtgattctcctgcctcagcgtcccaagtagatgggattacaggcatgcgctaccatgcctggataattttatgtttttagtagagacagggtttctccatgttggccgggctggtctcaaactcccgacctcaggtggtctgcccacctgggcctcccaaagtactgggattataggtgtgagccaccgcacccggccaatttttttctccttttaaaatattctgtttcagggccaggcgcggtggcttatgcctataatctcagcactttggaaggccgagttgggcggatcacctgaggtcgggagttcgagaccagcctgatcagtatggagaaaccccatctctactaaaaatataaaattagctgggcgtagtggtgcatgcctgtaatcccagctactcgggaggctgaggtgggagaatcccttgaacccgggaggcagaggttgaggtgagccgagatcgtgccattgcagtccagcctaggcaacaagagcgaaactctgtctcaaaaaaaaaaaaaaaaaaaaaattctgtttcaggctgggtgcagtggctcatgcctgtaatctcagcactttgggaggctgaggcgtgtggatcacttgaggtcaggagttcaagaccagcctggccaacatggtgaaaccccgtctccactaaaaatacaaaaataagccaatgtggtggtgtgcgccagctactctggaggctgaggcaggagaatcacttgaacccgggagggggagattgcagtaagccaaaatcacgccactgcactccagcttggcgacagagcgagactccatctcaaagaaaagtaaatagataaaataaaacaaaataaaatactctgtttcagtggttattttctcctgttattatctttttttggcatggaaaatattgatttattttttgtgacagggtcttgctttgtcacccaggctggagtccagtgacccaatctcgactcaatgcaacctccgcctcccaggctcaaaacgatccttctacctcagctctacgagtagctaggactgtaggtgcaccctaccacgcccagcttacgtttgtattttttgtagagaggtggttttgccatgttgaccaggctggtctcaagagtcctgagctcaagcaatccacccgcctcagcctcccaaagtgctgggactacaggcatgagctactgcacctgacctggaaaatatttatctcatttttaattgacacaaaataactacatatttatggggtacagtgtgtgatgttttgatacatgtatacactgtgtaatgatcaaattaaggtgattagcttatccatcacctcaaacatttatcatttcgaggtgagaacatttaaaatcatgtcttctagtagctattttgaggtataagctgttgttccgtatagtcactctactgtgaacaccagaacttctttcttcgatctgtaattttacacctattgaccaatctctcccactacctccccacccccaacctctgataatcactattctactctacatgtttgacatgagcttttaaaaatcctgtaaatgggtgacatcatgtagtcatgtagtcttttttgttgtttgtttggtttttgagacaggttctcgctttgtcacccaggctggagtgtggtggcataatcttggctcactgcagcctccaattcctgggctcaagtgatcctcctatctcagcctcccgagtagctggcactacaggcacctaccaccacacctggctaatgttttatttttttgtagagacggggtcttgctatactgaccaggttggttttgaactcctgggctcaagtgatcctctcgccttggcctcccagagtgttgggattacaagtgtgagtcaccacaacagctggcatttgtctttcttttctatgtctggcttattttactgaacatagtctcttccaggcttattcatgttgccacaaatgatcagatttcattctttatgtctgaataatattcaattgtgtatataaactcattttctgtcttcgttcatccactgatggacacaggttgattctctatctaggctactgtgaatactgcggcagtaaacatgagggtgtagacatctctttggtatactgatttcctttcttttggataaatacccagtagtggaattgctggatctcatttcttatattttttaatttttttttttttttgagatggagtttcgctcttgtttcctaggctggagtgcaatggcacgatcttggctcactgcaacctccacctcccgggttcaagcgattctcctgcctcagcctccctagtagctgggattacaggcatgtgccaccacgtctggctaattttgcatttttgggagagacagggtttctccatgttggtcagggtggtctcgaactcccgacataaggtggtccacccgactcggcctcccaaagtgctgggattacaggcatgaaccgctgcacccggcaaaaatttcttctattaaaaaaaatagagacagtgtctcagtatgttgcccaggctggtctcaaactcctgggcccaagcgatcctcccacctcagtctcccacagtgctgagattataggcatgagccactgcgcccggcctcacttcttattttgaatatttgtgtttgttctttttttttttttgagacagagtctcgctctgttgcccaggctggagtgcagtggcgcgatctcggctcactgcaacccccgcctcccaggttcaagcgattctcctgcctcagccttttgagtagctgggactacagggtgcccaccaccacacctggctaattttttttttgtatttttagtagagacagggtttcactgtgttagccaggatggtctcgatctcctcacctcgtgatctgcccacctcggcctcccaaactgctagaattacaggtgtgagccaccgtgcgcagcctcttcctttttttcttaagttaaatactagtactttgtctgtttagtggaaaaacaagaaaaacccatcggattttgatttattaatgagacctactgattgtctgtttaatttctgcttttatttttatttggcttactttgttgttctagttttttgagttggaaacttctttcattttcattgttgcccttttgttgctaaatgttagaggctgtgaatttttgctgattgctgctttaagtgtattctgggggttctgtatttaatactttccttgttatttttagaaattctgtaatttttatttatattttctccttcacccaggagttgtctaatagaagtattatgattgtttttgtttgttaatttctagatggaagggcctttttgatcttgcaattaatttctcatgttattctgattaactttaatgtgtctgatcagagagtgtttataattcttacatttacataacttccttgtcatcttatttatcatctactgatctatctatatatatatatatttttttcagatgtagtctcactctgtcacccaggctggagtgcccaagtgcgatcttgactcactgcaacctctgcctcccaggttcaagcgactctcctgcctcagcctcccgagtagttgggattccaggcatctgccaccacgcctggctcatttttttttgtatttttagtagggacagggtttcaccatgttggccaggttggtcttgaagtcctgacctcaagtgatccgcccacctcggcctcccaaagtgctgggattacaggcgtgagccaccgcgcccggccctgatcaatattttttagtgttccgtgttttgcttgagaagttgtattctctattatctgtatacagtttagcatatctgtgagtctatcttatttaggattatgtactcttagttcattttctacaaaattacctattagcgtgtttctgatttatgaaggaagttggtgcattttttggtgacagattttcataacttgttatagattcactgtgaattatggcttttagtattagaagtgtccttctggctgggcatggcccatacctgtaatccgagcactttgggaggccaaggcgggcagatcccctgaggtcaggagttcgagaccagtccagcctacatggtgaaaccttgtctctactcaaaatacacaaattagccaggcatggtggcacatacttacaatcccagctactcgggaggctgaggcaggagaatcacttgaacccgggaggcggaggttacaatgagccgagattgtgccactgcactccagcctaggtgacggagtgaaactctgtttcaaaaaaaaaaaaaaaaaagtgtccttccgtgtcatatttaatgtgttttgccctgaattccacgttgatagcaggattgcagccctggctcttttgtggtttccatctgcctgttctttttaagctgctctgagggtgtgttgggtgctgagattcacgcagctgccgttcccttgcttattgctgcctctttgcatttgtcttacagctccctccccttcagcttggatggaagcacagtctccctggagtgctatagatctttgagtgtgaggaggtgtgtgtccatatggctagctcagtcgccagagcttgagcctcgtcatggggaaggacagagtggcccacgttcagggcctgagctctccctctttgctggcctgccctgagttgtcctgtcagtttgcacctgagcgagcagctcctttctcagtgtcaggctcagcccagcctcttccctggcattgggattgtttcataataaacacagctcaggtggtaatgcaaaggacctttcccttcatttctgccccagcttacccactccacaaggagatctcatcatttcctcctgtatacaactcacgtatctcttaaaagtagaatcagatcagagccttatacaaatcaaatatgaaaaactgaaaagctacaaaataataaaagctctggtttgagctctgaaagctcagactgggaagtgatttgaaacagtttataatcatagcaaacacatgccatgctttagaaaatacaaaattgtggctgggcgctgtggctcactcctgtgatgccagcactttgtgggaggccaaggtgggcggatcacaaggtcaggagatcgagaccagcctggccaacatggtgaaaccccgtctctactaaaaatacaaaaacaagattagctgggcatggtggccgggtgcctgtagtcccagctacttgggagcctgaggcaggagagtggcgtgaacccaggaggtggagcttgcagtgagccgtgatcgcaccattgcactcctgcctgggtgacagagcaagactccgtctcaaaaaaataaagaaaaaaaaaagaaaatacagaattgcttaataagttgtttccagccgggcacagtggtaacgtgcctataatcccagcactttgcgaggctgaggtgggtggatcacctgaggtcaggagttcaagaccagcctaatatgatgaaaccccatctctactaaaatataaaaattagctgggtatggtggcatctgcctataattcccaactactcgggaggctgagataggagaattgcttgaacccaggaggcggaagttccagcctgggcagcaagagcaaaactccttctcaaaagaaaaaaaaaaaagttgtttccaaaggaagggattaggaaaaagtagttgtgacttatattaccatatattttaatgaagagatgggttttacttattcaaattagaacagaatttctgattatgaacaatacagacttatgaacaatttggcaaaccccaacagagataataaactcctggctgggcatggtggctcatgcctgtaatcccagcactttgggaggccaaggcaggcagatcaggagtttgagaccagcctggccaacatggcaaaagcctgtgtctactgaaaaagaaaagaaaaaaaacactgggcatggtggcacgcatctgtaaccgcagctacttggaagggtgaggcgtgagaatcgctagaacccaggaggcggaggttgcagtgagtgagccaagatcatgccattacacttcagctcgggggacagagtgagactctgtctcaagaaaaatgaaacttcccatcctcactaactttgcagctccctgtggcccattggagcagcgccccggcctgttagggcatttctcagaagtgatgccctggcagatacccttctccttaatttaacaaaaccggcgacagtcactttctttcagtttgccgtaaggattagtaaatgagtccattactgaacacactatcttaatcttggtgtttgatcacagaaaagtacgaagatctgagctcttctgacgagtcctgccctgctcctcagagacagaggccttgccggaagaagggtgtcagcatccacgagggaccgcgagccctggccaggatcacaggcattggcctgggcggcagagccccacggcctcgctatggtgagtggcccgcgtttcccgagggctctttctcattgcataccaggattttgtgttggcaagaatggaatagctcttaggctcctgaaatgtgggtcgctggacctcaggtggcagcgggacaggtggcccagctttcatgctcagggagactcaggattgagtcctgtgatggaaatgcattggtcacggactagctcttgttttttgctttatctcctggagtttccttttcgttggttaaatttaggaatagaactttctctcctgcagcagaaatgtagctaaggtcagatttcattcatcacataggtgggttggctcatacagggaggaggcaaagcgtgaagttcacttccctgccctgcccataccagctgggtcgggtgcgctgctgggggcaggaggccaagaaaacaggccctgctgttttctcagggcgatgaagttgtactcagaccctcctgagagagggcccgcttgttgacttgctggtgaagaatcctagcctttgggttttccagtctcgttcattctcagattcccagccccagggtgttgagcgttttgctcttggggagtgctggggtttctttttaggggagttgggtttggtgcctactctctattgctgtggtctgtcccagagctcagctggaggtgtgagttatgtcttcctttgatggctgtcacccactcatagccaggccaaggctgctggtctcacaggcctggtggctggtccttctcgggagcaaggcctctttgaggccaggacttggaagagtgagagtagacagtgtttcagccaggggtccaccagtaattgaattcccttctagaccccaggaacaagcagatgtgcagacttctgtcttcccaagcctgggtgctgggttgggaactggagacccaccttctcccatcatcctgggaagggtgagctgactgggccactgggaaggcctctctcgagctgctggccagccccaccacagcatgagggcccgcccgtgtcccgtccgctgagctgtgagcactggctctgggacaccgggctggtcgttctgagtggcagagtctcttccttccaaaaggtccctgccacctgctacagcctgaggtgtggtggggacaggaaggaagctgtcatcctggggctgagttggtaattaatctatatagctgtacaacaaatgctttaacaaaatcatacatgtctgaagccgcttgtgtgcggttctttgtatgtatccacagagaagtaatcatggtggtggtctcaggtgtggtatttcaggggatttttgttttctcataccttgtgaaatttaaattttctataagtgcatatattttatttgccagtaattaagaaatttggggccgggcgcagtggctcacgcctgtaatcccagcactttgggaggccgaggcaggtggatcaagagatccagaccatcctggccaacatggtgaaatcccatctttactaaaaatgcaaaaattagctgggcatggtagtacgtgcctataatcccagctactcgggaggctgaggcaggagaatcggttgaacccgggaggcggaggttgcagtgagccgagattgtgccactgcactccagtctggtgacagagcaagactccgtctcaaaaaaaaaaaaaaaaaattgggggggccaggtgcagtggcttatacctgtaatcccagcactttggaaggctgaggtaggaagattgcttgggctcaggagttgtgagaccagcctgggcaatgtagcaagaccctatctctacaaaaaattttgaaaattagccagatatggtggcccatgcctgtagccccagttacatgagaggctgaggtggaaggattgcttgagcccaggaggtcaaggctgtagtgacccatgatggtgccattgcattccagtctggataacacagcaagaccctgtctcaaaaacagtttagggggcaatgataaatagcatgtgctgattagaaaaacttctccataactaggaaaatacgtaaagaggaaagtaagttccccatggtcccatcaaccagtcctttgggttcttttttgagacagggtttcactgtagcccaggctggagtgcagtggcacgatcatagctcactgaaggctccagttcctgagctcaagcgatcctcctgtctcagcctcccaagtagctgagattacagacatgtgccaccgtgactggtcaagtcagtctttttatgtaaaggggcaaaactggagtgaaattgcctggtatacatgcccctttttctgcttggttttagaggcaggtagagttaggtaatttcatattattgttgttaatttttacctcaaggcctttttccttcctgctcagccaggtctctttttcgccggggttgactgaccagaggaggcccgctaagcgcctgtggttaaaggtcacagggacataaagacacgtggtcgatgggtgtctgtgtgaggtcattagctacctcctgctaaaaggaacactcatggtatagttttctctggtcaggcatctgtaaatacagctgaccatttgctacgttttccccttggaaaagaaatggagagggcccaggcttgacctggctgccagccctcgccccaccaggcacttgcttgggccactgactgaccctcagagcatcttttccacccacacaccacagatagagccatgccaggtcgcaggggcaagtaggtgaggtcatgactgggaagtcacctgcctccatcctgggcctcggcctctgaggaggtttcactttggagttccctgggcttatgggccccattctgtacacagagcaggctcctccccgtggctatgtcaccttcaacagcagtggcgagaaccccctggaagaagagggcctctgctgccgggatgtcacctcccccatcaatgagcgggatgtggagagcagcagcagcagcagcagtcggggtacgtgcacccccacccatccggcccgtggctcaggcaggtcctggagctcctgtgtgcccatccccacttatcccctgggcctggcgctggacacagccatccagcagaggacaggaaaggggtaggtgtggacggccctggttcttgtgaggaatgggagaagcttctggtccagcatccccgtgcggcttaagggagccgttccacagcaacaggtttagctccttgcttgggagcccctgaggctttcagggcaggccccagtaggaatgtctgttataactgcacctccgtgcagcagctgtttccatagtgcccaccgtgtgccaagcactgctccgggtgcttgggatttatcagtgaacaaaaaagacagaagccctgcccgtctgtatagaggggagggtttaggacaggcaggaagtttgaaatataaggaagcaaccgctgcaggccccaaggagtgccctggtggaggcggctcagcccggggcacgcccatgcgcagcacctcggtgagggctgcaggcggacgccctgtcttcccgccctcagaggaacatgctttctgtgccaacctggggcccgtccagagcagcagcagcagcgagggcctggccagagcccaggggctcagcagcgaagcttctgtggagagcaacgaggtacggattctttctttcttggtctcccatagccggtccctggctgggatgcctgacatcccccagttactttaagatgagcatgtatgtaagaagcagctgctgcacgtgtgtgctgcactgggacgtgctgtgtccagggtctggcttctcagacgacagcgaacgcaccggaagcccctgtgtggcgggtggggggtttcacgaagcctctcaagcccctgtgtggcgggtgggggtttcaccaaggctctcaagttagcccgcgcactctttcagatgcacgcctctcactgcaggactcggatcatgcctgtaaaagctcagctcgcaaacaagctaaaagttacatgaagaccaagaatcctgacagccagtggcctccccgcgctgcaactgacagggaaggctttctcgctgagtccagcccccagactcagagggccccctactcaggaccccaggtaagaccgcttgtgaaactggaggttacactcagagacggcactttttgtgacttaggaggcatgtgttgtgtatatgacgtgccaggcgctgctaggagaacagaatggcggtggcatccccatggcctgttaggctccacaggctcacagccggctccatggctggcagccccgctgcagcgcttctactctgttcctctccacggaaaggacctgtctccctgctttccatactggagttggcctccctgagcctggggagaagaaaagcacacttgacctcagagctgcctgcaggagtctgacaagatgtggttgaagcagagacaggaactacacacagtgtgtgcttggtgatggttacagctgccaccatcctcctcctttctgtggtccctctgaccacacattaccttagggatcagaggtgtgactcacagctcagctgtctcacctgtgtctgctgagttctcctaccctgtgtgggcagaagaggcacggagaggagaggcagagggaagctctggttggttatttggtttgtttgttcgagacggagtctcgcactgtcatctgggctggagtgcagtggcgcgatctcggctcactgcaacctcctcctcctgggttcaagcgattctcctgcctcagcctcccaagtagctgggattacaggcacccgccaccatgcccatctaattttttgtatttttagtagagacgggatttcactatgttggccaggctggtctcaaattcctgacatcgtgatccgcccgcctcgacctcccaaagtgctgggattacaggcgtgagccaccacacctggcctggtgccatgcccggcctggctggttatttgttaaagcactggctttgctgttcagtagagccttggatttgccggcttctccctgcagcccctggctcagtgagcaggcacacgtctcggtcccttcaacatacgttgagtggagtctggtcagggtagtgtcctaagtatgtttctttcagaaaatagcttgaagaaaatgtcagagtaacatttgtttgtccattaaaagcaataaactctcaaaagtaggatttctggagttgaaaagtaaatgaaatgaaaatatcactagacgagctcacagcagaattgagcaggcagaagagtcagacaacttgtgaacacaggtcacctgagatcatctcgcttgaggaacagaaagaatgagtaaaaaaaattaacagaaatctgtgatcccctcaagcacaccgacaccaccccatacagtggcattccagaaggagagcagaaacgatgggtgagaaacagcctgaccatctcagtggatcagaaacacggatcttacatccagggagctcggtgaactccagacaggtgaactcggagaagagctgcgcttagacaagtggaaatcagaacatccgacactgagactctagaattagagggcagcgctctccgcctacaaagcattgtcgagatcagcagctccatggtcccttcacagaactgagcatgtgtgggaggaggaggccagtttctggtgatgaacatacattgtccccacgtggccgaccatagtgtgaggactcacctgcctgcaacatcctgccctgcctgagccaccagagtaggaggggacagcctgggcgccacacacaaggcactgtcttggttctgagcctggggaagtggtggggctccgagtggaggaaaacgtctctgcttcgtcgtcagccactacctcccccaacctgtcccctgtgcctgccaggaccttgccgcactgctggagcagatcgggtgtctgaagtacctgcaggtgtttgaggagcaggacgtggacctccgcatctttctgaccctcactgagagcgacctgaaggaaattggcatcacgtgcgtccagaagggccgctctggccctcagcccggggttggggcaaactcccactcatgtaagcgctcttgggacgctgaggcatatcctggtcacattccccccgcaggctgtttgggcccaagaggaagatgacgtccgccattgcccgctggcacagcagtgcccgcccacccggggatgccctggagctggcctacgccgaccggctggaggctgagatgcaggagctcgccatccagctgcacaaggtgagtggctgggtgggggatgggggggcagggtgacacccgtgagttggctccatctctgacagaaaaggtgggtgctgtgtggaggggtcaggtggatgcagtggggagagggccccacacacaggacagggccgtggccaagggtctggcttgaccggccacctcccagcctccccgcgccccccacccccctgcagcgctgcgaggaggtagaggccacgcggggccaggtgtgtcaggagcaggagctgcgcgccgtggtggagagctgcctgctggagcaggaccgcgcccgcgaggacctccaggcccggctgcgggagacgtgggccctggcccgggatgctgccctcgtcctggaccagctgcggtgagtggctctgagctgccctgggctgggtctccagtggtcagccacctggcccctgggcccccacacatcctttcctcctgattttgtaactgaggggtggatttcagggtctggagccaccccacccccatttcatcaggcccttccttcctgcaggcagacccaggcaggagttgggtccgggaatctgcaccggtcgccctcctgctctttagtgcagcctcatggggcactggcccagcccatgagggccagctgcaaggacagggctgagcccctccctcccctagaaggtctgaggtgggggctctgcagcggccaggcctctgctctcaccaatatttgtttctgtgtctggcagagcctgtcaagctgagctgtcatctcgagtgaggcaggaccagccccctggtgcagccactctgggcctagccgtccccccagctggtaagagcagtggcctgactccgcactgggcagaggggaaggtgggggagccctgaagccaggtttgacccagtgggcttggcctggttctccggccggcagccactctcccaggtccctgtgtgcacatgatcccagagtccaaggaaaagagggggccctggggacccaagcccacttcctcacctgtgacaggaaaactgcctatcccccaggggtaggaggtactcgagaaaggccctgtgccttggctggctgtgctgtgctgagaccgccagtgacttctgtagcctccagccagggcccagacccgggtccccaccggcagagctttgccttctctcgggctgacccgggcctcgtagtgtttgctcagcctgtgggaggaagggcacaacagggcttccctgcctcggccttgggaggttgcttagacactgtcaggcgggtagggaggttctgatccaagcaggttctcctggttgcatgggctcagaataaagcagggcctgtggggacgcagacccccagctaactcggtccctgcacctgcaccacagactccaagggctggcaagcgtccctgcaggccatgagcctccccgagctctcgggagccctggaggaccgtgtccgtgagatgggtgagtctccggggaccagacgactgagcgctccttttgtttccgagggaggcaaagggacccctttccagggaaagcgggtttgtgtctctctaccccaaggctgacctcggggctggggccataacgggtgaggggcaggtcacatcctgcagctgagaccccggggcagcaccacccagccctcctgagcctggccgggagaggctcaaggtcatcattcctcagggcaagcactgtgcttagtgacccagagcctggagaagctgcaggtgctgaacgggaagaagtggcgggagacctagcctgcgggccggtgagtgtctgccagcctggatcccgcgtggtgggagcagcagggcctgtctgggcggctgcaggtgtgggtatgcacccacctgtccccctcccttctcaccggggctttttctttcagaatctgacgttgggtgattggtccaccctgaagctgtgtgccagggagtgaggaggacagtgagcaggtagctgccatgtgcagcccaggcccagtgggggccagaggatcaggccccgggagcagccggcagacagaggcaagacgggggctgcggccctggctcggcagctcgggccagcactgaggcgggacgagggcctcacccagaacctcgtggtgaggcccagagttcatgggctgccctggcccataccaggcagggccctggggggaaagtgtatccatatacacgcacaggtgccaactgaggtgggaccttaggaatgaggactggggcacctggaaaatgccattttttggaaaataaaatttaagaacagct

SEQ ID NO: 15403 - DNA, 33142 bp, Homo sapiens
agcccgagggcggcgcaaggcctgaggcccagcacaggtgggttccgcggcggcccggccccagcacttgccggcacctgcagcccgcctagacccggcgctcgggcgtcccgcgctgcacttgctcgccgcgtgactggaggaccgagcccccacattttctttatgtggttgtggtgggggcacagtaatgccctgtgcgccgtagcgttcctgtggggatgtggccggggggcgtcgggaagcgtcactgctgtgagttacgggtttgtcggccagggacccgccccggggccagtgagctacctttgcgatgcggttccacggggcgagagggggtgcctgggtgctttcacagacctcctctgtgggcgtgacagttaccaccagcatcacatttgttaagatttttaaaaattttttaatttttgtgggtacgtagtaggtgtatatatttatggcgtatatgagagattttgatacaggcatgcagttcgtaataatcacatgtaaaatgggggtctccatcccttcaagcatttatcctttgtgttacaaacaatatgattatactctttgaattatttttaaatgtgcagccgggcgcggtggctcactcacgcctgtaatcctagcactttgggaggcaaaggcgggcggatcacctgaagtcaaggatttgagaccagcctggccaacatggggacacttcgtctctactaaacatacgaaaactaggctggcatggtggctcatacctgtaatctcagctactcgggaagctgaggcaggagaatcgcttgaacccaggaggcggaggttgcattgagccgagatcacgccgctgcactctagcctgggtaacagagtgagattatgtctcaaaaaaaataataataaataaataaaatgtgcaattagattatattgactatagtcaccctgttgtgcggtcaaatactagatctttttttttttttttttttttttgagacggagtctcgctttgtcgcccaggctggagtgcagtggcttgatcaaatactagatcttattcattctgttttttttgtatccattaagcatccccaccctccactacccttcccagccttggttacactagaagtaaccatccttctactttctatgtccatgagttcagttgttttgatttttagataaccacaaataattgagaacatgcaatatttatctttctgtgcctggcttatttcactaaacataacgatctccgcttccatccatgtttttgcaaatgataggatctcattctttttttatggctgaatagtactccattgtgtctaagtaccacattttctttaggattcactgtaaaggtaacagatacttagcattttcagaatggacagaaccaaaaagttgaatgaaaactaaaacgtcttatctctaatgctactttacaccacaccactcgggatgggacattttagttttcactttagtgttttttttttgtttttttttttgagacagaatttcgctctgttgcccaggctggagtgcagtggcttgagctcggctcactgcaatcgcctcccaggctcaagcgattctcttgcctcagcctcctgagtactgagactacaggcgcccaccaccacacccagctaatttttgtaattttagtaaagatgggagttcaccattttggccagggtggtctcgaactcctggcctcaagtggtccgtcacgcttggtctggttctcattgtccttcagacctctggggatgtcagatatgcaagtctccagtaaatagagaacacggcctcaccctgcaggaggcctttggcgtggaagagacatgcccagtgaaggcttgagggaggtatggaagggactctgaactgaccctcagctcgtttggtttcttatccaggcttcgttggccagggctgttagggtgggattctcacctgcaaagtgagggaagggcactgcacgatcttgggctctgctagctgaagaggtggtggctccaggaaggagggctttgcttgccccaccgcacctacacacactcttcaccaagggtctgtgaagtgttcgtctcccacattggtggcttgtttctttagccatcttggctgtcacctggggcttggaagcattctttaatagaaactgaggtcctcatcgcatctattaactaccatagcacctgtaggtcatcacaacctgacaaggcctttgttttcgcctttgctccctttcctacccttgtttcctggcactcttgtacctaaggattctactaggaagctgatgaccttgccttgatttggggattcctggtgtgccgttacccatgtaggcccatctcggggaaagtgttacctcaccagttcaccggcctgttatatttccccccatagctctctcttcaaaggatgcctaagtggattcctattcagttgacggttgctgcgtgccaccagtcacatcctggtttgtctgttggggaattgctttctatttttttcagaaaaatttatttttacttttttgaaattttcaatttcataaccattccagaaaaattaatttatatttaaaatttacaggccaggtgcagtggctcacgcctatatttccaggactttgagaggctgaggcgggcggatcacctgaggtgaggagttcgagaccagcctggccaacatggtgaaacccccgtctctactaaaaatacaaaaattagcctaacatgatggcgcacacctgtaatctcagctattcaggtggctgaggctcaagaagcccttaaacccaggaggcagaggttccagtgagctgaaatcatgccactgcactccagcctgggcaacagagcgagactgtctcaaaaaaataaataaaatttacatacagtaaaattcattttggtgttcagttctgtggtttcataaaggcatggagtcacagatccaccgtcacagtcatacaggtctatcgtcccccaaattccctctctgccccaacctccaaccctttaattttgccttttccagaatgtcatgtaagtgaaattatactgtaggcaggcttcttccatttagcgtaaatcatttgaaattcattcacgtgttgcatgtcaactgttggatccttgtgtttaatgctgagtagcatccattatatggatgtgccaccgtttgtttatccattcttttatgtatcataatagcagcctttttagatatgtccccgttagacagtgaggcactagggattggagttgctaagtagcagagctgcttttttgttgttttttttttttgttttgtttttggagacaaagtcttgctctgtttcccaggctggagtgcaatggcgtgatcttggctcaccgcaacctccgcctcctcagttcaagtgatgctcctacctcagcctcccgagtagctggccttcatgcccagctaatttttgtatttttagtagagacaggatttcaccatgttggccaggctggtcttgaactcttgacctcaagtgatctgcccaccttggcctcccaaagtgctgggattacaggtgtgagccaccgcaccgggtccaagctgaattttgatcaaaccccaaatccagggttcttccccaccacatcaaggaactgattgggttaaacaacccaattagcatttcttcactgcccatccaagaggttgtcaggttcctagagttggtggagaattctcttttacctggtgcctgcggttggaaggaggagcaggtactccacagttaatgcctcaccatatgtgctcctctttactggtgtgatagcaggctcaccagatttagcatggttgggactgcccaaagcatacattatttcagcaaataaatttgtctgagttactcccggggttgactgcactgggttatcagtctgctagtgcagtggtgtagcaggggcaggaccagcctgtttcatgccctggaacaaccagccaggaaagatctaacccttgggccttcctcctcagtgatgtccgagctcagcgatgaagccagcgagccggaactcctgaaccgcagcttgtccatgtggcacgggctcgggacacaggtcagcggggaggagctggatgtccccctggatcttcacacagctgcttccattggccagtatgaagtggtgaaggagtgtgtgcagcggtaagagatctcggggaacttcctctcacattttgagcagcgcagtgatggcttcgatcccacgtgatggggctttgcacacagttgtggatgtttaatgcgtgtagaataggttaacctgcttatctcaggcagctgtcagtaagtattgatgctgagccctgacaaagaggccgtttttattcctaggaagaaaaagagggagtaaactttgatcagaagcttataaacagtcattctttaaccagactaattttattcactaattgcagaaatgcccaaacaaacaagcaaaataaaaataaagacagaaagtgatggcctggtgcggtggctcacacttgtaattccagcactttgggaggctgagatgggcgggtcacttgaggtcaggagtttgagaccattctggataacatgatgaaaccccatctctactaaaaatataaaagttagctgggtgtggtggcatgtacctgtaatcccagctactcaggaggctgaggcaggagaatcgcttgaacccgggaggtggaggttacagtgagctgagattgcgccactgcactctagcctgggcaacagagtgagactctgtctcaaaaacaaaaaaaagaaaaaagaaagtgatccctggccttcttttcccggagggttcattcgatccctgtgatccctgttcccctctagcttctgccatggaggaggagagaggctgggctttcagtgcctctggggaatgacctcccgacgtcactgcccacctgccctttgctaatctgtgtacaatagttagagacaatataaagcccctggcagggtccatggctgcgtcttgcccatagtaggatgtgatcatcttgtttttggaaaagggtcgtctcctcacttccacccccttatgttccacacacagcctaactctgtctcctggttctcatttgatattgtggtgcagcgacctctcttcctctctctgcgtgcctcttccagttcccagtgagccaaagcaaagcattgctgaagccccaggtctccggttcccaagttgtggccctcacttagacatacccagcccatggagtgctggtgcaccttggtacagggtggtctgttgcgctccctccacaggaggctctaggcataggcagctgggtatgcagtcagtacggcccctcaaagggtcacgtttggaattctcaggctcttaagtctttgggtgtcctgttaagatgcagagtccataaccgctccatagaggagcagggggaggcgtttgtgttgtgatgggattttgacactagctgaggtggaggcttgctgatagtaagcacaggatggggcctgaggggagctgggggcatcagaaggaaggggtggggctgaacgaggagtggtaagagagccccagggagatgctctgctgttgtgtaaaggaagatagtgttaggacgagctgggtgcattcgagccctgctgcagaggcatctccatgcagcccccctggccaggggctgccactgaaccctggtatcaggaccttctggaatggctgcccaggtgtgcatcccagagtcactgagggctgccaggcaatggaaggtagttgcctgctgtggtctaatatgtgaatcccggctgggcgcggtggctcacgcctgtaatccagcactttgggaggctaaggcgggtggatcacgaggtcaggagatcgagaccatcctggctaacacggtgaaaccccatctctactaaaaatacaaaaaactagctgggcgtagtggcgggcgcctgtagtcccagctacttgggaggctgaggcaggagaatggcgtgaacttgggaggcggagcttgcagtgagccgagatcgcgccactgcactccagcctgggcgacagagcgagactctgtctcaaaaaaacaacaaaaaagtgaatcccgtaaaagggacagatcctggggttcagtcaccagttgttatcccctctgcaggcaagaactggggaagggaaagaaggcctgtgggcgttaaccatgtaggatcccaggtaaccatgcaagtgggtattattttaaatgtgactcccttgtcccaaccccagagtcgcagctaggaagcccacagttttttcccatgggaaaatgcattgccagaattttaacagcaatcagtgagaaagatgggattctttggtcacagatttttcaagaatgtttctttaaggtgaggtgacaaaggatgaatcagtggcggtgggacttgtccacggtggagtcccttctttcctcactgctcctctccacccagcagtgggctagtagatgccaggcctgtggtggtcagggtttttcaactgtggctgtgttgacaatccaggctggatcattctttgctgtgggggctgtcctggacactgtgggatgtttagcggcagccttggcctccagcagcccttccctgcccagttgtgagaaccaaaaatgccttcacacattgccacatattccctggttgagtgccatctgcctatctggtggtgtgaaagagcatagctggccttgggctaggaggatgcgaaatcagagcaaggagacgaaggctcagggcctcacaaggcagtgtacgagcaactgtcagcatttttctgcctgcctgcctccaatccccacaacgtccagggtggcagataacttctgcttcctgtcaactcatcccgcctggcctagcctcgccaccagctttggtgaaccccacatgcgaggcggctggccatgtctagcatatcttgcgtttgtttaggagagagttagatttgaataagaagaatggtggtggctggaccccgctgatgtatgcctcctacattggccacgacacaatcgtgcacctgctgcttgaggcgggggtgagtgtgaatgtgccgaccccagaagggcagactccactgatgctggcctccagctgtggcaacgagagcatcgcctactttcttctccaggtgagctacgagggaactcaggcccagaaacctgaggggctccgtggccaccctgacagagatgcgaaccactgcaggccacggtgttcgtgtgtgctcgtgtaatcacttctgattcttgcagcatggccgcctggagggcgcccgccccacgcagaggagatgaggccgtaacgcacgttctgtgttctcttgaagcaaggtgcagagctagaaatgaaagacatccagggctggacagccctcttccactgtaccagcgccgggcaccagcacatggtcaggttcctcttggacagtggagccaatgccaacgtgaggtgattgccacatctttagtggccacaggagtggcctaggtgtcatctgactctaaggagggtggctctggaggcagctaaccagagtttagggccaccctgcttcggcacgagaggctcaagatgaggggtaggaccagagtccttccaggcacaggccttttcgtacatctgtgagatgcatctcttcaagccctctcagcttccttttctttatctgaaacccacctgggtcatacagttgtaagaattacatgttttattgtatgccaggggcctaacatactgaatggcatttaaatgtcatacattacatgcaaattccttccattttcttgctttttgtatggatgaggtgaggtgatgctttgaaacagtcatgaggccgggcgtggtggctcacgcctgtgatcccagctctttgggaggccgaggtaggcagatcacgaggtcaggagatcgagaccatcctggctaacatggtgaaaccccatctctactaaaaatacgaaaaaattagctgggcatggtgacgggcgcctgtagtcccagctactcgggaggctgaggcaagagaatggtgtgaacccgggaggtggagcttgcagtgagccgagattgcaccactgcactccagcctgggtgacagagcaagactccatctcaaaaaaaaaaaaacaaaaacaacagtcatgagttttggccgggctcagtggctcacacctgtaatcctagcactctgggaggccaaggcgggcagatcatgaggtcaggagttcgagaccagtctggccaacatggtgaaaccccgtctctactaaaaatacaaaaattagctgggcgtggtggcaggtgcctgtaatcccagctactcgggagtctgaggcgggagaatcacttgaaaccagaaggcagaggttgcagtgaactgagagatcgtgccactgcactccagcctgagcaacaagagcaaaactctgtctcaaaaacaaacaaaaaaccagtcatgagttttataagttggaagtgggattgttgtctaaagcttgtcatgataataatcacctttgaacaaacgcagcgggtaccaatgcagcacccaccctggctgtcattcattctaagacacctgataattttgtatgccactaagaaagaaaaaatatgctactaattaacattcaactcgcctgttgatttaaagatgttttctgacttgagagatgttaaaatatgaacactgtgtgtcttaagatggatgaaaaccagcatttcccatgcatggttcctgacttccaaaccagcatgagacaaggagggatttggaagccctctgaagacagtgccgagttagcataaccaagcatgaaaagcaagcttcaggagctaagcgtggcaaagatagcttagatcattagtacttgaacttttcagagtgggttcatggaggacgttgaacttgaagccaggatttggatgaatggatgggagatgctggctttctgtgaggaattagaacagctttttgaatatgattgaggtggagatttcagaggtagccagtgggaatagccaacaggtgggacgacaggcagacatctgtctttaggacaaagaccagccctggggacagacaccagaagagtaaatggagctgatgtgttatattcactgttctcatgtcacctgttaattctggaaagggacagtgttctacgcttagggatcggtgactcgtgcactgctcagggtttatcttcagcagggagtttttgcctggcggaacttgtctcttccaatcatctgactgtggcccacatcttgcagggagccgatatgtggatttactcccttgatggaagcagctgctgctggccatgagataatcgtgcagtattttctgaatcacgtaagtgaccctgattattagcatgtaatgtagtcacggcaaatgaggaatcatattactgaagtataagctattacagaattttcctttgcacagaaataactttcattcatttattcaacacattttcattatctattgacgcccggtgttgagtggtgcttaggcattaaggatacagtggtgagtagaaatagacacctattcctgtaataattttgaaaatactatctgaaaattatggaaaaatattttaaaagtaaatagcactcataatcctgtcacttagaaaaattatatagaataagaaggcagagatcctcctctctttttcaacctccctgatgcccacttggtttgagaaagagctgccctaggacttttcctctgctgtggaaagatgtgtctgtaggcaagtgtgtgcacattgctttgtgttttgaacaaagtgggattctacgtatagtctgtaacttagagacatcttatagacatcttatctttgtacagtattccgtgtacaatctgcctcagttaatttaatgagtttcttattagtagaaacttagtttttaacattttgcaattataaacagtgttccgggaatatccttttacacatagctttaatacatttgcagttatttctgtatgttgtatttctgttttattttattaatttatttttttgagacatggtgttgccctgtatcccaggctggagttcagtggcgagatcgtggctcactgcagcttcagcctcctgggctcaagcgatcctcctgcctcagcccccaagtagctgggactacaggtgcatgctaccatgccccggctaattatttaattttttttttttggtagagttgggggtctcagtatgttgtgcaggctagtcttgaattcctgagctcaagcgatcacctcagcctcccaaagtgctgggatcacaggtgcaagcctgtccacacagaaccttgtacataaatattcatagcagtattattcataattgccaaaaagtagaaaaacccacaagtccatctactgaggaattgataaacaaaatatatatctgtatagcaggatattattcggccctacaaagtaatgcagtactgctgcatgctgcggcaggggtgaaccctgatgcgttaggctgggctgggtgcggtggcgcacgccggtaatcccaacactttgggaggctgaggccagagggtcgcttcagccctggagttggaggttgcagtgagctatgattgcgccgccacactccattctgggtcacagagtggatcctgcctcaaaaagaaaaagaaaaggaaaacattcggctcagtgaaagaagccagacacaacaggccacacactaggtgatttcactcataggaaatgtccagaataagcaaatacatagacagaaaatagatgagtggtttcctgggtcttggggaatgggaagattggggtgataaaaatgtgctaaaattgtttgtggtgatggttgaacaactgtgaatatacgagaagccgttgaattgtacattgtaagtgggtgacttgttggtatgtggattatatctttataaggctgttaaacccaatggggggaagtgcaggcggtcctgatgaattcccactaccaaggttgtctgttgtcctgcccaccagtcatagacaaaggtgtccattttctcttgtcctcaccagtcctgatgtcagtcaaccttttgtcaatctggcgggtgaattgtagcgtctcattttagtttgtccttgttagagtagttgaaatttttttctttttttttttttttggagacagaagtcttgtgctgtgtcgcccaggctggaaggctggagtgcagtggcgtgatctcggctcactgcaacctctacctcccaagttcaagcagttcttctgcctcagcctcccgagtagctgggactgcaggcacccgcccgcacacctggctaattttttgtattttagtagagatgaggtttcaccatgttgcccaggctgctcttgaactcctgaactcaggcaatccacccaccttagcctcccaaagtgctaggattacaggcataagccactgcgcccagccagttgaacatttttaaattgatttcttagccatttgtatttcttttttttttttttttttgagactgagtctcactcagtcgcccaggctggagtacagtggcatgatctcagctcactgcaacctccacctcccaggtttaagagattgtcctgcctcagcctcccgagtagctgggactaaaaatacaaaaaatcccggctaattttttgtatttttagtagagacaaggtttcaccgtgttagccaggatggtctcgatctcctgacctcatgatctgcccgccctggcctcccaaagtgctgggattacaggtgtgagccactgtgcccggctggccatttgtatttctcttacgagctgtctatgtttattgcccaattttctattggatagtttgtttttttctcacttattggtgggaatttcttaaatagtgaaaaattcacatggtatctctttttaacaaagaattttgggacacaacatgcacatggtacacatgcagaccagaaggtgggtgcaccgcaggcctgtcccccaccctgcctgcgtctccttggcaccctccccacgggcgactctgggaatacacccacacatgctcatggtcctgccccatgtgcagctgctcccatcttgcattttttaaaaaacttaatcatgaagatttttctatattggtgtataaagagacggggccaggtgcattgtctcgctcctgtaatcccagcactttgagaggccaaggcagacagatcacttgaggtcaggagtttgagaccagcttggccaaggtggtgaaacccgcctctaccaaaaatacaaaaatacaaaatacaggtggctgacgctgtaatcccagctacttgggaggctgagacaggagaatcacttgaacctgggaggcagaggttgcgatgagccaagatgttgccactgcactccagcctgggtgacagagtgagactatctctaaataaataaataaataaataaataaataaatcaataaatcaataaagagatggggtcttgctctgtccctcaggctggagtggagtggtgcagtctcagctcactgcagccttgacctcctggtctcaagtgatcctcctgcctcagcctcccaagtagctgggattacaggtgcgtgccaccacgcccagccaatttttgtattttttttgtagagatggggttttgccacgttgcccaggctggtcttgaactcctgagctcaggcagttcgcctgcctcggtctcccaaagtgctgggattacaggcacgagccaacgcacccagcccctctcttttttttttttttttgagatggcgtcttgctctgttgcccaggctagagtgcagtggcacgatctcggctcactgcaacctcagacttccgggttcacaccattctcctgcctcagcctcccgagtagctgggaccacaggcgcccgccaccatgcccagctaatttttcatatttttagtagagacggggtttcaccgcgttagccaggatggtctcgatctcctgacctcgtgatccgcccaccttggcctcccaaagtgctgggattacaggcgtgagccaccgtgcctggcctctcttttttttttttttttttatggtggcatggtattccctgtagggatgaatcagagtttttttgtttgtttgtttgtttgttttgagatggagtctcgctctgtagccctggctggagtgcagtggcgcaatctcggctcattgcaacctctgcctcccaggttcaagcgattctcctgcctcagcctcctgagtagctgggattacaggcgtgtgccaccacgcccagctaattttgtatttttagtagacagggtttcggcatgttggtcaggatggtcttgaactcctgacctcaagtgatctaccactttggcctcccaaagtgctgagattacaggcatgagccactgcgcctggcctaccgttgacatttcttacacgtctttttaagcacatatgggaatttcttcaggagcttaggatgtgttcttcaaagtagagtctttgttgtgtgaggtgggttcagtcggtagtgggtagtgtaaacttgctttgttccatagtggtcctggttcacacccctccccttagggtgttagacttcttttttttttttgagatggagtctctctctgtcacccaggctggagtgcagtggcgcgatctcggctcactgcaacctctgcctcccaggttcaagcgattttcctgcctcagcctcccgagtagctgggactgtaggcactcgccaccatgcccagctaatttttgtatttttagtagagacagggtttcaccatgttggccaggatggtctcaatctcttgaccttgtgacccgcccgccttggtcttccaaagtgctgggattacaggcgtgagccaccgtgcctggccttttttttttttttttttttggggtggggtcttgctctgtccccaaggctggagtacagtggtgtgatctcagctcagtgcaacttctgactcccaggctcaagcaattcgcctggctcagcctcccgagtagctgggattccaggtgtgtgccaccatatccagctaatttttgtatttttagtggagacagggtttcaccatgttggccaggctggtctcgaactcctgacctcatgatctgtctgcctcagcctcccaaagtgctgggattacaggcgtgagccactgtgcctggccaggatgttagactttttggctccctggccatttgggtttctttttctgcaaataattatttttgtattttttatttattttttttatatagggtcttgctttgtcaccacactagagtgcagtggcctgatcatgggtcattgtagtctcaacctcctgggctgaagtaatccttctgcctcagcctcctcagtagctgggactacaggcacgcactaccacgcctggctgttttttttttgtagagacaaaaatctcactatgttgcccaggctggtcttgaactcctggcctcaagcaatcttcccaccttggcctcccaaagtgctggagttacagacctgagccaccatgcccggccagataattctttgacagataatcctgctgacatgaactagacttccttaagacacatcatagaatcaatagcccagaaccataaagagcctctacttgtaagtttagagtcattttaagtaaggtagaactggagatcataagagatatgtactcttataatttttgattgtatgtttgtttctttttgagacagagtctcactctgtttgcccatgctggagcacagtggcgcgatcatagtttgttgcagcctcaacctcccaggttcaagggatccttgcaactcagcctcctgagtagctgagaccacaagcgcatgctatcacactagctgatttgatttttttgtagagttggggtctcactaagttgcttaggctggtctcaaactcctggctgcaagtggtcctcccaccttggcctcccaaagcgctgggattacaggcaggaaccacggtgcttggccaacaatttgcatgcctttaccacattccccaaatgttaacatttcacctcattttcttatcagtctctttatgtataacatgcatatgttttctgaatcatttaaatgtaaattgtgacataatgccccttttcccctaaatatgtatttcctgagagtaagaatttcattatgtatttcctaaaagcaaaaatgttctctttcccagtcacacaaaattatcagactcaggaactcaacactgagttcttcctccagcacttgacaagaatcaaagtgttggttagtgactgctttgggggatggggcaggactggcagcaggtggcccgatggcctgggtggtttgcctgccagcgatgctggtgggcaagccctgcctggaagctcctctctcccacgtttttcctgccgcccagtagttagaccacctggagccagaggagggggcccacccggtttcccagcctgtccctccagagctgggctccatttctggaggtagagaatggggcaagtctgggcatcttgtgctctttgctaggggaggaaagggctgtggctgctttccttgtcccccatttcccttctgccagtggggccaagccccagcagctcagtcaggagaagaggatatggatctgtctgggcctctctctttaagagaaagttgattcgtgccttccggatagtcttgttccagggtttctaaactttctgatcccaccttcatgttaaaatgagttttgatcatgtgtctctttagtaatatggacattataaaataggaaaaaaaagtctcttaaagcctaagtagttaaaaatttattttcacatcaggcatagtggctcatgccagtaatcccagcacttttagaggccaaagtgggaagatcgcttgaggctggagttggagaccagtctgggcaatacagtgagaccttgtctctaaattaaaaaaaaaaaaaaaaaaaaaattggccaggcatggtggctcatgcctgtaatcccagcactttgggatgccaaggcaggtggatcacctgaggtcaggagttcaagaccagcctggccaacatggtgaaaccccattagcggggcgtggtggcgtgcccctgtagtcccagctacttgggaggctgaggcgggagaatcacttgaacccggaaggcagaggttgcagtgagccgagattgcgccattgcactccagcctgggtgacagagtgagactccgtctcaaaaaaaaaaagccagttgtggtgtgtgtttgtaatcccagggaggctgagaagggaggatcacttgagctggggaggtcagggttgcaatgagccagtgtaatccagcgtgggccacagagtgagattctgcctcaaaaacaaaaccaaaaatatataacgagttaaaatcctacagtaaagaggctactgttttattctggttaaaccttagggttccttctatcaaacttaaactagaattttttttttttcttgagatggagtcgccctctgtcgcccaggctggagtgcagcagcttactgcaatctctgcctcccgtgttgaagcgattctcctgcctcagcctcccgagtagctgggattacaggtgtgtgccaccactcccagctaacttttgtgtttttagtagatacaggctggtctcaaactcctgaccaggctggttgttggccaggctggtctcaaactcctgacctcaagtgatccgcccacctcagcctccaaaagtgctgggattacaggtgtgagcctctgtgcccagccaagaaattattttttatttttgagatagagtcttgcttcgtctgttgcccaggctggtgtgcagtggcgtgatcttggctcattgcaacttccacctcctggactcaggcaattctccttcctcagcttcctgagtagctgggagtacagacgtgtgccaccacgcccggctaatttttgtatttttagtagagatggggttttaccacgttttcccacattggccaggctggtcttgaactcctgacctcaggtgatccacccgtctcggcctaccaaagtgctgggattacaggcttgagccaccgtgcccagcttataaattattgttattatttattattatttttttgagatggaatctcagtctgtcgtcgaggctgtagtgcagtggcgcgatctcagctcactgcaacctccgcctcctggattcaaggatttctcctccctcagcctcctgagtagctgggatacaggcacgcaccaccacacctggctaatttttgtattttttagtagagacggggtttcaccacattgcccaggctggtctcgaactcatgacctatgatccacccaccttggtcccccaaagtgctgggattacaggcgtgagccactgtgcccggcctataaattattttttaaggcacaaagtctcataggtaatttttaatcagagtcaaaagtaggatggggggcactctagaaagtaaaactccttatactttgtgaaaacacagttttttgtcctgtatccctgcccagagaccacctctgcctcccccaccaactacatatgggggtcaaggttgaggccccctggtctaacgggagagacagttgccgtatgggtggtagcaaaactccttaagggttgtgatttttttttttttttttttttttgagttggagtctccgtgtgtcgcccaggctggagtccagtggtgcgatcttggctcactgcaacctccacctcctgggttcaagcgattctcctgcctcagccccccggagtagctgggactgcaggtgcccaccaccacgcccggctaatttctttttgtatttgtagtagagatgaggattcaccctgttggccaggctggtatggaactcctgaccttgtgctccgtccacctcggcctcccaaagtgctgggattacaggcatgagccacggcgcctggctgtgccttttttctcttaatgatgttttgtgcaccctagtccgtgtcaccgcaggtactcccacccaccacgtaaatgggcgggaggcgctctgttttctggatatgctctcacgtagctcattaatctcttattttaagttccttctgattctcactatgctgaatgccacagtgaaaattctaaattgtagtgtatgtcctgcattatttccttaggcgccgctgcacttcagcctgggtaacagagcaagatcctattaaaaaaaaaaaagcaaacatgcttatggtagtacattttaaaaacatagaagattggaaaattggaaaaatccccatcaaaaatagtaaataacttaaaaatagcaacattttgggtatgttaccttccaatattgttttctgtgtaatttttttggtctcattttgccggagttgtaatgtatatgtagttttgtatcatgatccttttttatttttttgagacaaggtctcgctctattgcccaggctggagtacagtggtgcgatctcagctcgctgcagcgtcaagctctgggacttaagtgatcctcctgcctcagcctcctgagtagctgggactacaggcatgtgccgccacaccctgctaattttttattaaagatgctccccctttccggggtcccgcctcctcctctgagctttggctctggcttccctgcctcccccagctgcctggtctgacaggagagaaggacagttacagtgtacagtgacaccaaaaacatgctgtattgattatagtttatttttttttcttgtagaggtgggttcatgctgtgttgcccaggttgttgtccaactcctgagccgagcgatccacctgccttggcctgtcaaatgctgggattacaggcatgagccacctcacttggccatgatcctttttcaacttgatcatacagctgtttgtaaatatcaccatctatggcaataacagaactgactgcttatccccctgagcattcaagttttctctaggtaggttttcattattgtgaatatgctgtgccaaacatcctttttttttttttttttttttttttgagacagagtctcactctgtcttcaggctggagtgcagtggcatgatctcagctcactgcagcctccgcttcccgggttcaagcaattctcctgcctcagcctcccgagtagctgagactataggcgttcaccaccacgcccggctaatttttgtatttttagtagagacggggtttcaccatgttggccaggatggtctcaatctcctgacctcgtgatctgcccacctcggcctcccaaagtgctgggattacaggcatgagccaccgcacccggcctgtgccaaacatctttgtgcactaaagccttttctgtatttagggttatttccttagggtcatggaagtggaattgttgcgctgcaagacctgtaaatacattatagagctttggatcaaagttacgaattctgcttcagaggatggtgctttcattctgactggtttaaaaggctgctttctttgaagacaagcgaagtgagtgggacacagcccaggcgcagaaggtgaaggctgggatctccgcatggtggctgccagccccctgcaagggaggtcatgagcgtgggagatgactccccagcccccagccctcctcatccttgtccctaagaagagagtgagagcaaaacttgtggctgcggtgcagacaagcctgcctctttctcatgcagatgtgatgtttcccacacagggaggcagtcagaaaccagcatatgcccttctgtcttcccagccagcagcccaggaagggcaggtgctttgaaggagaggcccctaaccccctttcacggacattcacagggagtcaaggtggacgcgagagaccacagtggagccacagcccggatgctggccaagcagtacggacacatgaagatcgtggccttgatggacacttactcgccctctctgcccaagagcctctatcggagcccaggtacccacacctgccagccgcgccctgctggggtctctggttgccttgagctttaggtgacctggcagagaaagatgtcccccgcttccccggctcccaccttctctgagatttggctctgcctcccccagctgcttacatgtcaaggttgaggcccctgctctaacaggagataaggatggttacgatggagagtggtacaaaaccaggctgttgtgaatgtagaggctttctgtagtatgcttgactaccgagtaggggcaggcccctcttagttttctgttttcactgtttcctgagctatggcttgttcattcttctatatgaacttgaatatcaacttgtctagctccttaaaaacagtattgatatttttactgagattgtgacaatgtataaattaactatatctttgtgttgttgtcttatccaagaacaagggatgacttcttgttccaatgtacttttgggtcttgcaggagggttttaaatttttcttcatctacattttgcatgtgacttaagtttattcctaagtgtttgatcatctttgtcgctattgtaaatggggttttccctatcattatatcctttttttccccccaactctcagggtattaattattcagtgctatttattttttatttcagtaggtttttggagaacaggtggtggttggatacgtgaataagtcctttagtggtgtcattatatcgtttcactgcatattgtcagtgcatttgaaggcagtggatttctgcaaacttttgttttttttttgatacgggagtttcgctcttgttgctcaggctggagtgcaatgaagcgatcttgcctcaccgcaacctcttcctcccaggttcaagcaattttgcctcagcctcccaggtagctgggattacaggcgtgcaccaccatgcccggctaattttttgtattttcagtagagatggggtttctccatgttggtcaggctggtctagaactcgcaacctcaggtgatccacccatctcagcctcccaaagtgctgggattacaggtgtgagccactgcactcagccctgcaaactaattttatattctgctaccttacagaattcttacattgttcaggttagttttgttattgattctttagggctttacaggtgtactaacatataatctttaagtatcgatggatacactgcttcctgctgattctcatgactctgactttgttgaattgcaccgttcttttgtttagttgctaacacctctagctcattgttcaacatagtggagatagtgagcctccttaccttggtcctgatcttagtggaaatgccacgttacatgagaggctgactgtaaaagggaaggcatatgttattttagcttattaacaaagtattcctcagttcttctattcctgagtggtgttttacaggagtaactattgaattgtgttcccatatctttggagacgatggtgaattttcatatggtagattgtcttcatgaacctcctaataatgaatcaaccttacattcttggcataaatcccacatgttgtactattttaatgtgtttttgaattctgtttattaatatttagtatttttctatggatattcagtcataagtgatactggtctatagttttctttcttctttttttttgtttttgaaatggagtcttgctctgttgcccaggctggactggagtggcgagatctcagctcactgcaacctccgcaacctccgcctcctgagttcaagcaattcttctgcctcagcctcccgagtagctgggatcacaggcgtgcaccactacacccagctaatttttgtatttttagtagagacggggtttcaccatgttggccaggctggtctcgaactcctgatctccagtgatccgcctgcctcagcctcccaaagtgctgggattacaggcgtgagccaccgctcccggcgtggtctatacttttctatttttgttctgtctatcaggtatgggtatcagtgtttacttcataaaaataatttggaagttttccttccttttttgtgttctaggacaatacacgtagcattagtgctacctggtcttagaagttttgatagaatcctcccatgaaaccatctggtctctttctgtgaggtggttcctcgataacagtttttctatttcttctatagagattggcctcctcatactttcttttcttatggggtcagttttggtaaattatattttcctgagagatcacttcatctaggatttcagacttatctgcagaggtctacaagataatattttctccctttttttttttttttttttgagacagagtttcactcttgttccccaggctggagtgcagtggctcgatcttgactcaccgcaacctctgcctcccgggttcaagtgattctcctgcctcagcgtcccaagtagatgggattacaggcatgcgctaccatgcctggataattttatgtttttagtagagacagggtttctccatgttggccgggctggtctcaaactcccgacctcaggtggtctgcccacctgggcctcccaaagtactgggattataggtgtgagccaccgcacccggccaatttttttctccttttaaaatattctgtttcagggccaggcgcggtggcttatgcctataatctcagcactttggaaggccgagttgggcggatcacctgaggtcgggagttcgagaccagcctgatcagtatggagaaaccccatctctactaaaaatataaaattagctgggcgtagtggtgcatgcctgtaatcccagctactcgggaggctgaggtgggagaatcccttgaacccgggaggcagaggttgaggtgagccgagatcgtgccattgcagtccagcctaggcaacaagagcgaaactctgtctcaaaaaaaaaaaaaaaaaaaaaattctgtttcaggctgggtgcagtggctcatgcctgtaatctcagcactttgggaggctgaggcgtgtggatcacttgaggtcaggagttcaagaccagcctggccaacatggtgaaaccccgtctccactaaaaatacaaaaataagccaatgtggtggtgtgcgccagctactctggaggctgaggcaggagaatcacttgaacccgggagggggagattgcagtaagccaaaatcacgccactgcactccagcttggcgacagagcgagactccatctcaaagaaaagtaaatagataaaataaaacaaaataaaatactctgtttcagtggttattttctcctgttattatctttttttggcatggaaaatattgatttattttttgtgacagggtcttgctttgtcacccaggctggagtccagtgacccaatctcgactcaatgcaacctccgcctcccaggctcaaaacgatccttctacctcagctctacgagtagctaggactgtaggtgcaccctaccacgcccagcttacgtttgtattttttgtagagaggtggttttgccatgttgaccaggctggtctcaagagtcctgagctcaagcaatccacccgcctcagcctcccaaagtgctgggactacaggcatgagctactgcacctgacctggaaaatatttatctcatttttaattgacacaaaataactacatatttatggggtacagtgtgtgatgttttgatacatgtatacactgtgtaatgatcaaattaaggtgattagcttatccatcacctcaaacatttatcatttcgaggtgagaacatttaaaatcatgtcttctagtagctattttgaggtataagctgttgttccgtatagtcactctactgtgaacaccagaacttctttcttcgatctgtaattttacacctattgaccaatctctcccactacctccccacccccaacctctgataatcactattctactctacatgtttgacatgagcttttaaaaatcctgtaaatgggtgacatcatgtagtcatgtagtcttttttgttgtttgtttggtttttgagacaggttctcgctttgtcacccaggctggagtgtggtggcataatcttggctcactgcagcctccaattcctgggctcaagtgatcctcctatctcagcctcccgagtagctggcactacaggcacctaccaccacacctggctaatgttttatttttttgtagagacggggtcttgctatactgaccaggttggttttgaactcctgggctcaagtgatcctctcgccttggcctcccagagtgttgggattacaagtgtgagtcaccacaacagctggcatttgtctttcttttctatgtctggcttattttactgaacatagtctcttccaggcttattcatgttgccacaaatgatcagatttcattctttatgtctgaataatattcaattgtgtatataaactcattttctgtcttcgttcatccactgatggacacaggttgattctctatctaggctactgtgaatactgcggcagtaaacatgagggtgtagacatctctttggtatactgatttcctttcttttggataaatacccagtagtggaattgctggatctcatttcttatattttttaatttttttttttttttgagatggagtttcgctcttgtttcctaggctggagtgcaatggcacgatcttggctcactgcaacctccacctcccgggttcaagcgattctcctgcctcagcctccctagtagctgggattacaggcatgtgccaccacgtctggctaattttgcatttttgggagagacagggtttctccatgttggtcagggtggtctcgaactcccgacataaggtggtccacccgactcggcctcccaaagtgctgggattacaggcatgaaccgctgcacccggcaaaaatttcttctattaaaaaaaatagagacagtgtctcagtatgttgcccaggctggtctcaaactcctgggcccaagcgatcctcccacctcagtctcccacagtgctgagattataggcatgagccactgcgcccggcctcacttcttattttgaatatttgtgtttgttctttttttttttttgagacagagtctcgctctgttgcccaggctggagtgcagtggcgcgatctcggctcactgcaacccccgcctcccaggttcaagcgattctcctgcctcagccttttgagtagctgggactacagggtgcccaccaccacacctggctaattttttttttgtatttttagtagagacagggtttcactgtgttagccaggatggtctcgatctcctcacctcgtgatctgcccacctcggcctcccaaactgctagaattacaggtgtgagccaccgtgcgcagcctcttcctttttttcttaagttaaatactagtactttgtctgtttagtggaaaaacaagaaaaacccatcggattttgatttattaatgagacctactgattgtctgtttaatttctgcttttatttttatttggcttactttgttgttctagttttttgagttggaaacttctttcattttcattgttgcccttttgttgctaaatgttagaggctgtgaatttttgctgattgctgctttaagtgtattctgggggttctgtatttaatactttccttgttatttttagaaattctgtaatttttatttatattttctccttcacccaggagttgtctaatagaagtattatgattgtttttgtttgttaatttctagatggaagggcctttttgatcttgcaattaatttctcatgttattctgattaactttaatgtgtctgatcagagagtgtttataattcttacatttacataacttccttgtcatcttatttatcatctactgatctatctatatatatatatatttttttcagatgtagtctcactctgtcacccaggctggagtgcccaagtgcgatcttgactcactgcaacctctgcctcccaggttcaagcgactctcctgcctcagcctcccgagtagttgggattccaggcatctgccaccacgcctggctcatttttttttgtatttttagtagggacagggtttcaccatgttggccaggttggtcttgaagtcctgacctcaagtgatccgcccacctcggcctcccaaagtgctgggattacaggcgtgagccaccgcgcccggccctgatcaatattttttagtgttccgtgttttgcttgagaagttgtattctctattatctgtatacagtttagcatatctgtgagtctatcttatttaggattatgtactcttagttcattttctacaaaattacctattagcgtgtttctgatttatgaaggaagttggtgcattttttggtgacagattttcataacttgttatagattcactgtgaattatggcttttagtattagaagtgtccttctggctgggcatggcccatacctgtaatccgagcactttgggaggccaaggcgggcagatcccctgaggtcaggagttcgagaccagtccagcctacatggtgaaaccttgtctctactcaaaatacacaaattagccaggcatggtggcacatacttacaatcccagctactcgggaggctgaggcaggagaatcacttgaacccgggaggcggaggttacaatgagccgagattgtgccactgcactccagcctaggtgacggagtgaaactctgtttcaaaaaaaaaaaaaaaaaagtgtccttccgtgtcatatttaatgtgttttgccctgaattccacgttgatagcaggattgcagccctggctcttttgtggtttccatctgcctgttctttttaagctgctctgagggtgtgttgggtgctgagattcacgcagctgccgttcccttgcttattgctgcctctttgcatttgtcttacagctccctccccttcagcttggatggaagcacagtctccctggagtgctatagatctttgagtgtgaggaggtgtgtgtccatatggctagctcagtcgccagagcttgagcctcgtcatggggaaggacagagtggcccacgttcagggcctgagctctccctctttgctggcctgccctgagttgtcctgtcagtttgcacctgagcgagcagctcctttctcagtgtcaggctcagcccagcctcttccctggcattgggattgtttcataataaacacagctcaggtggtaatgcaaaggacctttcccttcatttctgccccagcttacccactccacaaggagatctcatcatttcctcctgtatacaactcacgtatctcttaaaagtagaatcagatcagagccttatacaaatcaaatatgaaaaactgaaaagctacaaaataataaaagctctggtttgagctctgaaagctcagactgggaagtgatttgaaacagtttataatcatagcaaacacatgccatgctttagaaaatacaaaattgtggctgggcgctgtggctcactcctgtgatgccagcactttgtgggaggccaaggtgggcggatcacaaggtcaggagatcgagaccagcctggccaacatggtgaaaccccgtctctactaaaaatacaaaaacaagattagctgggcatggtggccgggtgcctgtagtcccagctacttgggagcctgaggcaggagagtggcgtgaacccaggaggtggagcttgcagtgagccgtgatcgcaccattgcactcctgcctgggtgacagagcaagactccgtctcaaaaaaataaagaaaaaaaaaagaaaatacagaattgcttaataagttgtttccagccgggcacagtggtaacgtgcctataatcccagcactttgcgaggctgaggtgggtggatcacctgaggtcaggagttcaagaccagcctaatatgatgaaaccccatctctactaaaatataaaaattagctgggtatggtggcatctgcctataattcccaactactcgggaggctgagataggagaattgcttgaacccaggaggcggaagttccagcctgggcagcaagagcaaaactccttctcaaaagaaaaaaaaaaaagttgtttccaaaggaagggattaggaaaaagtagttgtgacttatattaccatatattttaatgaagagatgggttttacttattcaaattagaacagaatttctgattatgaacaatacagacttatgaacaatttggcaaaccccaacagagataataaactcctggctgggcatggtggctcatgcctgtaatcccagcactttgggaggccaaggcaggcagatcaggagtttgagaccagcctggccaacatggcaaaagcctgtgtctactgaaaaagaaaagaaaaaaaacactgggcatggtggcacgcatctgtaaccgcagctacttggaagggtgaggcgtgagaatcgctagaacccaggaggcggaggttgcagtgagtgagccaagatcatgccattacacttcagctcgggggacagagtgagactctgtctcaagaaaaatgaaacttcccatcctcactaactttgcagctccctgtggcccattggagcagcgccccggcctgttagggcatttctcagaagtgatgccctggcagatacccttctccttaatttaacaaaaccggcgacagtcactttctttcagtttgccgtaaggattagtaaatgagtccattactgaacacactatcttaatcttggtgtttgatcacagaaaagtacgaagatctgagctcttctgacgagtcctgccctgctcctcagagacagaggccttgccggaagaagggtgtcagcatccacgagggaccgcgagccctggccaggatcacaggcattggcctgggcggcagagccccacggcctcgctatggtgagtggcccgcgtttcccgagggctctttctcattgcataccaggattttgtgttggcaagaatggaatagctcttaggctcctgaaatgtgggtcgctggacctcaggtggcagcgggacaggtggcccagctttcatgctcagggagactcaggattgagtcctgtgatggaaatgcattggtcacggactagctcttgttttttgctttatctcctggagtttccttttcgttggttaaatttaggaatagaactttctctcctgcagcagaaatgtagctaaggtcagatttcattcatcacataggtgggttggctcatacagggaggaggcaaagcgtgaagttcacttccctgccctgcccataccagctgggtcgggtgcgctgctgggggcaggaggccaagaaaacaggccctgctgttttctcagggcgatgaagttgtactcagaccctcctgagagagggcccgcttgttgacttgctggtgaagaatcctagcctttgggttttccagtctcgttcattctcagattcccagccccagggtgttgagcgttttgctcttggggagtgctggggtttctttttaggggagttgggtttggtgcctactctctattgctgtggtctgtcccagagctcagctggaggtgtgagttatgtcttcctttgatggctgtcacccactcatagccaggccaaggctgctggtctcacaggcctggtggctggtccttctcgggagcaaggcctctttgaggccaggacttggaagagtgagagtagacagtgtttcagccaggggtccaccagtaattgaattcccttctagaccccaggaacaagcagatgtgcagacttctgtcttcccaagcctgggtgctgggttgggaactggagacccaccttctcccatcatcctgggaagggtgagctgactgggccactgggaaggcctctctcgagctgctggccagccccaccacagcatgagggcccgcccgtgtcccgtccgctgagctgtgagcactggctctgggacaccgggctggtcgttctgagtggcagagtctcttccttccaaaaggtccctgccacctgctacagcctgaggtgtggtggggacaggaaggaagctgtcatcctggggctgagttggtaattaatctatatagctgtacaacaaatgctttaacaaaatcatacatgtctgaagccgcttgtgtgcggttctttgtatgtatccacagagaagtaatcatggtggtggtctcaggtgtggtatttcaggggatttttgttttctcataccttgtgaaatttaaattttctataagtgcatatattttatttgccagtaattaagaaatttggggccgggcgcagtggctcacgcctgtaatcccagcactttgggaggccgaggcaggtggatcaagagatccagaccatcctggccaacatggtgaaatcccatctttactaaaaatgcaaaaattagctgggcatggtagtacgtgcctataatcccagctactcgggaggctgaggcaggagaatcggttgaacccgggaggcggaggttgcagtgagccgagattgtgccactgcactccagtctggtgacagagcaagactccgtctcaaaaaaaaaaaaaaaaaattgggggggccaggtgcagtggcttatacctgtaatcccagcactttggaaggctgaggtaggaagattgcttgggctcaggagttgtgagaccagcctgggcaatgtagcaagaccctatctctacaaaaaattttgaaaattagccagatatggtggcccatgcctgtagccccagttacatgagaggctgaggtggaaggattgcttgagcccaggaggtcaaggctgtagtgacccatgatggtgccattgcattccagtctggataacacagcaagaccctgtctcaaaaacagtttagggggcaatgataaatagcatgtgctgattagaaaaacttctccataactaggaaaatacgtaaagaggaaagtaagttccccatggtcccatcaaccagtcctttgggttcttttttgagacagggtttcactgtagcccaggctggagtgcagtggcacgatcatagctcactgaaggctccagttcctgagctcaagcgatcctcctgtctcagcctcccaagtagctgagattacagacatgtgccaccgtgactggtcaagtcagtctttttatgtaaaggggcaaaactggagtgaaattgcctggtatacatgcccctttttctgcttggttttagaggcaggtagagttaggtaatttcatattattgttgttaatttttacctcaaggcctttttccttcctgctcagccaggtctctttttcgccggggttgactgaccagaggaggcccgctaagcgcctgtggttaaaggtcacagggacataaagacacgtggtcgatgggtgtctgtgtgaggtcattagctacctcctgctaaaaggaacactcatggtatagttttctctggtcaggcatctgtaaatacagctgaccatttgctacgttttccccttggaaaagaaatggagagggcccaggcttgacctggctgccagccctcgccccaccaggcacttgcttgggccactgactgaccctcagagcatcttttccacccacacaccacagatagagccatgccaggtcgcaggggcaagtaggtgaggtcatgactgggaagtcacctgcctccatcctgggcctcggcctctgaggaggtttcactttggagttccctgggcttatgggccccattctgtacacagagcaggctcctccccgtggctatgtcaccttcaacagcagtggcgagaaccccctggaagaagagggcctctgctgccgggatgtcacctcccccatcaatgagcgggatgtggagagcagcagcagcagcagcagtcggggtacgtgcacccccacccatccggcccgtggctcaggcaggtcctggagctcctgtgtgcccatccccacttatcccctgggcctggcgctggacacagccatccagcagaggacaggaaaggggtaggtgtggacggccctggttcttgtgaggaatgggagaagcttctggtccagcatccccgtgcggcttaagggagccgttccacagcaacaggtttagctccttgcttgggagcccctgaggctttcagggcaggccccagtaggaatgtctgttataactgcacctccgtgcagcagctgtttccatagtgcccaccgtgtgccaagcactgctccgggtgcttgggatttatcagtgaacaaaaaagacagaagccctgcccgtctgtatagaggggagggtttaggacaggcaggaagtttgaaatataaggaagcaaccgctgcaggccccaaggagtgccctggtggaggcggctcagcccggggcacgcccatgcgcagcacctcggtgagggctgcaggcggacgccctgtcttcccgccctcagaggaacatgctttctgtgccaacctggggcccgtccagagcagcagcagcagcgagggcctggccagagcccaggggctcagcagcgaagcttctgtggagagcaacgaggtacggattctttctttcttggtctcccatagccggtccctggctgggatgcctgacatcccccagttactttaagatgagcatgtatgtaagaagcagctgctgcacgtgtgtgctgcactgggacgtgctgtgtccagggtctggcttctcagacgacagcgaacgcaccggaagcccctgtgtggcgggtggggggtttcacgaagcctctcaagcccctgtgtggcgggtgggggtttcaccaaggctctcaagttagcccgcgcactctttcagatgcacgcctctcactgcaggactcggatcatgcctgtaaaagctcagctcgcaaacaagctaaaagttacatgaagaccaagaatcctgacagccagtggcct

SEQ ID NO: 15404 - DNA, 37708 bp, Homo sapiens
agctgtttggggggggttggcgacggcagcccgagggcggcgcaaggcctgaggcccagcacaggtgggttccgcggcggcccggccccagcacttgccggcacctgcagcccgcctagacccggcgctcgggcgtcccgcgctgcacttgctcgccgcgtgactggaggaccgagcccccacattttctttatgtggttgtggtgggggcacagtaatgccctgtgcgccgtagcgttcctgtggggatgtggccggggggcgtcgggaagcgtcactgctgtgagttacgggtttgtcggccagggacccgccccggggccagtgagctacctttgcgatgcggttccacggggcgagagggggtgcctgggtgctttcacagacctcctctgtgggcgtgacagttaccaccagcatcacatttgttaagatttttaaaaattttttaatttttgtgggtacgtagtaggtgtatatatttatggcgtatatgagagattttgatacaggcatgcagttcgtaataatcacatgtaaaatgggggtctccatcccttcaagcatttatcctttgtgttacaaacaatatgattatactctttgaattatttttaaatgtgcagccgggcgcggtggctcactcacgcctgtaatcctagcactttgggaggcaaaggcgggcggatcacctgaagtcaaggatttgagaccagcctggccaacatggggacacttcgtctctactaaacatacgaaaactaggctggcatggtggctcatacctgtaatctcagctactcgggaagctgaggcaggagaatcgcttgaacccaggaggcggaggttgcattgagccgagatcacgccgctgcactctagcctgggtaacagagtgagattatgtctcaaaaaaaataataataaataaataaaatgtgcaattagattatattgactatagtcaccctgttgtgcggtcaaatactagatctttttttttttttttttttttttgagacggagtctcgctttgtcgcccaggctggagtgcagtggcttgatcaaatactagatcttattcattctgttttttttgtatccattaagcatccccaccctccactacccttcccagccttggttacactagaagtaaccatccttctactttctatgtccatgagttcagttgttttgatttttagataaccacaaataattgagaacatgcaatatttatctttctgtgcctggcttatttcactaaacataacgatctccgcttccatccatgtttttgcaaatgataggatctcattctttttttatggctgaatagtactccattgtgtctaagtaccacattttctttaggattcactgtaaaggtaacagatacttagcattttcagaatggacagaaccaaaaagttgaatgaaaactaaaacgtcttatctctaatgctactttacaccacaccactcgggatgggacattttagttttcactttagtgttttttttttgtttttttttttgagacagaatttcgctctgttgcccaggctggagtgcagtggcttgagctcggctcactgcaatcgcctcccaggctcaagcgattctcttgcctcagcctcctgagtactgagactacaggcgcccaccaccacacccagctaatttttgtaattttagtaaagatgggagttcaccattttggccagggtggtctcgaactcctggcctcaagtggtccgtcacgcttggtctggttctcattgtccttcagacctctggggatgtcagatatgcaagtctccagtaaatagagaacacggcctcaccctgcaggaggcctttggcgtggaagagacatgcccagtgaaggcttgagggaggtatggaagggactctgaactgaccctcagctcgtttggtttcttatccaggcttcgttggccagggctgttagggtgggattctcacctgcaaagtgagggaagggcactgcacgatcttgggctctgctagctgaagaggtggtggctccaggaaggagggctttgcttgccccaccgcacctacacacactcttcaccaagggtctgtgaagtgttcgtctcccacattggtggcttgtttctttagccatcttggctgtcacctggggcttggaagcattctttaatagaaactgaggtcctcatcgcatctattaactaccatagcacctgtaggtcatcacaacctgacaaggcctttgttttcgcctttgctccctttcctacccttgtttcctggcactcttgtacctaaggattctactaggaagctgatgaccttgccttgatttggggattcctggtgtgccgttacccatgtaggcccatctcggggaaagtgttacctcaccagttcaccggcctgttatatttccccccatagctctctcttcaaaggatgcctaagtggattcctattcagttgacggttgctgcgtgccaccagtcacatcctggtttgtctgttggggaattgctttctatttttttcagaaaaatttatttttacttttttgaaattttcaatttcataaccattccagaaaaattaatttatatttaaaatttacaggccaggtgcagtggctcacgcctatatttccaggactttgagaggctgaggcgggcggatcacctgaggtgaggagttcgagaccagcctggccaacatggtgaaacccccgtctctactaaaaatacaaaaattagcctaacatgatggcgcacacctgtaatctcagctattcaggtggctgaggctcaagaagcccttaaacccaggaggcagaggttccagtgagctgaaatcatgccactgcactccagcctgggcaacagagcgagactgtctcaaaaaaataaataaaatttacatacagtaaaattcattttggtgttcagttctgtggtttcataaaggcatggagtcacagatccaccgtcacagtcatacaggtctatcgtcccccaaattccctctctgccccaacctccaaccctttaattttgccttttccagaatgtcatgtaagtgaaattatactgtaggcaggcttcttccatttagcgtaaatcatttgaaattcattcacgtgttgcatgtcaactgttggatccttgtgtttaatgctgagtagcatccattatatggatgtgccaccgtttgtttatccattcttttatgtatcataatagcagcctttttagatatgtccccgttagacagtgaggcactagggattggagttgctaagtagcagagctgcttttttgttgttttttttttttgttttgtttttggagacaaagtcttgctctgtttcccaggctggagtgcaatggcgtgatcttggctcaccgcaacctccgcctcctcagttcaagtgatgctcctacctcagcctcccgagtagctggccttcatgcccagctaatttttgtatttttagtagagacaggatttcaccatgttggccaggctggtcttgaactcttgacctcaagtgatctgcccaccttggcctcccaaagtgctgggattacaggtgtgagccaccgcaccgggtccaagctgaattttgatcaaaccccaaatccagggttcttccccaccacatcaaggaactgattgggttaaacaacccaattagcatttcttcactgcccatccaagaggttgtcaggttcctagagttggtggagaattctcttttacctggtgcctgcggttggaaggaggagcaggtactccacagttaatgcctcaccatatgtgctcctctttactggtgtgatagcaggctcaccagatttagcatggttgggactgcccaaagcatacattatttcagcaaataaatttgtctgagttactcccggggttgactgcactgggttatcagtctgctagtgcagtggtgtagcaggggcaggaccagcctgtttcatgccctggaacaaccagccaggaaagatctaacccttgggccttcctcctcagtgatgtccgagctcagcgatgaagccagcgagccggaactcctgaaccgcagcttgtccatgtggcacgggctcgggacacaggtcagcggggaggagctggatgtccccctggatcttcacacagctgcttccattggccagtatgaagtggtgaaggagtgtgtgcagcggtaagagatctcggggaacttcctctcacattttgagcagcgcagtgatggcttcgatcccacgtgatggggctttgcacacagttgtggatgtttaatgcgtgtagaataggttaacctgcttatctcaggcagctgtcagtaagtattgatgctgagccctgacaaagaggccgtttttattcctaggaagaaaaagagggagtaaactttgatcagaagcttataaacagtcattctttaaccagactaattttattcactaattgcagaaatgcccaaacaaacaagcaaaataaaaataaagacagaaagtgatggcctggtgcggtggctcacacttgtaattccagcactttgggaggctgagatgggcgggtcacttgaggtcaggagtttgagaccattctggataacatgatgaaaccccatctctactaaaaatataaaagttagctgggtgtggtggcatgtacctgtaatcccagctactcaggaggctgaggcaggagaatcgcttgaacccgggaggtggaggttacagtgagctgagattgcgccactgcactctagcctgggcaacagagtgagactctgtctcaaaaacaaaaaaaagaaaaaagaaagtgatccctggccttcttttcccggagggttcattcgatccctgtgatccctgttcccctctagcttctgccatggaggaggagagaggctgggctttcagtgcctctggggaatgacctcccgacgtcactgcccacctgccctttgctaatctgtgtacaatagttagagacaatataaagcccctggcagggtccatggctgcgtcttgcccatagtaggatgtgatcatcttgtttttggaaaagggtcgtctcctcacttccacccccttatgttccacacacagcctaactctgtctcctggttctcatttgatattgtggtgcagcgacctctcttcctctctctgcgtgcctcttccagttcccagtgagccaaagcaaagcattgctgaagccccaggtctccggttcccaagttgtggccctcacttagacatacccagcccatggagtgctggtgcaccttggtacagggtggtctgttgcgctccctccacaggaggctctaggcataggcagctgggtatgcagtcagtacggcccctcaaagggtcacgtttggaattctcaggctcttaagtctttgggtgtcctgttaagatgcagagtccataaccgctccatagaggagcagggggaggcgtttgtgttgtgatgggattttgacactagctgaggtggaggcttgctgatagtaagcacaggatggggcctgaggggagctgggggcatcagaaggaaggggtggggctgaacgaggagtggtaagagagccccagggagatgctctgctgttgtgtaaaggaagatagtgttaggacgagctgggtgcattcgagccctgctgcagaggcatctccatgcagcccccctggccaggggctgccactgaaccctggtatcaggaccttctggaatggctgcccaggtgtgcatcccagagtcactgagggctgccaggcaatggaaggtagttgcctgctgtggtctaatatgtgaatcccggctgggcgcggtggctcacgcctgtaatccagcactttgggaggctaaggcgggtggatcacgaggtcaggagatcgagaccatcctggctaacacggtgaaaccccatctctactaaaaatacaaaaaactagctgggcgtagtggcgggcgcctgtagtcccagctacttgggaggctgaggcaggagaatggcgtgaacttgggaggcggagcttgcagtgagccgagatcgcgccactgcactccagcctgggcgacagagcgagactctgtctcaaaaaaacaacaaaaaagtgaatcccgtaaaagggacagatcctggggttcagtcaccagttgttatcccctctgcaggcaagaactggggaagggaaagaaggcctgtgggcgttaaccatgtaggatcccaggtaaccatgcaagtgggtattattttaaatgtgactcccttgtcccaaccccagagtcgcagctaggaagcccacagttttttcccatgggaaaatgcattgccagaattttaacagcaatcagtgagaaagatgggattctttggtcacagatttttcaagaatgtttctttaaggtgaggtgacaaaggatgaatcagtggcggtgggacttgtccacggtggagtcccttctttcctcactgctcctctccacccagcagtgggctagtagatgccaggcctgtggtggtcagggtttttcaactgtggctgtgttgacaatccaggctggatcattctttgctgtgggggctgtcctggacactgtgggatgtttagcggcagccttggcctccagcagcccttccctgcccagttgtgagaaccaaaaatgccttcacacattgccacatattccctggttgagtgccatctgcctatctggtggtgtgaaagagcatagctggccttgggctaggaggatgcgaaatcagagcaaggagacgaaggctcagggcctcacaaggcagtgtacgagcaactgtcagcatttttctgcctgcctgcctccaatccccacaacgtccagggtggcagataacttctgcttcctgtcaactcatcccgcctggcctagcctcgccaccagctttggtgaaccccacatgcgaggcggctggccatgtctagcatatcttgcgtttgtttaggagagagttagatttgaataagaagaatggtggtggctggaccccgctgatgtatgcctcctacattggccacgacacaatcgtgcacctgctgcttgaggcgggggtgagtgtgaatgtgccgaccccagaagggcagactccactgatgctggcctccagctgtggcaacgagagcatcgcctactttcttctccaggtgagctacgagggaactcaggcccagaaacctgaggggctccgtggccaccctgacagagatgcgaaccactgcaggccacggtgttcgtgtgtgctcgtgtaatcacttctgattcttgcagcatggccgcctggagggcgcccgccccacgcagaggagatgaggccgtaacgcacgttctgtgttctcttgaagcaaggtgcagagctagaaatgaaagacatccagggctggacagccctcttccactgtaccagcgccgggcaccagcacatggtcaggttcctcttggacagtggagccaatgccaacgtgaggtgattgccacatctttagtggccacaggagtggcctaggtgtcatctgactctaaggagggtggctctggaggcagctaaccagagtttagggccaccctgcttcggcacgagaggctcaagatgaggggtaggaccagagtccttccaggcacaggccttttcgtacatctgtgagatgcatctcttcaagccctctcagcttccttttctttatctgaaacccacctgggtcatacagttgtaagaattacatgttttattgtatgccaggggcctaacatactgaatggcatttaaatgtcatacattacatgcaaattccttccattttcttgctttttgtatggatgaggtgaggtgatgctttgaaacagtcatgaggccgggcgtggtggctcacgcctgtgatcccagctctttgggaggccgaggtaggcagatcacgaggtcaggagatcgagaccatcctggctaacatggtgaaaccccatctctactaaaaatacgaaaaaattagctgggcatggtgacgggcgcctgtagtcccagctactcgggaggctgaggcaagagaatggtgtgaacccgggaggtggagcttgcagtgagccgagattgcaccactgcactccagcctgggtgacagagcaagactccatctcaaaaaaaaaaaaacaaaaacaacagtcatgagttttggccgggctcagtggctcacacctgtaatcctagcactctgggaggccaaggcgggcagatcatgaggtcaggagttcgagaccagtctggccaacatggtgaaaccccgtctctactaaaaatacaaaaattagctgggcgtggtggcaggtgcctgtaatcccagctactcgggagtctgaggcgggagaatcacttgaaaccagaaggcagaggttgcagtgaactgagagatcgtgccactgcactccagcctgagcaacaagagcaaaactctgtctcaaaaacaaacaaaaaaccagtcatgagttttataagttggaagtgggattgttgtctaaagcttgtcatgataataatcacctttgaacaaacgcagcgggtaccaatgcagcacccaccctggctgtcattcattctaagacacctgataattttgtatgccactaagaaagaaaaaatatgctactaattaacattcaactcgcctgttgatttaaagatgttttctgacttgagagatgttaaaatatgaacactgtgtgtcttaagatggatgaaaaccagcatttcccatgcatggttcctgacttccaaaccagcatgagacaaggagggatttggaagccctctgaagacagtgccgagttagcataaccaagcatgaaaagcaagcttcaggagctaagcgtggcaaagatagcttagatcattagtacttgaacttttcagagtgggttcatggaggacgttgaacttgaagccaggatttggatgaatggatgggagatgctggctttctgtgaggaattagaacagctttttgaatatgattgaggtggagatttcagaggtagccagtgggaatagccaacaggtgggacgacaggcagacatctgtctttaggacaaagaccagccctggggacagacaccagaagagtaaatggagctgatgtgttatattcactgttctcatgtcacctgttaattctggaaagggacagtgttctacgcttagggatcggtgactcgtgcactgctcagggtttatcttcagcagggagtttttgcctggcggaacttgtctcttccaatcatctgactgtggcccacatcttgcagggagccgatatgtggatttactcccttgatggaagcagctgctgctggccatgagataatcgtgcagtattttctgaatcacgtaagtgaccctgattattagcatgtaatgtagtcacggcaaatgaggaatcatattactgaagtataagctattacagaattttcctttgcacagaaataactttcattcatttattcaacacattttcattatctattgacgcccggtgttgagtggtgcttaggcattaaggatacagtggtgagtagaaatagacacctattcctgtaataattttgaaaatactatctgaaaattatggaaaaatattttaaaagtaaatagcactcataatcctgtcacttagaaaaattatatagaataagaaggcagagatcctcctctctttttcaacctccctgatgcccacttggtttgagaaagagctgccctaggacttttcctctgctgtggaaagatgtgtctgtaggcaagtgtgtgcacattgctttgtgttttgaacaaagtgggattctacgtatagtctgtaacttagagacatcttatagacatcttatctttgtacagtattccgtgtacaatctgcctcagttaatttaatgagtttcttattagtagaaacttagtttttaacattttgcaattataaacagtgttccgggaatatccttttacacatagctttaatacatttgcagttatttctgtatgttgtatttctgttttattttattaatttatttttttgagacatggtgttgccctgtatcccaggctggagttcagtggcgagatcgtggctcactgcagcttcagcctcctgggctcaagcgatcctcctgcctcagcccccaagtagctgggactacaggtgcatgctaccatgccccggctaattatttaattttttttttttggtagagttgggggtctcagtatgttgtgcaggctagtcttgaattcctgagctcaagcgatcacctcagcctcccaaagtgctgggatcacaggtgcaagcctgtccacacagaaccttgtacataaatattcatagcagtattattcataattgccaaaaagtagaaaaacccacaagtccatctactgaggaattgataaacaaaatatatatctgtatagcaggatattattcggccctacaaagtaatgcagtactgctgcatgctgcggcaggggtgaaccctgatgcgttaggctgggctgggtgcggtggcgcacgccggtaatcccaacactttgggaggctgaggccagagggtcgcttcagccctggagttggaggttgcagtgagctatgattgcgccgccacactccattctgggtcacagagtggatcctgcctcaaaaagaaaaagaaaaggaaaacattcggctcagtgaaagaagccagacacaacaggccacacactaggtgatttcactcataggaaatgtccagaataagcaaatacatagacagaaaatagatgagtggtttcctgggtcttggggaatgggaagattggggtgataaaaatgtgctaaaattgtttgtggtgatggttgaacaactgtgaatatacgagaagccgttgaattgtacattgtaagtgggtgacttgttggtatgtggattatatctttataaggctgttaaacccaatggggggaagtgcaggcggtcctgatgaattcccactaccaaggttgtctgttgtcctgcccaccagtcatagacaaaggtgtccattttctcttgtcctcaccagtcctgatgtcagtcaaccttttgtcaatctggcgggtgaattgtagcgtctcattttagtttgtccttgttagagtagttgaaatttttttctttttttttttttttggagacagaagtcttgtgctgtgtcgcccaggctggaaggctggagtgcagtggcgtgatctcggctcactgcaacctctacctcccaagttcaagcagttcttctgcctcagcctcccgagtagctgggactgcaggcacccgcccgcacacctggctaattttttgtattttagtagagatgaggtttcaccatgttgcccaggctgctcttgaactcctgaactcaggcaatccacccaccttagcctcccaaagtgctaggattacaggcataagccactgcgcccagccagttgaacatttttaaattgatttcttagccatttgtatttcttttttttttttttttttgagactgagtctcactcagtcgcccaggctggagtacagtggcatgatctcagctcactgcaacctccacctcccaggtttaagagattgtcctgcctcagcctcccgagtagctgggactaaaaatacaaaaaatcccggctaattttttgtatttttagtagagacaaggtttcaccgtgttagccaggatggtctcgatctcctgacctcatgatctgcccgccctggcctcccaaagtgctgggattacaggtgtgagccactgtgcccggctggccatttgtatttctcttacgagctgtctatgtttattgcccaattttctattggatagtttgtttttttctcacttattggtgggaatttcttaaatagtgaaaaattcacatggtatctctttttaacaaagaattttgggacacaacatgcacatggtacacatgcagaccagaaggtgggtgcaccgcaggcctgtcccccaccctgcctgcgtctccttggcaccctccccacgggcgactctgggaatacacccacacatgctcatggtcctgccccatgtgcagctgctcccatcttgcattttttaaaaaacttaatcatgaagatttttctatattggtgtataaagagacggggccaggtgcattgtctcgctcctgtaatcccagcactttgagaggccaaggcagacagatcacttgaggtcaggagtttgagaccagcttggccaaggtggtgaaacccgcctctaccaaaaatacaaaaatacaaaatacaggtggctgacgctgtaatcccagctacttgggaggctgagacaggagaatcacttgaacctgggaggcagaggttgcgatgagccaagatgttgccactgcactccagcctgggtgacagagtgagactatctctaaataaataaataaataaataaataaataaatcaataaatcaataaagagatggggtcttgctctgtccctcaggctggagtggagtggtgcagtctcagctcactgcagccttgacctcctggtctcaagtgatcctcctgcctcagcctcccaagtagctgggattacaggtgcgtgccaccacgcccagccaatttttgtattttttttgtagagatggggttttgccacgttgcccaggctggtcttgaactcctgagctcaggcagttcgcctgcctcggtctcccaaagtgctgggattacaggcacgagccaacgcacccagcccctctcttttttttttttttttgagatggcgtcttgctctgttgcccaggctagagtgcagtggcacgatctcggctcactgcaacctcagacttccgggttcacaccattctcctgcctcagcctcccgagtagctgggaccacaggcgcccgccaccatgcccagctaatttttcatatttttagtagagacggggtttcaccgcgttagccaggatggtctcgatctcctgacctcgtgatccgcccaccttggcctcccaaagtgctgggattacaggcgtgagccaccgtgcctggcctctcttttttttttttttttttatggtggcatggtattccctgtagggatgaatcagagtttttttgtttgtttgtttgtttgttttgagatggagtctcgctctgtagccctggctggagtgcagtggcgcaatctcggctcattgcaacctctgcctcccaggttcaagcgattctcctgcctcagcctcctgagtagctgggattacaggcgtgtgccaccacgcccagctaattttgtatttttagtagacagggtttcggcatgttggtcaggatggtcttgaactcctgacctcaagtgatctaccactttggcctcccaaagtgctgagattacaggcatgagccactgcgcctggcctaccgttgacatttcttacacgtctttttaagcacatatgggaatttcttcaggagcttaggatgtgttcttcaaagtagagtctttgttgtgtgaggtgggttcagtcggtagtgggtagtgtaaacttgctttgttccatagtggtcctggttcacacccctccccttagggtgttagacttcttttttttttttgagatggagtctctctctgtcacccaggctggagtgcagtggcgcgatctcggctcactgcaacctctgcctcccaggttcaagcgattttcctgcctcagcctcccgagtagctgggactgtaggcactcgccaccatgcccagctaatttttgtatttttagtagagacagggtttcaccatgttggccaggatggtctcaatctcttgaccttgtgacccgcccgccttggtcttccaaagtgctgggattacaggcgtgagccaccgtgcctggccttttttttttttttttttttggggtggggtcttgctctgtccccaaggctggagtacagtggtgtgatctcagctcagtgcaacttctgactcccaggctcaagcaattcgcctggctcagcctcccgagtagctgggattccaggtgtgtgccaccatatccagctaatttttgtatttttagtggagacagggtttcaccatgttggccaggctggtctcgaactcctgacctcatgatctgtctgcctcagcctcccaaagtgctgggattacaggcgtgagccactgtgcctggccaggatgttagactttttggctccctggccatttgggtttctttttctgcaaataattatttttgtattttttatttattttttttatatagggtcttgctttgtcaccacactagagtgcagtggcctgatcatgggtcattgtagtctcaacctcctgggctgaagtaatccttctgcctcagcctcctcagtagctgggactacaggcacgcactaccacgcctggctgttttttttttgtagagacaaaaatctcactatgttgcccaggctggtcttgaactcctggcctcaagcaatcttcccaccttggcctcccaaagtgctggagttacagacctgagccaccatgcccggccagataattctttgacagataatcctgctgacatgaactagacttccttaagacacatcatagaatcaatagcccagaaccataaagagcctctacttgtaagtttagagtcattttaagtaaggtagaactggagatcataagagatatgtactcttataatttttgattgtatgtttgtttctttttgagacagagtctcactctgtttgcccatgctggagcacagtggcgcgatcatagtttgttgcagcctcaacctcccaggttcaagggatccttgcaactcagcctcctgagtagctgagaccacaagcgcatgctatcacactagctgatttgatttttttgtagagttggggtctcactaagttgcttaggctggtctcaaactcctggctgcaagtggtcctcccaccttggcctcccaaagcgctgggattacaggcaggaaccacggtgcttggccaacaatttgcatgcctttaccacattccccaaatgttaacatttcacctcattttcttatcagtctctttatgtataacatgcatatgttttctgaatcatttaaatgtaaattgtgacataatgccccttttcccctaaatatgtatttcctgagagtaagaatttcattatgtatttcctaaaagcaaaaatgttctctttcccagtcacacaaaattatcagactcaggaactcaacactgagttcttcctccagcacttgacaagaatcaaagtgttggttagtgactgctttgggggatggggcaggactggcagcaggtggcccgatggcctgggtggtttgcctgccagcgatgctggtgggcaagccctgcctggaagctcctctctcccacgtttttcctgccgcccagtagttagaccacctggagccagaggagggggcccacccggtttcccagcctgtccctccagagctgggctccatttctggaggtagagaatggggcaagtctgggcatcttgtgctctttgctaggggaggaaagggctgtggctgctttccttgtcccccatttcccttctgccagtggggccaagccccagcagctcagtcaggagaagaggatatggatctgtctgggcctctctctttaagagaaagttgattcgtgccttccggatagtcttgttccagggtttctaaactttctgatcccaccttcatgttaaaatgagttttgatcatgtgtctctttagtaatatggacattataaaataggaaaaaaaagtctcttaaagcctaagtagttaaaaatttattttcacatcaggcatagtggctcatgccagtaatcccagcacttttagaggccaaagtgggaagatcgcttgaggctggagttggagaccagtctgggcaatacagtgagaccttgtctctaaattaaaaaaaaaaaaaaaaaaaaaattggccaggcatggtggctcatgcctgtaatcccagcactttgggatgccaaggcaggtggatcacctgaggtcaggagttcaagaccagcctggccaacatggtgaaaccccattagcggggcgtggtggcgtgcccctgtagtcccagctacttgggaggctgaggcgggagaatcacttgaacccggaaggcagaggttgcagtgagccgagattgcgccattgcactccagcctgggtgacagagtgagactccgtctcaaaaaaaaaaagccagttgtggtgtgtgtttgtaatcccagggaggctgagaagggaggatcacttgagctggggaggtcagggttgcaatgagccagtgtaatccagcgtgggccacagagtgagattctgcctcaaaaacaaaaccaaaaatatataacgagttaaaatcctacagtaaagaggctactgttttattctggttaaaccttagggttccttctatcaaacttaaactagaattttttttttttcttgagatggagtcgccctctgtcgcccaggctggagtgcagcagcttactgcaatctctgcctcccgtgttgaagcgattctcctgcctcagcctcccgagtagctgggattacaggtgtgtgccaccactcccagctaacttttgtgtttttagtagatacaggctggtctcaaactcctgaccaggctggttgttggccaggctggtctcaaactcctgacctcaagtgatccgcccacctcagcctccaaaagtgctgggattacaggtgtgagcctctgtgcccagccaagaaattattttttatttttgagatagagtcttgcttcgtctgttgcccaggctggtgtgcagtggcgtgatcttggctcattgcaacttccacctcctggactcaggcaattctccttcctcagcttcctgagtagctgggagtacagacgtgtgccaccacgcccggctaatttttgtatttttagtagagatggggttttaccacgttttcccacattggccaggctggtcttgaactcctgacctcaggtgatccacccgtctcggcctaccaaagtgctgggattacaggcttgagccaccgtgcccagcttataaattattgttattatttattattatttttttgagatggaatctcagtctgtcgtcgaggctgtagtgcagtggcgcgatctcagctcactgcaacctccgcctcctggattcaaggatttctcctccctcagcctcctgagtagctgggatacaggcacgcaccaccacacctggctaatttttgtattttttagtagagacggggtttcaccacattgcccaggctggtctcgaactcatgacctatgatccacccaccttggtcccccaaagtgctgggattacaggcgtgagccactgtgcccggcctataaattattttttaaggcacaaagtctcataggtaatttttaatcagagtcaaaagtaggatggggggcactctagaaagtaaaactccttatactttgtgaaaacacagttttttgtcctgtatccctgcccagagaccacctctgcctcccccaccaactacatatgggggtcaaggttgaggccccctggtctaacgggagagacagttgccgtatgggtggtagcaaaactccttaagggttgtgatttttttttttttttttttttttgagttggagtctccgtgtgtcgcccaggctggagtccagtggtgcgatcttggctcactgcaacctccacctcctgggttcaagcgattctcctgcctcagccccccggagtagctgggactgcaggtgcccaccaccacgcccggctaatttctttttgtatttgtagtagagatgaggattcaccctgttggccaggctggtatggaactcctgaccttgtgctccgtccacctcggcctcccaaagtgctgggattacaggcatgagccacggcgcctggctgtgccttttttctcttaatgatgttttgtgcaccctagtccgtgtcaccgcaggtactcccacccaccacgtaaatgggcgggaggcgctctgttttctggatatgctctcacgtagctcattaatctcttattttaagttccttctgattctcactatgctgaatgccacagtgaaaattctaaattgtagtgtatgtcctgcattatttccttaggcgccgctgcacttcagcctgggtaacagagcaagatcctattaaaaaaaaaaaagcaaacatgcttatggtagtacattttaaaaacatagaagattggaaaattggaaaaatccccatcaaaaatagtaaataacttaaaaatagcaacattttgggtatgttaccttccaatattgttttctgtgtaatttttttggtctcattttgccggagttgtaatgtatatgtagttttgtatcatgatccttttttatttttttgagacaaggtctcgctctattgcccaggctggagtacagtggtgcgatctcagctcgctgcagcgtcaagctctgggacttaagtgatcctcctgcctcagcctcctgagtagctgggactacaggcatgtgccgccacaccctgctaattttttattaaagatgctccccctttccggggtcccgcctcctcctctgagctttggctctggcttccctgcctcccccagctgcctggtctgacaggagagaaggacagttacagtgtacagtgacaccaaaaacatgctgtattgattatagtttatttttttttcttgtagaggtgggttcatgctgtgttgcccaggttgttgtccaactcctgagccgagcgatccacctgccttggcctgtcaaatgctgggattacaggcatgagccacctcacttggccatgatcctttttcaacttgatcatacagctgtttgtaaatatcaccatctatggcaataacagaactgactgcttatccccctgagcattcaagttttctctaggtaggttttcattattgtgaatatgctgtgccaaacatcctttttttttttttttttttttttttgagacagagtctcactctgtcttcaggctggagtgcagtggcatgatctcagctcactgcagcctccgcttcccgggttcaagcaattctcctgcctcagcctcccgagtagctgagactataggcgttcaccaccacgcccggctaatttttgtatttttagtagagacggggtttcaccatgttggccaggatggtctcaatctcctgacctcgtgatctgcccacctcggcctcccaaagtgctgggattacaggcatgagccaccgcacccggcctgtgccaaacatctttgtgcactaaagccttttctgtatttagggttatttccttagggtcatggaagtggaattgttgcgctgcaagacctgtaaatacattatagagctttggatcaaagttacgaattctgcttcagaggatggtgctttcattctgactggtttaaaaggctgctttctttgaagacaagcgaagtgagtgggacacagcccaggcgcagaaggtgaaggctgggatctccgcatggtggctgccagccccctgcaagggaggtcatgagcgtgggagatgactccccagcccccagccctcctcatccttgtccctaagaagagagtgagagcaaaacttgtggctgcggtgcagacaagcctgcctctttctcatgcagatgtgatgtttcccacacagggaggcagtcagaaaccagcatatgcccttctgtcttcccagccagcagcccaggaagggcaggtgctttgaaggagaggcccctaaccccctttcacggacattcacagggagtcaaggtggacgcgagagaccacagtggagccacagcccggatgctggccaagcagtacggacacatgaagatcgtggccttgatggacacttactcgccctctctgcccaagagcctctatcggagcccaggtacccacacctgccagccgcgccctgctggggtctctggttgccttgagctttaggtgacctggcagagaaagatgtcccccgcttccccggctcccaccttctctgagatttggctctgcctcccccagctgcttacatgtcaaggttgaggcccctgctctaacaggagataaggatggttacgatggagagtggtacaaaaccaggctgttgtgaatgtagaggctttctgtagtatgcttgactaccgagtaggggcaggcccctcttagttttctgttttcactgtttcctgagctatggcttgttcattcttctatatgaacttgaatatcaacttgtctagctccttaaaaacagtattgatatttttactgagattgtgacaatgtataaattaactatatctttgtgttgttgtcttatccaagaacaagggatgacttcttgttccaatgtacttttgggtcttgcaggagggttttaaatttttcttcatctacattttgcatgtgacttaagtttattcctaagtgtttgatcatctttgtcgctattgtaaatggggttttccctatcattatatcctttttttccccccaactctcagggtattaattattcagtgctatttattttttatttcagtaggtttttggagaacaggtggtggttggatacgtgaataagtcctttagtggtgtcattatatcgtttcactgcatattgtcagtgcatttgaaggcagtggatttctgcaaacttttgttttttttttgatacgggagtttcgctcttgttgctcaggctggagtgcaatgaagcgatcttgcctcaccgcaacctcttcctcccaggttcaagcaattttgcctcagcctcccaggtagctgggattacaggcgtgcaccaccatgcccggctaattttttgtattttcagtagagatggggtttctccatgttggtcaggctggtctagaactcgcaacctcaggtgatccacccatctcagcctcccaaagtgctgggattacaggtgtgagccactgcactcagccctgcaaactaattttatattctgctaccttacagaattcttacattgttcaggttagttttgttattgattctttagggctttacaggtgtactaacatataatctttaagtatcgatggatacactgcttcctgctgattctcatgactctgactttgttgaattgcaccgttcttttgtttagttgctaacacctctagctcattgttcaacatagtggagatagtgagcctccttaccttggtcctgatcttagtggaaatgccacgttacatgagaggctgactgtaaaagggaaggcatatgttattttagcttattaacaaagtattcctcagttcttctattcctgagtggtgttttacaggagtaactattgaattgtgttcccatatctttggagacgatggtgaattttcatatggtagattgtcttcatgaacctcctaataatgaatcaaccttacattcttggcataaatcccacatgttgtactattttaatgtgtttttgaattctgtttattaatatttagtatttttctatggatattcagtcataagtgatactggtctatagttttctttcttctttttttttgtttttgaaatggagtcttgctctgttgcccaggctggactggagtggcgagatctcagctcactgcaacctccgcaacctccgcctcctgagttcaagcaattcttctgcctcagcctcccgagtagctgggatcacaggcgtgcaccactacacccagctaatttttgtatttttagtagagacggggtttcaccatgttggccaggctggtctcgaactcctgatctccagtgatccgcctgcctcagcctcccaaagtgctgggattacaggcgtgagccaccgctcccggcgtggtctatacttttctatttttgttctgtctatcaggtatgggtatcagtgtttacttcataaaaataatttggaagttttccttccttttttgtgttctaggacaatacacgtagcattagtgctacctggtcttagaagttttgatagaatcctcccatgaaaccatctggtctctttctgtgaggtggttcctcgataacagtttttctatttcttctatagagattggcctcctcatactttcttttcttatggggtcagttttggtaaattatattttcctgagagatcacttcatctaggatttcagacttatctgcagaggtctacaagataatattttctccctttttttttttttttttttgagacagagtttcactcttgttccccaggctggagtgcagtggctcgatcttgactcaccgcaacctctgcctcccgggttcaagtgattctcctgcctcagcgtcccaagtagatgggattacaggcatgcgctaccatgcctggataattttatgtttttagtagagacagggtttctccatgttggccgggctggtctcaaactcccgacctcaggtggtctgcccacctgggcctcccaaagtactgggattataggtgtgagccaccgcacccggccaatttttttctccttttaaaatattctgtttcagggccaggcgcggtggcttatgcctataatctcagcactttggaaggccgagttgggcggatcacctgaggtcgggagttcgagaccagcctgatcagtatggagaaaccccatctctactaaaaatataaaattagctgggcgtagtggtgcatgcctgtaatcccagctactcgggaggctgaggtgggagaatcccttgaacccgggaggcagaggttgaggtgagccgagatcgtgccattgcagtccagcctaggcaacaagagcgaaactctgtctcaaaaaaaaaaaaaaaaaaaaaattctgtttcaggctgggtgcagtggctcatgcctgtaatctcagcactttgggaggctgaggcgtgtggatcacttgaggtcaggagttcaagaccagcctggccaacatggtgaaaccccgtctccactaaaaatacaaaaataagccaatgtggtggtgtgcgccagctactctggaggctgaggcaggagaatcacttgaacccgggagggggagattgcagtaagccaaaatcacgccactgcactccagcttggcgacagagcgagactccatctcaaagaaaagtaaatagataaaataaaacaaaataaaatactctgtttcagtggttattttctcctgttattatctttttttggcatggaaaatattgatttattttttgtgacagggtcttgctttgtcacccaggctggagtccagtgacccaatctcgactcaatgcaacctccgcctcccaggctcaaaacgatccttctacctcagctctacgagtagctaggactgtaggtgcaccctaccacgcccagcttacgtttgtattttttgtagagaggtggttttgccatgttgaccaggctggtctcaagagtcctgagctcaagcaatccacccgcctcagcctcccaaagtgctgggactacaggcatgagctactgcacctgacctggaaaatatttatctcatttttaattgacacaaaataactacatatttatggggtacagtgtgtgatgttttgatacatgtatacactgtgtaatgatcaaattaaggtgattagcttatccatcacctcaaacatttatcatttcgaggtgagaacatttaaaatcatgtcttctagtagctattttgaggtataagctgttgttccgtatagtcactctactgtgaacaccagaacttctttcttcgatctgtaattttacacctattgaccaatctctcccactacctccccacccccaacctctgataatcactattctactctacatgtttgacatgagcttttaaaaatcctgtaaatgggtgacatcatgtagtcatgtagtcttttttgttgtttgtttggtttttgagacaggttctcgctttgtcacccaggctggagtgtggtggcataatcttggctcactgcagcctccaattcctgggctcaagtgatcctcctatctcagcctcccgagtagctggcactacaggcacctaccaccacacctggctaatgttttatttttttgtagagacggggtcttgctatactgaccaggttggttttgaactcctgggctcaagtgatcctctcgccttggcctcccagagtgttgggattacaagtgtgagtcaccacaacagctggcatttgtctttcttttctatgtctggcttattttactgaacatagtctcttccaggcttattcatgttgccacaaatgatcagatttcattctttatgtctgaataatattcaattgtgtatataaactcattttctgtcttcgttcatccactgatggacacaggttgattctctatctaggctactgtgaatactgcggcagtaaacatgagggtgtagacatctctttggtatactgatttcctttcttttggataaatacccagtagtggaattgctggatctcatttcttatattttttaatttttttttttttttgagatggagtttcgctcttgtttcctaggctggagtgcaatggcacgatcttggctcactgcaacctccacctcccgggttcaagcgattctcctgcctcagcctccctagtagctgggattacaggcatgtgccaccacgtctggctaattttgcatttttgggagagacagggtttctccatgttggtcagggtggtctcgaactcccgacataaggtggtccacccgactcggcctcccaaagtgctgggattacaggcatgaaccgctgcacccggcaaaaatttcttctattaaaaaaaatagagacagtgtctcagtatgttgcccaggctggtctcaaactcctgggcccaagcgatcctcccacctcagtctcccacagtgctgagattataggcatgagccactgcgcccggcctcacttcttattttgaatatttgtgtttgttctttttttttttttgagacagagtctcgctctgttgcccaggctggagtgcagtggcgcgatctcggctcactgcaacccccgcctcccaggttcaagcgattctcctgcctcagccttttgagtagctgggactacagggtgcccaccaccacacctggctaattttttttttgtatttttagtagagacagggtttcactgtgttagccaggatggtctcgatctcctcacctcgtgatctgcccacctcggcctcccaaactgctagaattacaggtgtgagccaccgtgcgcagcctcttcctttttttcttaagttaaatactagtactttgtctgtttagtggaaaaacaagaaaaacccatcggattttgatttattaatgagacctactgattgtctgtttaatttctgcttttatttttatttggcttactttgttgttctagttttttgagttggaaacttctttcattttcattgttgcccttttgttgctaaatgttagaggctgtgaatttttgctgattgctgctttaagtgtattctgggggttctgtatttaatactttccttgttatttttagaaattctgtaatttttatttatattttctccttcacccaggagttgtctaatagaagtattatgattgtttttgtttgttaatttctagatggaagggcctttttgatcttgcaattaatttctcatgttattctgattaactttaatgtgtctgatcagagagtgtttataattcttacatttacataacttccttgtcatcttatttatcatctactgatctatctatatatatatatatttttttcagatgtagtctcactctgtcacccaggctggagtgcccaagtgcgatcttgactcactgcaacctctgcctcccaggttcaagcgactctcctgcctcagcctcccgagtagttgggattccaggcatctgccaccacgcctggctcatttttttttgtatttttagtagggacagggtttcaccatgttggccaggttggtcttgaagtcctgacctcaagtgatccgcccacctcggcctcccaaagtgctgggattacaggcgtgagccaccgcgcccggccctgatcaatattttttagtgttccgtgttttgcttgagaagttgtattctctattatctgtatacagtttagcatatctgtgagtctatcttatttaggattatgtactcttagttcattttctacaaaattacctattagcgtgtttctgatttatgaaggaagttggtgcattttttggtgacagattttcataacttgttatagattcactgtgaattatggcttttagtattagaagtgtccttctggctgggcatggcccatacctgtaatccgagcactttgggaggccaaggcgggcagatcccctgaggtcaggagttcgagaccagtccagcctacatggtgaaaccttgtctctactcaaaatacacaaattagccaggcatggtggcacatacttacaatcccagctactcgggaggctgaggcaggagaatcacttgaacccgggaggcggaggttacaatgagccgagattgtgccactgcactccagcctaggtgacggagtgaaactctgtttcaaaaaaaaaaaaaaaaaagtgtccttccgtgtcatatttaatgtgttttgccctgaattccacgttgatagcaggattgcagccctggctcttttgtggtttccatctgcctgttctttttaagctgctctgagggtgtgttgggtgctgagattcacgcagctgccgttcccttgcttattgctgcctctttgcatttgtcttacagctccctccccttcagcttggatggaagcacagtctccctggagtgctatagatctttgagtgtgaggaggtgtgtgtccatatggctagctcagtcgccagagcttgagcctcgtcatggggaaggacagagtggcccacgttcagggcctgagctctccctctttgctggcctgccctgagttgtcctgtcagtttgcacctgagcgagcagctcctttctcagtgtcaggctcagcccagcctcttccctggcattgggattgtttcataataaacacagctcaggtggtaatgcaaaggacctttcccttcatttctgccccagcttacccactccacaaggagatctcatcatttcctcctgtatacaactcacgtatctcttaaaagtagaatcagatcagagccttatacaaatcaaatatgaaaaactgaaaagctacaaaataataaaagctctggtttgagctctgaaagctcagactgggaagtgatttgaaacagtttataatcatagcaaacacatgccatgctttagaaaatacaaaattgtggctgggcgctgtggctcactcctgtgatgccagcactttgtgggaggccaaggtgggcggatcacaaggtcaggagatcgagaccagcctggccaacatggtgaaaccccgtctctactaaaaatacaaaaacaagattagctgggcatggtggccgggtgcctgtagtcccagctacttgggagcctgaggcaggagagtggcgtgaacccaggaggtggagcttgcagtgagccgtgatcgcaccattgcactcctgcctgggtgacagagcaagactccgtctcaaaaaaataaagaaaaaaaaaagaaaatacagaattgcttaataagttgtttccagccgggcacagtggtaacgtgcctataatcccagcactttgcgaggctgaggtgggtggatcacctgaggtcaggagttcaagaccagcctaatatgatgaaaccccatctctactaaaatataaaaattagctgggtatggtggcatctgcctataattcccaactactcgggaggctgagataggagaattgcttgaacccaggaggcggaagttccagcctgggcagcaagagcaaaactccttctcaaaagaaaaaaaaaaaagttgtttccaaaggaagggattaggaaaaagtagttgtgacttatattaccatatattttaatgaagagatgggttttacttattcaaattagaacagaatttctgattatgaacaatacagacttatgaacaatttggcaaaccccaacagagataataaactcctggctgggcatggtggctcatgcctgtaatcccagcactttgggaggccaaggcaggcagatcaggagtttgagaccagcctggccaacatggcaaaagcctgtgtctactgaaaaagaaaagaaaaaaaacactgggcatggtggcacgcatctgtaaccgcagctacttggaagggtgaggcgtgagaatcgctagaacccaggaggcggaggttgcagtgagtgagccaagatcatgccattacacttcagctcgggggacagagtgagactctgtctcaagaaaaatgaaacttcccatcctcactaactttgcagctccctgtggcccattggagcagcgccccggcctgttagggcatttctcagaagtgatgccctggcagatacccttctccttaatttaacaaaaccggcgacagtcactttctttcagtttgccgtaaggattagtaaatgagtccattactgaacacactatcttaatcttggtgtttgatcacagaaaagtacgaagatctgagctcttctgacgagtcctgccctgctcctcagagacagaggccttgccggaagaagggtgtcagcatccacgagggaccgcgagccctggccaggatcacaggcattggcctgggcggcagagccccacggcctcgctatggtgagtggcccgcgtttcccgagggctctttctcattgcataccaggattttgtgttggcaagaatggaatagctcttaggctcctgaaatgtgggtcgctggacctcaggtggcagcgggacaggtggcccagctttcatgctcagggagactcaggattgagtcctgtgatggaaatgcattggtcacggactagctcttgttttttgctttatctcctggagtttccttttcgttggttaaatttaggaatagaactttctctcctgcagcagaaatgtagctaaggtcagatttcattcatcacataggtgggttggctcatacagggaggaggcaaagcgtgaagttcacttccctgccctgcccataccagctgggtcgggtgcgctgctgggggcaggaggccaagaaaacaggccctgctgttttctcagggcgatgaagttgtactcagaccctcctgagagagggcccgcttgttgacttgctggtgaagaatcctagcctttgggttttccagtctcgttcattctcagattcccagccccagggtgttgagcgttttgctcttggggagtgctggggtttctttttaggggagttgggtttggtgcctactctctattgctgtggtctgtcccagagctcagctggaggtgtgagttatgtcttcctttgatggctgtcacccactcatagccaggccaaggctgctggtctcacaggcctggtggctggtccttctcgggagcaaggcctctttgaggccaggacttggaagagtgagagtagacagtgtttcagccaggggtccaccagtaattgaattcccttctagaccccaggaacaagcagatgtgcagacttctgtcttcccaagcctgggtgctgggttgggaactggagacccaccttctcccatcatcctgggaagggtgagctgactgggccactgggaaggcctctctcgagctgctggccagccccaccacagcatgagggcccgcccgtgtcccgtccgctgagctgtgagcactggctctgggacaccgggctggtcgttctgagtggcagagtctcttccttccaaaaggtccctgccacctgctacagcctgaggtgtggtggggacaggaaggaagctgtcatcctggggctgagttggtaattaatctatatagctgtacaacaaatgctttaacaaaatcatacatgtctgaagccgcttgtgtgcggttctttgtatgtatccacagagaagtaatcatggtggtggtctcaggtgtggtatttcaggggatttttgttttctcataccttgtgaaatttaaattttctataagtgcatatattttatttgccagtaattaagaaatttggggccgggcgcagtggctcacgcctgtaatcccagcactttgggaggccgaggcaggtggatcaagagatccagaccatcctggccaacatggtgaaatcccatctttactaaaaatgcaaaaattagctgggcatggtagtacgtgcctataatcccagctactcgggaggctgaggcaggagaatcggttgaacccgggaggcggaggttgcagtgagccgagattgtgccactgcactccagtctggtgacagagcaagactccgtctcaaaaaaaaaaaaaaaaaattgggggggccaggtgcagtggcttatacctgtaatcccagcactttggaaggctgaggtaggaagattgcttgggctcaggagttgtgagaccagcctgggcaatgtagcaagaccctatctctacaaaaaattttgaaaattagccagatatggtggcccatgcctgtagccccagttacatgagaggctgaggtggaaggattgcttgagcccaggaggtcaaggctgtagtgacccatgatggtgccattgcattccagtctggataacacagcaagaccctgtctcaaaaacagtttagggggcaatgataaatagcatgtgctgattagaaaaacttctccataactaggaaaatacgtaaagaggaaagtaagttccccatggtcccatcaaccagtcctttgggttcttttttgagacagggtttcactgtagcccaggctggagtgcagtggcacgatcatagctcactgaaggctccagttcctgagctcaagcgatcctcctgtctcagcctcccaagtagctgagattacagacatgtgccaccgtgactggtcaagtcagtctttttatgtaaaggggcaaaactggagtgaaattgcctggtatacatgcccctttttctgcttggttttagaggcaggtagagttaggtaatttcatattattgttgttaatttttacctcaaggcctttttccttcctgctcagccaggtctctttttcgccggggttgactgaccagaggaggcccgctaagcgcctgtggttaaaggtcacagggacataaagacacgtggtcgatgggtgtctgtgtgaggtcattagctacctcctgctaaaaggaacactcatggtatagttttctctggtcaggcatctgtaaatacagctgaccatttgctacgttttccccttggaaaagaaatggagagggcccaggcttgacctggctgccagccctcgccccaccaggcacttgcttgggccactgactgaccctcagagcatcttttccacccacacaccacagatagagccatgccaggtcgcaggggcaagtaggtgaggtcatgactgggaagtcacctgcctccatcctgggcctcggcctctgaggaggtttcactttggagttccctgggcttatgggccccattctgtacacagagcaggctcctccccgtggctatgtcaccttcaacagcagtggcgagaaccccctggaagaagagggcctctgctgccgggatgtcacctcccccatcaatgagcgggatgtggagagcagcagcagcagcagcagtcggggtacgtgcacccccacccatccggcccgtggctcaggcaggtcctggagctcctgtgtgcccatccccacttatcccctgggcctggcgctggacacagccatccagcagaggacaggaaaggggtaggtgtggacggccctggttcttgtgaggaatgggagaagcttctggtccagcatccccgtgcggcttaagggagccgttccacagcaacaggtttagctccttgcttgggagcccctgaggctttcagggcaggccccagtaggaatgtctgttataactgcacctccgtgcagcagctgtttccatagtgcccaccgtgtgccaagcactgctccgggtgcttgggatttatcagtgaacaaaaaagacagaagccctgcccgtctgtatagaggggagggtttaggacaggcaggaagtttgaaatataaggaagcaaccgctgcaggccccaaggagtgccctggtggaggcggctcagcccggggcacgcccatgcgcagcacctcggtgagggctgcaggcggacgccctgtcttcccgccctcagaggaacatgctttctgtgccaacctggggcccgtccagagcagcagcagcagcgagggcctggccagagcccaggggctcagcagcgaagcttctgtggagagcaacgaggtacggattctttctttcttggtctcccatagccggtccctggctgggatgcctgacatcccccagttactttaagatgagcatgtatgtaagaagcagctgctgcacgtgtgtgctgcactgggacgtgctgtgtccagggtctggcttctcagacgacagcgaacgcaccggaagcccctgtgtggcgggtggggggtttcacgaagcctctcaagcccctgtgtggcgggtgggggtttcaccaaggctctcaagttagcccgcgcactctttcagatgcacgcctctcactgcaggactcggatcatgcctgtaaaagctcagctcgcaaacaagctaaaagttacatgaagaccaagaatcctgacagccagtggcctccccgcgctgcaactgacagggaaggctttctcgctgagtccagcccccagactcagagggccccctactcaggaccccaggtaagaccgcttgtgaaactggaggttacactcagagacggcactttttgtgacttaggaggcatgtgttgtgtatatgacgtgccaggcgctgctaggagaacagaatggcggtggcatccccatggcctgttaggctccacaggctcacagccggctccatggctggcagccccgctgcagcgcttctactctgttcctctccacggaaaggacctgtctccctgctttccatactggagttggcctccctgagcctggggagaagaaaagcacacttgacctcagagctgcctgcaggagtctgacaagatgtggttgaagcagagacaggaactacacacagtgtgtgcttggtgatggttacagctgccaccatcctcctcctttctgtggtccctctgaccacacattaccttagggatcagaggtgtgactcacagctcagctgtctcacctgtgtctgctgagttctcctaccctgtgtgggcagaagaggcacggagaggagaggcagagggaagctctggttggttatttggtttgtttgttcgagacggagtctcgcactgtcatctgggctggagtgcagtggcgcgatctcggctcactgcaacctcctcctcctgggttcaagcgattctcctgcctcagcctcccaagtagctgggattacaggcacccgccaccatgcccatctaattttttgtatttttagtagagacgggatttcactatgttggccaggctggtctcaaattcctgacatcgtgatccgcccgcctcgacctcccaaagtgctgggattacaggcgtgagccaccacacctggcctggtgccatgcccggcctggctggttatttgttaaagcactggctttgctgttcagtagagccttggatttgccggcttctccctgcagcccctggctcagtgagcaggcacacgtctcggtcccttcaacatacgttgagtggagtctggtcagggtagtgtcctaagtatgtttctttcagaaaatagcttgaagaaaatgtcagagtaacatttgtttgtccattaaaagcaataaactctcaaaagtaggatttctggagttgaaaagtaaatgaaatgaaaatatcactagacgagctcacagcagaattgagcaggcagaagagtcagacaacttgtgaacacaggtcacctgagatcatctcgcttgaggaacagaaagaatgagtaaaaaaaattaacagaaatctgtgatcccctcaagcacaccgacaccaccccatacagtggcattccagaaggagagcagaaacgatgggtgagaaacagcctgaccatctcagtggatcagaaacacggatcttacatccagggagctcggtgaactccagacaggtgaactcggagaagagctgcgcttagacaagtggaaatcagaacatccgacactgagactctagaattagagggcagcgctctccgcctacaaagcattgtcgagatcagcagctccatggtcccttcacagaactgagcatgtgtgggaggaggaggccagtttctggtgatgaacatacattgtccccacgtggccgaccatagtgtgaggactcacctgcctgcaacatcctgccctgcctgagccaccagagtaggaggggacagcctgggcgccacacacaaggcactgtcttggttctgagcctggggaagtggtggggctccgagtggaggaaaacgtctctgcttcgtcgtcagccactacctcccccaacctgtcccctgtgcctgccaggaccttgccgcactgctggagcagatcgggtgtctgaagtacctgcaggtgtttgaggagcaggacgtggacctccgcatctttctgaccctcactgagagcgacctgaaggaaattggcatcacgtgcgtccagaagggccgctctggccctcagcccggggttggggcaaactcccactcatgtaagcgctcttgggacgctgaggcatatcctggtcacattccccccgcaggctgtttgggcccaagaggaagatgacgtccgccattgcccgctggcacagcagtgcccgcccacccggggatgccctggagctggcctacgccgaccggctggaggctgagatgcaggagctcgccatccagctgcacaaggtgagtggctgggtgggggatgggggggcagggtgacacccgtgagttggctccatctctgacagaaaaggtgggtgctgtgtggaggggtcaggtggatgcagtggggagagggccccacacacaggacagggccgtggccaagggtctggcttgaccggccacctcccagcctccccgcgccccccacccccctgcagcgctgcgaggaggtagaggccacgcggggccaggtgtgtcaggagcaggagctgcgcgccgtggtggagagctgcctgctggagcaggaccgcgcccgcgaggacctccaggcccggctgcgggagacgtgggccctggcccgggatgctgccctcgtcctggaccagctgcggtgagtggctctgagctgccctgggctgggtctccagtggtcagccacctggcccctgggcccccacacatcctttcctcctgattttgtaactgaggggtggatttcagggtctggagccaccccacccccatttcatcaggcccttccttcctgcaggcagacccaggcaggagttgggtccgggaatctgcaccggtcgccctcctgctctttagtgcagcctcatggggcactggcccagcccatgagggccagctgcaaggacagggctgagcccctccctcccctagaaggtctgaggtgggggctctgcagcggccaggcctctgctctcaccaatatttgtttctgtgtctggcagagcctgtcaagctgagctgtcatctcgagtgaggcaggaccagccccctggtgcagccactctgggcctagccgtccccccagctggtaagagcagtggcctgactccgcactgggcagaggggaaggtgggggagccctgaagccaggtttgacccagtgggcttggcctggttctccggccggcagccactctcccaggtccctgtgtgcacatgatcccagagtccaaggaaaagagggggccctggggacccaagcccacttcctcacctgtgacaggaaaactgcctatcccccaggggtaggaggtactcgagaaaggccctgtgccttggctggctgtgctgtgctgagaccgccagtgacttctgtagcctccagccagggcccagacccgggtccccaccggcagagctttgccttctctcgggctgacccgggcctcgtagtgtttgctcagcctgtgggaggaagggcacaacagggcttccctgcctcggccttgggaggttgcttagacactgtcaggcgggtagggaggttctgatccaagcaggttctcctggttgcatgggctcagaataaagcagggcctgtggggacgcagacccccagctaactcggtccctgcacctgcaccacagactccaagggctggcaagcgtccctgcaggccatgagcctccccgagctctcgggagccctggaggaccgtgtccgtgagatgggtgagtctccggggaccagacgactgagcgctccttttgtttccgagggaggcaaagggacccctttccagggaaagcgggtttgtgtctctctaccccaaggctgacctcggggctggggccataacgggtgaggggcaggtcacatcctgcagctgagaccccggggcagcaccacccagccctcctgagcctggccgggagaggctcaaggtcatcattcctcagggcaagcactgtgcttagtgacccagagcctggagaagctgcaggtgctgaacgggaagaagtggcgggagacctagcctgcgggccggtgagtgtctgccagcctggatcccgcgtggtgggagcagcagggcctgtctgggcggctgcaggtgtgggtatgcacccacctgtccccctcccttctcaccggggctttttctttcagaatctgacgttgggtgattggtccaccctgaagctgtgtgccagggagtgaggaggacagtgagcaggtagctgccatgtgcagcccaggcccagtgggggccagaggatcaggccccgggagcagccggcagacagaggcaagacgggggctgcggccctggctcggcagctcgggccagcactgaggcgggacgagggcctcacccagaacctcgtggtgaggcccagagttcatgggctgccctggcccataccaggcagggccctggggggaaagtgtatccatatacacgcacaggtgccaactgaggtgggaccttaggaatgaggactggggcacctggaaaatgccattttttggaaaataaaatttaagaacagct

SEQ ID NO: 15405 - DNA, 33367 bp, Homo sapiens
attccacggcgcccgggagctgtcccggtgccgacccgcgagcttcccggcgtgctccgcgccctcccgcaactacttccggggcgggtgccgggggcggtgccccggcgagggagcgtggcggcgagctgtttggggggggttggcgacggcagcccgagggcggcgcaaggcctgaggcccagcacaggtgggttccgcggcggcccggccccagcacttgccggcacctgcagcccgcctagacccggcgctcgggcgtcccgcgctgcacttgctcgccgcgtgactggaggaccgagcccccacattttctttatgtggttgtggtgggggcacagtaatgccctgtgcgccgtagcgttcctgtggggatgtggccggggggcgtcgggaagcgtcactgctgtgagttacgggtttgtcggccagggacccgccccggggccagtgagctacctttgcgatgcggttccacggggcgagagggggtgcctgggtgctttcacagacctcctctgtgggcgtgacagttaccaccagcatcacatttgttaagatttttaaaaattttttaatttttgtgggtacgtagtaggtgtatatatttatggcgtatatgagagattttgatacaggcatgcagttcgtaataatcacatgtaaaatgggggtctccatcccttcaagcatttatcctttgtgttacaaacaatatgattatactctttgaattatttttaaatgtgcagccgggcgcggtggctcactcacgcctgtaatcctagcactttgggaggcaaaggcgggcggatcacctgaagtcaaggatttgagaccagcctggccaacatggggacacttcgtctctactaaacatacgaaaactaggctggcatggtggctcatacctgtaatctcagctactcgggaagctgaggcaggagaatcgcttgaacccaggaggcggaggttgcattgagccgagatcacgccgctgcactctagcctgggtaacagagtgagattatgtctcaaaaaaaataataataaataaataaaatgtgcaattagattatattgactatagtcaccctgttgtgcggtcaaatactagatctttttttttttttttttttttttgagacggagtctcgctttgtcgcccaggctggagtgcagtggcttgatcaaatactagatcttattcattctgttttttttgtatccattaagcatccccaccctccactacccttcccagccttggttacactagaagtaaccatccttctactttctatgtccatgagttcagttgttttgatttttagataaccacaaataattgagaacatgcaatatttatctttctgtgcctggcttatttcactaaacataacgatctccgcttccatccatgtttttgcaaatgataggatctcattctttttttatggctgaatagtactccattgtgtctaagtaccacattttctttaggattcactgtaaaggtaacagatacttagcattttcagaatggacagaaccaaaaagttgaatgaaaactaaaacgtcttatctctaatgctactttacaccacaccactcgggatgggacattttagttttcactttagtgttttttttttgtttttttttttgagacagaatttcgctctgttgcccaggctggagtgcagtggcttgagctcggctcactgcaatcgcctcccaggctcaagcgattctcttgcctcagcctcctgagtactgagactacaggcgcccaccaccacacccagctaatttttgtaattttagtaaagatgggagttcaccattttggccagggtggtctcgaactcctggcctcaagtggtccgtcacgcttggtctggttctcattgtccttcagacctctggggatgtcagatatgcaagtctccagtaaatagagaacacggcctcaccctgcaggaggcctttggcgtggaagagacatgcccagtgaaggcttgagggaggtatggaagggactctgaactgaccctcagctcgtttggtttcttatccaggcttcgttggccagggctgttagggtgggattctcacctgcaaagtgagggaagggcactgcacgatcttgggctctgctagctgaagaggtggtggctccaggaaggagggctttgcttgccccaccgcacctacacacactcttcaccaagggtctgtgaagtgttcgtctcccacattggtggcttgtttctttagccatcttggctgtcacctggggcttggaagcattctttaatagaaactgaggtcctcatcgcatctattaactaccatagcacctgtaggtcatcacaacctgacaaggcctttgttttcgcctttgctccctttcctacccttgtttcctggcactcttgtacctaaggattctactaggaagctgatgaccttgccttgatttggggattcctggtgtgccgttacccatgtaggcccatctcggggaaagtgttacctcaccagttcaccggcctgttatatttccccccatagctctctcttcaaaggatgcctaagtggattcctattcagttgacggttgctgcgtgccaccagtcacatcctggtttgtctgttggggaattgctttctatttttttcagaaaaatttatttttacttttttgaaattttcaatttcataaccattccagaaaaattaatttatatttaaaatttacaggccaggtgcagtggctcacgcctatatttccaggactttgagaggctgaggcgggcggatcacctgaggtgaggagttcgagaccagcctggccaacatggtgaaacccccgtctctactaaaaatacaaaaattagcctaacatgatggcgcacacctgtaatctcagctattcaggtggctgaggctcaagaagcccttaaacccaggaggcagaggttccagtgagctgaaatcatgccactgcactccagcctgggcaacagagcgagactgtctcaaaaaaataaataaaatttacatacagtaaaattcattttggtgttcagttctgtggtttcataaaggcatggagtcacagatccaccgtcacagtcatacaggtctatcgtcccccaaattccctctctgccccaacctccaaccctttaattttgccttttccagaatgtcatgtaagtgaaattatactgtaggcaggcttcttccatttagcgtaaatcatttgaaattcattcacgtgttgcatgtcaactgttggatccttgtgtttaatgctgagtagcatccattatatggatgtgccaccgtttgtttatccattcttttatgtatcataatagcagcctttttagatatgtccccgttagacagtgaggcactagggattggagttgctaagtagcagagctgcttttttgttgttttttttttttgttttgtttttggagacaaagtcttgctctgtttcccaggctggagtgcaatggcgtgatcttggctcaccgcaacctccgcctcctcagttcaagtgatgctcctacctcagcctcccgagtagctggccttcatgcccagctaatttttgtatttttagtagagacaggatttcaccatgttggccaggctggtcttgaactcttgacctcaagtgatctgcccaccttggcctcccaaagtgctgggattacaggtgtgagccaccgcaccgggtccaagctgaattttgatcaaaccccaaatccagggttcttccccaccacatcaaggaactgattgggttaaacaacccaattagcatttcttcactgcccatccaagaggttgtcaggttcctagagttggtggagaattctcttttacctggtgcctgcggttggaaggaggagcaggtactccacagttaatgcctcaccatatgtgctcctctttactggtgtgatagcaggctcaccagatttagcatggttgggactgcccaaagcatacattatttcagcaaataaatttgtctgagttactcccggggttgactgcactgggttatcagtctgctagtgcagtggtgtagcaggggcaggaccagcctgtttcatgccctggaacaaccagccaggaaagatctaacccttgggccttcctcctcagtgatgtccgagctcagcgatgaagccagcgagccggaactcctgaaccgcagcttgtccatgtggcacgggctcgggacacaggtcagcggggaggagctggatgtccccctggatcttcacacagctgcttccattggccagtatgaagtggtgaaggagtgtgtgcagcggtaagagatctcggggaacttcctctcacattttgagcagcgcagtgatggcttcgatcccacgtgatggggctttgcacacagttgtggatgtttaatgcgtgtagaataggttaacctgcttatctcaggcagctgtcagtaagtattgatgctgagccctgacaaagaggccgtttttattcctaggaagaaaaagagggagtaaactttgatcagaagcttataaacagtcattctttaaccagactaattttattcactaattgcagaaatgcccaaacaaacaagcaaaataaaaataaagacagaaagtgatggcctggtgcggtggctcacacttgtaattccagcactttgggaggctgagatgggcgggtcacttgaggtcaggagtttgagaccattctggataacatgatgaaaccccatctctactaaaaatataaaagttagctgggtgtggtggcatgtacctgtaatcccagctactcaggaggctgaggcaggagaatcgcttgaacccgggaggtggaggttacagtgagctgagattgcgccactgcactctagcctgggcaacagagtgagactctgtctcaaaaacaaaaaaaagaaaaaagaaagtgatccctggccttcttttcccggagggttcattcgatccctgtgatccctgttcccctctagcttctgccatggaggaggagagaggctgggctttcagtgcctctggggaatgacctcccgacgtcactgcccacctgccctttgctaatctgtgtacaatagttagagacaatataaagcccctggcagggtccatggctgcgtcttgcccatagtaggatgtgatcatcttgtttttggaaaagggtcgtctcctcacttccacccccttatgttccacacacagcctaactctgtctcctggttctcatttgatattgtggtgcagcgacctctcttcctctctctgcgtgcctcttccagttcccagtgagccaaagcaaagcattgctgaagccccaggtctccggttcccaagttgtggccctcacttagacatacccagcccatggagtgctggtgcaccttggtacagggtggtctgttgcgctccctccacaggaggctctaggcataggcagctgggtatgcagtcagtacggcccctcaaagggtcacgtttggaattctcaggctcttaagtctttgggtgtcctgttaagatgcagagtccataaccgctccatagaggagcagggggaggcgtttgtgttgtgatgggattttgacactagctgaggtggaggcttgctgatagtaagcacaggatggggcctgaggggagctgggggcatcagaaggaaggggtggggctgaacgaggagtggtaagagagccccagggagatgctctgctgttgtgtaaaggaagatagtgttaggacgagctgggtgcattcgagccctgctgcagaggcatctccatgcagcccccctggccaggggctgccactgaaccctggtatcaggaccttctggaatggctgcccaggtgtgcatcccagagtcactgagggctgccaggcaatggaaggtagttgcctgctgtggtctaatatgtgaatcccggctgggcgcggtggctcacgcctgtaatccagcactttgggaggctaaggcgggtggatcacgaggtcaggagatcgagaccatcctggctaacacggtgaaaccccatctctactaaaaatacaaaaaactagctgggcgtagtggcgggcgcctgtagtcccagctacttgggaggctgaggcaggagaatggcgtgaacttgggaggcggagcttgcagtgagccgagatcgcgccactgcactccagcctgggcgacagagcgagactctgtctcaaaaaaacaacaaaaaagtgaatcccgtaaaagggacagatcctggggttcagtcaccagttgttatcccctctgcaggcaagaactggggaagggaaagaaggcctgtgggcgttaaccatgtaggatcccaggtaaccatgcaagtgggtattattttaaatgtgactcccttgtcccaaccccagagtcgcagctaggaagcccacagttttttcccatgggaaaatgcattgccagaattttaacagcaatcagtgagaaagatgggattctttggtcacagatttttcaagaatgtttctttaaggtgaggtgacaaaggatgaatcagtggcggtgggacttgtccacggtggagtcccttctttcctcactgctcctctccacccagcagtgggctagtagatgccaggcctgtggtggtcagggtttttcaactgtggctgtgttgacaatccaggctggatcattctttgctgtgggggctgtcctggacactgtgggatgtttagcggcagccttggcctccagcagcccttccctgcccagttgtgagaaccaaaaatgccttcacacattgccacatattccctggttgagtgccatctgcctatctggtggtgtgaaagagcatagctggccttgggctaggaggatgcgaaatcagagcaaggagacgaaggctcagggcctcacaaggcagtgtacgagcaactgtcagcatttttctgcctgcctgcctccaatccccacaacgtccagggtggcagataacttctgcttcctgtcaactcatcccgcctggcctagcctcgccaccagctttggtgaaccccacatgcgaggcggctggccatgtctagcatatcttgcgtttgtttaggagagagttagatttgaataagaagaatggtggtggctggaccccgctgatgtatgcctcctacattggccacgacacaatcgtgcacctgctgcttgaggcgggggtgagtgtgaatgtgccgaccccagaagggcagactccactgatgctggcctccagctgtggcaacgagagcatcgcctactttcttctccaggtgagctacgagggaactcaggcccagaaacctgaggggctccgtggccaccctgacagagatgcgaaccactgcaggccacggtgttcgtgtgtgctcgtgtaatcacttctgattcttgcagcatggccgcctggagggcgcccgccccacgcagaggagatgaggccgtaacgcacgttctgtgttctcttgaagcaaggtgcagagctagaaatgaaagacatccagggctggacagccctcttccactgtaccagcgccgggcaccagcacatggtcaggttcctcttggacagtggagccaatgccaacgtgaggtgattgccacatctttagtggccacaggagtggcctaggtgtcatctgactctaaggagggtggctctggaggcagctaaccagagtttagggccaccctgcttcggcacgagaggctcaagatgaggggtaggaccagagtccttccaggcacaggccttttcgtacatctgtgagatgcatctcttcaagccctctcagcttccttttctttatctgaaacccacctgggtcatacagttgtaagaattacatgttttattgtatgccaggggcctaacatactgaatggcatttaaatgtcatacattacatgcaaattccttccattttcttgctttttgtatggatgaggtgaggtgatgctttgaaacagtcatgaggccgggcgtggtggctcacgcctgtgatcccagctctttgggaggccgaggtaggcagatcacgaggtcaggagatcgagaccatcctggctaacatggtgaaaccccatctctactaaaaatacgaaaaaattagctgggcatggtgacgggcgcctgtagtcccagctactcgggaggctgaggcaagagaatggtgtgaacccgggaggtggagcttgcagtgagccgagattgcaccactgcactccagcctgggtgacagagcaagactccatctcaaaaaaaaaaaaacaaaaacaacagtcatgagttttggccgggctcagtggctcacacctgtaatcctagcactctgggaggccaaggcgggcagatcatgaggtcaggagttcgagaccagtctggccaacatggtgaaaccccgtctctactaaaaatacaaaaattagctgggcgtggtggcaggtgcctgtaatcccagctactcgggagtctgaggcgggagaatcacttgaaaccagaaggcagaggttgcagtgaactgagagatcgtgccactgcactccagcctgagcaacaagagcaaaactctgtctcaaaaacaaacaaaaaaccagtcatgagttttataagttggaagtgggattgttgtctaaagcttgtcatgataataatcacctttgaacaaacgcagcgggtaccaatgcagcacccaccctggctgtcattcattctaagacacctgataattttgtatgccactaagaaagaaaaaatatgctactaattaacattcaactcgcctgttgatttaaagatgttttctgacttgagagatgttaaaatatgaacactgtgtgtcttaagatggatgaaaaccagcatttcccatgcatggttcctgacttccaaaccagcatgagacaaggagggatttggaagccctctgaagacagtgccgagttagcataaccaagcatgaaaagcaagcttcaggagctaagcgtggcaaagatagcttagatcattagtacttgaacttttcagagtgggttcatggaggacgttgaacttgaagccaggatttggatgaatggatgggagatgctggctttctgtgaggaattagaacagctttttgaatatgattgaggtggagatttcagaggtagccagtgggaatagccaacaggtgggacgacaggcagacatctgtctttaggacaaagaccagccctggggacagacaccagaagagtaaatggagctgatgtgttatattcactgttctcatgtcacctgttaattctggaaagggacagtgttctacgcttagggatcggtgactcgtgcactgctcagggtttatcttcagcagggagtttttgcctggcggaacttgtctcttccaatcatctgactgtggcccacatcttgcagggagccgatatgtggatttactcccttgatggaagcagctgctgctggccatgagataatcgtgcagtattttctgaatcacgtaagtgaccctgattattagcatgtaatgtagtcacggcaaatgaggaatcatattactgaagtataagctattacagaattttcctttgcacagaaataactttcattcatttattcaacacattttcattatctattgacgcccggtgttgagtggtgcttaggcattaaggatacagtggtgagtagaaatagacacctattcctgtaataattttgaaaatactatctgaaaattatggaaaaatattttaaaagtaaatagcactcataatcctgtcacttagaaaaattatatagaataagaaggcagagatcctcctctctttttcaacctccctgatgcccacttggtttgagaaagagctgccctaggacttttcctctgctgtggaaagatgtgtctgtaggcaagtgtgtgcacattgctttgtgttttgaacaaagtgggattctacgtatagtctgtaacttagagacatcttatagacatcttatctttgtacagtattccgtgtacaatctgcctcagttaatttaatgagtttcttattagtagaaacttagtttttaacattttgcaattataaacagtgttccgggaatatccttttacacatagctttaatacatttgcagttatttctgtatgttgtatttctgttttattttattaatttatttttttgagacatggtgttgccctgtatcccaggctggagttcagtggcgagatcgtggctcactgcagcttcagcctcctgggctcaagcgatcctcctgcctcagcccccaagtagctgggactacaggtgcatgctaccatgccccggctaattatttaattttttttttttggtagagttgggggtctcagtatgttgtgcaggctagtcttgaattcctgagctcaagcgatcacctcagcctcccaaagtgctgggatcacaggtgcaagcctgtccacacagaaccttgtacataaatattcatagcagtattattcataattgccaaaaagtagaaaaacccacaagtccatctactgaggaattgataaacaaaatatatatctgtatagcaggatattattcggccctacaaagtaatgcagtactgctgcatgctgcggcaggggtgaaccctgatgcgttaggctgggctgggtgcggtggcgcacgccggtaatcccaacactttgggaggctgaggccagagggtcgcttcagccctggagttggaggttgcagtgagctatgattgcgccgccacactccattctgggtcacagagtggatcctgcctcaaaaagaaaaagaaaaggaaaacattcggctcagtgaaagaagccagacacaacaggccacacactaggtgatttcactcataggaaatgtccagaataagcaaatacatagacagaaaatagatgagtggtttcctgggtcttggggaatgggaagattggggtgataaaaatgtgctaaaattgtttgtggtgatggttgaacaactgtgaatatacgagaagccgttgaattgtacattgtaagtgggtgacttgttggtatgtggattatatctttataaggctgttaaacccaatggggggaagtgcaggcggtcctgatgaattcccactaccaaggttgtctgttgtcctgcccaccagtcatagacaaaggtgtccattttctcttgtcctcaccagtcctgatgtcagtcaaccttttgtcaatctggcgggtgaattgtagcgtctcattttagtttgtccttgttagagtagttgaaatttttttctttttttttttttttggagacagaagtcttgtgctgtgtcgcccaggctggaaggctggagtgcagtggcgtgatctcggctcactgcaacctctacctcccaagttcaagcagttcttctgcctcagcctcccgagtagctgggactgcaggcacccgcccgcacacctggctaattttttgtattttagtagagatgaggtttcaccatgttgcccaggctgctcttgaactcctgaactcaggcaatccacccaccttagcctcccaaagtgctaggattacaggcataagccactgcgcccagccagttgaacatttttaaattgatttcttagccatttgtatttcttttttttttttttttttgagactgagtctcactcagtcgcccaggctggagtacagtggcatgatctcagctcactgcaacctccacctcccaggtttaagagattgtcctgcctcagcctcccgagtagctgggactaaaaatacaaaaaatcccggctaattttttgtatttttagtagagacaaggtttcaccgtgttagccaggatggtctcgatctcctgacctcatgatctgcccgccctggcctcccaaagtgctgggattacaggtgtgagccactgtgcccggctggccatttgtatttctcttacgagctgtctatgtttattgcccaattttctattggatagtttgtttttttctcacttattggtgggaatttcttaaatagtgaaaaattcacatggtatctctttttaacaaagaattttgggacacaacatgcacatggtacacatgcagaccagaaggtgggtgcaccgcaggcctgtcccccaccctgcctgcgtctccttggcaccctccccacgggcgactctgggaatacacccacacatgctcatggtcctgccccatgtgcagctgctcccatcttgcattttttaaaaaacttaatcatgaagatttttctatattggtgtataaagagacggggccaggtgcattgtctcgctcctgtaatcccagcactttgagaggccaaggcagacagatcacttgaggtcaggagtttgagaccagcttggccaaggtggtgaaacccgcctctaccaaaaatacaaaaatacaaaatacaggtggctgacgctgtaatcccagctacttgggaggctgagacaggagaatcacttgaacctgggaggcagaggttgcgatgagccaagatgttgccactgcactccagcctgggtgacagagtgagactatctctaaataaataaataaataaataaataaataaatcaataaatcaataaagagatggggtcttgctctgtccctcaggctggagtggagtggtgcagtctcagctcactgcagccttgacctcctggtctcaagtgatcctcctgcctcagcctcccaagtagctgggattacaggtgcgtgccaccacgcccagccaatttttgtattttttttgtagagatggggttttgccacgttgcccaggctggtcttgaactcctgagctcaggcagttcgcctgcctcggtctcccaaagtgctgggattacaggcacgagccaacgcacccagcccctctcttttttttttttttttgagatggcgtcttgctctgttgcccaggctagagtgcagtggcacgatctcggctcactgcaacctcagacttccgggttcacaccattctcctgcctcagcctcccgagtagctgggaccacaggcgcccgccaccatgcccagctaatttttcatatttttagtagagacggggtttcaccgcgttagccaggatggtctcgatctcctgacctcgtgatccgcccaccttggcctcccaaagtgctgggattacaggcgtgagccaccgtgcctggcctctcttttttttttttttttttatggtggcatggtattccctgtagggatgaatcagagtttttttgtttgtttgtttgtttgttttgagatggagtctcgctctgtagccctggctggagtgcagtggcgcaatctcggctcattgcaacctctgcctcccaggttcaagcgattctcctgcctcagcctcctgagtagctgggattacaggcgtgtgccaccacgcccagctaattttgtatttttagtagacagggtttcggcatgttggtcaggatggtcttgaactcctgacctcaagtgatctaccactttggcctcccaaagtgctgagattacaggcatgagccactgcgcctggcctaccgttgacatttcttacacgtctttttaagcacatatgggaatttcttcaggagcttaggatgtgttcttcaaagtagagtctttgttgtgtgaggtgggttcagtcggtagtgggtagtgtaaacttgctttgttccatagtggtcctggttcacacccctccccttagggtgttagacttcttttttttttttgagatggagtctctctctgtcacccaggctggagtgcagtggcgcgatctcggctcactgcaacctctgcctcccaggttcaagcgattttcctgcctcagcctcccgagtagctgggactgtaggcactcgccaccatgcccagctaatttttgtatttttagtagagacagggtttcaccatgttggccaggatggtctcaatctcttgaccttgtgacccgcccgccttggtcttccaaagtgctgggattacaggcgtgagccaccgtgcctggccttttttttttttttttttttggggtggggtcttgctctgtccccaaggctggagtacagtggtgtgatctcagctcagtgcaacttctgactcccaggctcaagcaattcgcctggctcagcctcccgagtagctgggattccaggtgtgtgccaccatatccagctaatttttgtatttttagtggagacagggtttcaccatgttggccaggctggtctcgaactcctgacctcatgatctgtctgcctcagcctcccaaagtgctgggattacaggcgtgagccactgtgcctggccaggatgttagactttttggctccctggccatttgggtttctttttctgcaaataattatttttgtattttttatttattttttttatatagggtcttgctttgtcaccacactagagtgcagtggcctgatcatgggtcattgtagtctcaacctcctgggctgaagtaatccttctgcctcagcctcctcagtagctgggactacaggcacgcactaccacgcctggctgttttttttttgtagagacaaaaatctcactatgttgcccaggctggtcttgaactcctggcctcaagcaatcttcccaccttggcctcccaaagtgctggagttacagacctgagccaccatgcccggccagataattctttgacagataatcctgctgacatgaactagacttccttaagacacatcatagaatcaatagcccagaaccataaagagcctctacttgtaagtttagagtcattttaagtaaggtagaactggagatcataagagatatgtactcttataatttttgattgtatgtttgtttctttttgagacagagtctcactctgtttgcccatgctggagcacagtggcgcgatcatagtttgttgcagcctcaacctcccaggttcaagggatccttgcaactcagcctcctgagtagctgagaccacaagcgcatgctatcacactagctgatttgatttttttgtagagttggggtctcactaagttgcttaggctggtctcaaactcctggctgcaagtggtcctcccaccttggcctcccaaagcgctgggattacaggcaggaaccacggtgcttggccaacaatttgcatgcctttaccacattccccaaatgttaacatttcacctcattttcttatcagtctctttatgtataacatgcatatgttttctgaatcatttaaatgtaaattgtgacataatgccccttttcccctaaatatgtatttcctgagagtaagaatttcattatgtatttcctaaaagcaaaaatgttctctttcccagtcacacaaaattatcagactcaggaactcaacactgagttcttcctccagcacttgacaagaatcaaagtgttggttagtgactgctttgggggatggggcaggactggcagcaggtggcccgatggcctgggtggtttgcctgccagcgatgctggtgggcaagccctgcctggaagctcctctctcccacgtttttcctgccgcccagtagttagaccacctggagccagaggagggggcccacccggtttcccagcctgtccctccagagctgggctccatttctggaggtagagaatggggcaagtctgggcatcttgtgctctttgctaggggaggaaagggctgtggctgctttccttgtcccccatttcccttctgccagtggggccaagccccagcagctcagtcaggagaagaggatatggatctgtctgggcctctctctttaagagaaagttgattcgtgccttccggatagtcttgttccagggtttctaaactttctgatcccaccttcatgttaaaatgagttttgatcatgtgtctctttagtaatatggacattataaaataggaaaaaaaagtctcttaaagcctaagtagttaaaaatttattttcacatcaggcatagtggctcatgccagtaatcccagcacttttagaggccaaagtgggaagatcgcttgaggctggagttggagaccagtctgggcaatacagtgagaccttgtctctaaattaaaaaaaaaaaaaaaaaaaaaattggccaggcatggtggctcatgcctgtaatcccagcactttgggatgccaaggcaggtggatcacctgaggtcaggagttcaagaccagcctggccaacatggtgaaaccccattagcggggcgtggtggcgtgcccctgtagtcccagctacttgggaggctgaggcgggagaatcacttgaacccggaaggcagaggttgcagtgagccgagattgcgccattgcactccagcctgggtgacagagtgagactccgtctcaaaaaaaaaaagccagttgtggtgtgtgtttgtaatcccagggaggctgagaagggaggatcacttgagctggggaggtcagggttgcaatgagccagtgtaatccagcgtgggccacagagtgagattctgcctcaaaaacaaaaccaaaaatatataacgagttaaaatcctacagtaaagaggctactgttttattctggttaaaccttagggttccttctatcaaacttaaactagaattttttttttttcttgagatggagtcgccctctgtcgcccaggctggagtgcagcagcttactgcaatctctgcctcccgtgttgaagcgattctcctgcctcagcctcccgagtagctgggattacaggtgtgtgccaccactcccagctaacttttgtgtttttagtagatacaggctggtctcaaactcctgaccaggctggttgttggccaggctggtctcaaactcctgacctcaagtgatccgcccacctcagcctccaaaagtgctgggattacaggtgtgagcctctgtgcccagccaagaaattattttttatttttgagatagagtcttgcttcgtctgttgcccaggctggtgtgcagtggcgtgatcttggctcattgcaacttccacctcctggactcaggcaattctccttcctcagcttcctgagtagctgggagtacagacgtgtgccaccacgcccggctaatttttgtatttttagtagagatggggttttaccacgttttcccacattggccaggctggtcttgaactcctgacctcaggtgatccacccgtctcggcctaccaaagtgctgggattacaggcttgagccaccgtgcccagcttataaattattgttattatttattattatttttttgagatggaatctcagtctgtcgtcgaggctgtagtgcagtggcgcgatctcagctcactgcaacctccgcctcctggattcaaggatttctcctccctcagcctcctgagtagctgggatacaggcacgcaccaccacacctggctaatttttgtattttttagtagagacggggtttcaccacattgcccaggctggtctcgaactcatgacctatgatccacccaccttggtcccccaaagtgctgggattacaggcgtgagccactgtgcccggcctataaattattttttaaggcacaaagtctcataggtaatttttaatcagagtcaaaagtaggatggggggcactctagaaagtaaaactccttatactttgtgaaaacacagttttttgtcctgtatccctgcccagagaccacctctgcctcccccaccaactacatatgggggtcaaggttgaggccccctggtctaacgggagagacagttgccgtatgggtggtagcaaaactccttaagggttgtgatttttttttttttttttttttttgagttggagtctccgtgtgtcgcccaggctggagtccagtggtgcgatcttggctcactgcaacctccacctcctgggttcaagcgattctcctgcctcagccccccggagtagctgggactgcaggtgcccaccaccacgcccggctaatttctttttgtatttgtagtagagatgaggattcaccctgttggccaggctggtatggaactcctgaccttgtgctccgtccacctcggcctcccaaagtgctgggattacaggcatgagccacggcgcctggctgtgccttttttctcttaatgatgttttgtgcaccctagtccgtgtcaccgcaggtactcccacccaccacgtaaatgggcgggaggcgctctgttttctggatatgctctcacgtagctcattaatctcttattttaagttccttctgattctcactatgctgaatgccacagtgaaaattctaaattgtagtgtatgtcctgcattatttccttaggcgccgctgcacttcagcctgggtaacagagcaagatcctattaaaaaaaaaaaagcaaacatgcttatggtagtacattttaaaaacatagaagattggaaaattggaaaaatccccatcaaaaatagtaaataacttaaaaatagcaacattttgggtatgttaccttccaatattgttttctgtgtaatttttttggtctcattttgccggagttgtaatgtatatgtagttttgtatcatgatccttttttatttttttgagacaaggtctcgctctattgcccaggctggagtacagtggtgcgatctcagctcgctgcagcgtcaagctctgggacttaagtgatcctcctgcctcagcctcctgagtagctgggactacaggcatgtgccgccacaccctgctaattttttattaaagatgctccccctttccggggtcccgcctcctcctctgagctttggctctggcttccctgcctcccccagctgcctggtctgacaggagagaaggacagttacagtgtacagtgacaccaaaaacatgctgtattgattatagtttatttttttttcttgtagaggtgggttcatgctgtgttgcccaggttgttgtccaactcctgagccgagcgatccacctgccttggcctgtcaaatgctgggattacaggcatgagccacctcacttggccatgatcctttttcaacttgatcatacagctgtttgtaaatatcaccatctatggcaataacagaactgactgcttatccccctgagcattcaagttttctctaggtaggttttcattattgtgaatatgctgtgccaaacatcctttttttttttttttttttttttttgagacagagtctcactctgtcttcaggctggagtgcagtggcatgatctcagctcactgcagcctccgcttcccgggttcaagcaattctcctgcctcagcctcccgagtagctgagactataggcgttcaccaccacgcccggctaatttttgtatttttagtagagacggggtttcaccatgttggccaggatggtctcaatctcctgacctcgtgatctgcccacctcggcctcccaaagtgctgggattacaggcatgagccaccgcacccggcctgtgccaaacatctttgtgcactaaagccttttctgtatttagggttatttccttagggtcatggaagtggaattgttgcgctgcaagacctgtaaatacattatagagctttggatcaaagttacgaattctgcttcagaggatggtgctttcattctgactggtttaaaaggctgctttctttgaagacaagcgaagtgagtgggacacagcccaggcgcagaaggtgaaggctgggatctccgcatggtggctgccagccccctgcaagggaggtcatgagcgtgggagatgactccccagcccccagccctcctcatccttgtccctaagaagagagtgagagcaaaacttgtggctgcggtgcagacaagcctgcctctttctcatgcagatgtgatgtttcccacacagggaggcagtcagaaaccagcatatgcccttctgtcttcccagccagcagcccaggaagggcaggtgctttgaaggagaggcccctaaccccctttcacggacattcacagggagtcaaggtggacgcgagagaccacagtggagccacagcccggatgctggccaagcagtacggacacatgaagatcgtggccttgatggacacttactcgccctctctgcccaagagcctctatcggagcccaggtacccacacctgccagccgcgccctgctggggtctctggttgccttgagctttaggtgacctggcagagaaagatgtcccccgcttccccggctcccaccttctctgagatttggctctgcctcccccagctgcttacatgtcaaggttgaggcccctgctctaacaggagataaggatggttacgatggagagtggtacaaaaccaggctgttgtgaatgtagaggctttctgtagtatgcttgactaccgagtaggggcaggcccctcttagttttctgttttcactgtttcctgagctatggcttgttcattcttctatatgaacttgaatatcaacttgtctagctccttaaaaacagtattgatatttttactgagattgtgacaatgtataaattaactatatctttgtgttgttgtcttatccaagaacaagggatgacttcttgttccaatgtacttttgggtcttgcaggagggttttaaatttttcttcatctacattttgcatgtgacttaagtttattcctaagtgtttgatcatctttgtcgctattgtaaatggggttttccctatcattatatcctttttttccccccaactctcagggtattaattattcagtgctatttattttttatttcagtaggtttttggagaacaggtggtggttggatacgtgaataagtcctttagtggtgtcattatatcgtttcactgcatattgtcagtgcatttgaaggcagtggatttctgcaaacttttgttttttttttgatacgggagtttcgctcttgttgctcaggctggagtgcaatgaagcgatcttgcctcaccgcaacctcttcctcccaggttcaagcaattttgcctcagcctcccaggtagctgggattacaggcgtgcaccaccatgcccggctaattttttgtattttcagtagagatggggtttctccatgttggtcaggctggtctagaactcgcaacctcaggtgatccacccatctcagcctcccaaagtgctgggattacaggtgtgagccactgcactcagccctgcaaactaattttatattctgctaccttacagaattcttacattgttcaggttagttttgttattgattctttagggctttacaggtgtactaacatataatctttaagtatcgatggatacactgcttcctgctgattctcatgactctgactttgttgaattgcaccgttcttttgtttagttgctaacacctctagctcattgttcaacatagtggagatagtgagcctccttaccttggtcctgatcttagtggaaatgccacgttacatgagaggctgactgtaaaagggaaggcatatgttattttagcttattaacaaagtattcctcagttcttctattcctgagtggtgttttacaggagtaactattgaattgtgttcccatatctttggagacgatggtgaattttcatatggtagattgtcttcatgaacctcctaataatgaatcaaccttacattcttggcataaatcccacatgttgtactattttaatgtgtttttgaattctgtttattaatatttagtatttttctatggatattcagtcataagtgatactggtctatagttttctttcttctttttttttgtttttgaaatggagtcttgctctgttgcccaggctggactggagtggcgagatctcagctcactgcaacctccgcaacctccgcctcctgagttcaagcaattcttctgcctcagcctcccgagtagctgggatcacaggcgtgcaccactacacccagctaatttttgtatttttagtagagacggggtttcaccatgttggccaggctggtctcgaactcctgatctccagtgatccgcctgcctcagcctcccaaagtgctgggattacaggcgtgagccaccgctcccggcgtggtctatacttttctatttttgttctgtctatcaggtatgggtatcagtgtttacttcataaaaataatttggaagttttccttccttttttgtgttctaggacaatacacgtagcattagtgctacctggtcttagaagttttgatagaatcctcccatgaaaccatctggtctctttctgtgaggtggttcctcgataacagtttttctatttcttctatagagattggcctcctcatactttcttttcttatggggtcagttttggtaaattatattttcctgagagatcacttcatctaggatttcagacttatctgcagaggtctacaagataatattttctccctttttttttttttttttttgagacagagtttcactcttgttccccaggctggagtgcagtggctcgatcttgactcaccgcaacctctgcctcccgggttcaagtgattctcctgcctcagcgtcccaagtagatgggattacaggcatgcgctaccatgcctggataattttatgtttttagtagagacagggtttctccatgttggccgggctggtctcaaactcccgacctcaggtggtctgcccacctgggcctcccaaagtactgggattataggtgtgagccaccgcacccggccaatttttttctccttttaaaatattctgtttcagggccaggcgcggtggcttatgcctataatctcagcactttggaaggccgagttgggcggatcacctgaggtcgggagttcgagaccagcctgatcagtatggagaaaccccatctctactaaaaatataaaattagctgggcgtagtggtgcatgcctgtaatcccagctactcgggaggctgaggtgggagaatcccttgaacccgggaggcagaggttgaggtgagccgagatcgtgccattgcagtccagcctaggcaacaagagcgaaactctgtctcaaaaaaaaaaaaaaaaaaaaaattctgtttcaggctgggtgcagtggctcatgcctgtaatctcagcactttgggaggctgaggcgtgtggatcacttgaggtcaggagttcaagaccagcctggccaacatggtgaaaccccgtctccactaaaaatacaaaaataagccaatgtggtggtgtgcgccagctactctggaggctgaggcaggagaatcacttgaacccgggagggggagattgcagtaagccaaaatcacgccactgcactccagcttggcgacagagcgagactccatctcaaagaaaagtaaatagataaaataaaacaaaataaaatactctgtttcagtggttattttctcctgttattatctttttttggcatggaaaatattgatttattttttgtgacagggtcttgctttgtcacccaggctggagtccagtgacccaatctcgactcaatgcaacctccgcctcccaggctcaaaacgatccttctacctcagctctacgagtagctaggactgtaggtgcaccctaccacgcccagcttacgtttgtattttttgtagagaggtggttttgccatgttgaccaggctggtctcaagagtcctgagctcaagcaatccacccgcctcagcctcccaaagtgctgggactacaggcatgagctactgcacctgacctggaaaatatttatctcatttttaattgacacaaaataactacatatttatggggtacagtgtgtgatgttttgatacatgtatacactgtgtaatgatcaaattaaggtgattagcttatccatcacctcaaacatttatcatttcgaggtgagaacatttaaaatcatgtcttctagtagctattttgaggtataagctgttgttccgtatagtcactctactgtgaacaccagaacttctttcttcgatctgtaattttacacctattgaccaatctctcccactacctccccacccccaacctctgataatcactattctactctacatgtttgacatgagcttttaaaaatcctgtaaatgggtgacatcatgtagtcatgtagtcttttttgttgtttgtttggtttttgagacaggttctcgctttgtcacccaggctggagtgtggtggcataatcttggctcactgcagcctccaattcctgggctcaagtgatcctcctatctcagcctcccgagtagctggcactacaggcacctaccaccacacctggctaatgttttatttttttgtagagacggggtcttgctatactgaccaggttggttttgaactcctgggctcaagtgatcctctcgccttggcctcccagagtgttgggattacaagtgtgagtcaccacaacagctggcatttgtctttcttttctatgtctggcttattttactgaacatagtctcttccaggcttattcatgttgccacaaatgatcagatttcattctttatgtctgaataatattcaattgtgtatataaactcattttctgtcttcgttcatccactgatggacacaggttgattctctatctaggctactgtgaatactgcggcagtaaacatgagggtgtagacatctctttggtatactgatttcctttcttttggataaatacccagtagtggaattgctggatctcatttcttatattttttaatttttttttttttttgagatggagtttcgctcttgtttcctaggctggagtgcaatggcacgatcttggctcactgcaacctccacctcccgggttcaagcgattctcctgcctcagcctccctagtagctgggattacaggcatgtgccaccacgtctggctaattttgcatttttgggagagacagggtttctccatgttggtcagggtggtctcgaactcccgacataaggtggtccacccgactcggcctcccaaagtgctgggattacaggcatgaaccgctgcacccggcaaaaatttcttctattaaaaaaaatagagacagtgtctcagtatgttgcccaggctggtctcaaactcctgggcccaagcgatcctcccacctcagtctcccacagtgctgagattataggcatgagccactgcgcccggcctcacttcttattttgaatatttgtgtttgttctttttttttttttgagacagagtctcgctctgttgcccaggctggagtgcagtggcgcgatctcggctcactgcaacccccgcctcccaggttcaagcgattctcctgcctcagccttttgagtagctgggactacagggtgcccaccaccacacctggctaattttttttttgtatttttagtagagacagggtttcactgtgttagccaggatggtctcgatctcctcacctcgtgatctgcccacctcggcctcccaaactgctagaattacaggtgtgagccaccgtgcgcagcctcttcctttttttcttaagttaaatactagtactttgtctgtttagtggaaaaacaagaaaaacccatcggattttgatttattaatgagacctactgattgtctgtttaatttctgcttttatttttatttggcttactttgttgttctagttttttgagttggaaacttctttcattttcattgttgcccttttgttgctaaatgttagaggctgtgaatttttgctgattgctgctttaagtgtattctgggggttctgtatttaatactttccttgttatttttagaaattctgtaatttttatttatattttctccttcacccaggagttgtctaatagaagtattatgattgtttttgtttgttaatttctagatggaagggcctttttgatcttgcaattaatttctcatgttattctgattaactttaatgtgtctgatcagagagtgtttataattcttacatttacataacttccttgtcatcttatttatcatctactgatctatctatatatatatatatttttttcagatgtagtctcactctgtcacccaggctggagtgcccaagtgcgatcttgactcactgcaacctctgcctcccaggttcaagcgactctcctgcctcagcctcccgagtagttgggattccaggcatctgccaccacgcctggctcatttttttttgtatttttagtagggacagggtttcaccatgttggccaggttggtcttgaagtcctgacctcaagtgatccgcccacctcggcctcccaaagtgctgggattacaggcgtgagccaccgcgcccggccctgatcaatattttttagtgttccgtgttttgcttgagaagttgtattctctattatctgtatacagtttagcatatctgtgagtctatcttatttaggattatgtactcttagttcattttctacaaaattacctattagcgtgtttctgatttatgaaggaagttggtgcattttttggtgacagattttcataacttgttatagattcactgtgaattatggcttttagtattagaagtgtccttctggctgggcatggcccatacctgtaatccgagcactttgggaggccaaggcgggcagatcccctgaggtcaggagttcgagaccagtccagcctacatggtgaaaccttgtctctactcaaaatacacaaattagccaggcatggtggcacatacttacaatcccagctactcgggaggctgaggcaggagaatcacttgaacccgggaggcggaggttacaatgagccgagattgtgccactgcactccagcctaggtgacggagtgaaactctgtttcaaaaaaaaaaaaaaaaaagtgtccttccgtgtcatatttaatgtgttttgccctgaattccacgttgatagcaggattgcagccctggctcttttgtggtttccatctgcctgttctttttaagctgctctgagggtgtgttgggtgctgagattcacgcagctgccgttcccttgcttattgctgcctctttgcatttgtcttacagctccctccccttcagcttggatggaagcacagtctccctggagtgctatagatctttgagtgtgaggaggtgtgtgtccatatggctagctcagtcgccagagcttgagcctcgtcatggggaaggacagagtggcccacgttcagggcctgagctctccctctttgctggcctgccctgagttgtcctgtcagtttgcacctgagcgagcagctcctttctcagtgtcaggctcagcccagcctcttccctggcattgggattgtttcataataaacacagctcaggtggtaatgcaaaggacctttcccttcatttctgccccagcttacccactccacaaggagatctcatcatttcctcctgtatacaactcacgtatctcttaaaagtagaatcagatcagagccttatacaaatcaaatatgaaaaactgaaaagctacaaaataataaaagctctggtttgagctctgaaagctcagactgggaagtgatttgaaacagtttataatcatagcaaacacatgccatgctttagaaaatacaaaattgtggctgggcgctgtggctcactcctgtgatgccagcactttgtgggaggccaaggtgggcggatcacaaggtcaggagatcgagaccagcctggccaacatggtgaaaccccgtctctactaaaaatacaaaaacaagattagctgggcatggtggccgggtgcctgtagtcccagctacttgggagcctgaggcaggagagtggcgtgaacccaggaggtggagcttgcagtgagccgtgatcgcaccattgcactcctgcctgggtgacagagcaagactccgtctcaaaaaaataaagaaaaaaaaaagaaaatacagaattgcttaataagttgtttccagccgggcacagtggtaacgtgcctataatcccagcactttgcgaggctgaggtgggtggatcacctgaggtcaggagttcaagaccagcctaatatgatgaaaccccatctctactaaaatataaaaattagctgggtatggtggcatctgcctataattcccaactactcgggaggctgagataggagaattgcttgaacccaggaggcggaagttccagcctgggcagcaagagcaaaactccttctcaaaagaaaaaaaaaaaagttgtttccaaaggaagggattaggaaaaagtagttgtgacttatattaccatatattttaatgaagagatgggttttacttattcaaattagaacagaatttctgattatgaacaatacagacttatgaacaatttggcaaaccccaacagagataataaactcctggctgggcatggtggctcatgcctgtaatcccagcactttgggaggccaaggcaggcagatcaggagtttgagaccagcctggccaacatggcaaaagcctgtgtctactgaaaaagaaaagaaaaaaaacactgggcatggtggcacgcatctgtaaccgcagctacttggaagggtgaggcgtgagaatcgctagaacccaggaggcggaggttgcagtgagtgagccaagatcatgccattacacttcagctcgggggacagagtgagactctgtctcaagaaaaatgaaacttcccatcctcactaactttgcagctccctgtggcccattggagcagcgccccggcctgttagggcatttctcagaagtgatgccctggcagatacccttctccttaatttaacaaaaccggcgacagtcactttctttcagtttgccgtaaggattagtaaatgagtccattactgaacacactatcttaatcttggtgtttgatcacagaaaagtacgaagatctgagctcttctgacgagtcctgccctgctcctcagagacagaggccttgccggaagaagggtgtcagcatccacgagggaccgcgagccctggccaggatcacaggcattggcctgggcggcagagccccacggcctcgctatggtgagtggcccgcgtttcccgagggctctttctcattgcataccaggattttgtgttggcaagaatggaatagctcttaggctcctgaaatgtgggtcgctggacctcaggtggcagcgggacaggtggcccagctttcatgctcagggagactcaggattgagtcctgtgatggaaatgcattggtcacggactagctcttgttttttgctttatctcctggagtttccttttcgttggttaaatttaggaatagaactttctctcctgcagcagaaatgtagctaaggtcagatttcattcatcacataggtgggttggctcatacagggaggaggcaaagcgtgaagttcacttccctgccctgcccataccagctgggtcgggtgcgctgctgggggcaggaggccaagaaaacaggccctgctgttttctcagggcgatgaagttgtactcagaccctcctgagagagggcccgcttgttgacttgctggtgaagaatcctagcctttgggttttccagtctcgttcattctcagattcccagccccagggtgttgagcgttttgctcttggggagtgctggggtttctttttaggggagttgggtttggtgcctactctctattgctgtggtctgtcccagagctcagctggaggtgtgagttatgtcttcctttgatggctgtcacccactcatagccaggccaaggctgctggtctcacaggcctggtggctggtccttctcgggagcaaggcctctttgaggccaggacttggaagagtgagagtagacagtgtttcagccaggggtccaccagtaattgaattcccttctagaccccaggaacaagcagatgtgcagacttctgtcttcccaagcctgggtgctgggttgggaactggagacccaccttctcccatcatcctgggaagggtgagctgactgggccactgggaaggcctctctcgagctgctggccagccccaccacagcatgagggcccgcccgtgtcccgtccgctgagctgtgagcactggctctgggacaccgggctggtcgttctgagtggcagagtctcttccttccaaaaggtccctgccacctgctacagcctgaggtgtggtggggacaggaaggaagctgtcatcctggggctgagttggtaattaatctatatagctgtacaacaaatgctttaacaaaatcatacatgtctgaagccgcttgtgtgcggttctttgtatgtatccacagagaagtaatcatggtggtggtctcaggtgtggtatttcaggggatttttgttttctcataccttgtgaaatttaaattttctataagtgcatatattttatttgccagtaattaagaaatttggggccgggcgcagtggctcacgcctgtaatcccagcactttgggaggccgaggcaggtggatcaagagatccagaccatcctggccaacatggtgaaatcccatctttactaaaaatgcaaaaattagctgggcatggtagtacgtgcctataatcccagctactcgggaggctgaggcaggagaatcggttgaacccgggaggcggaggttgcagtgagccgagattgtgccactgcactccagtctggtgacagagcaagactccgtctcaaaaaaaaaaaaaaaaaattgggggggccaggtgcagtggcttatacctgtaatcccagcactttggaaggctgaggtaggaagattgcttgggctcaggagttgtgagaccagcctgggcaatgtagcaagaccctatctctacaaaaaattttgaaaattagccagatatggtggcccatgcctgtagccccagttacatgagaggctgaggtggaaggattgcttgagcccaggaggtcaaggctgtagtgacccatgatggtgccattgcattccagtctggataacacagcaagaccctgtctcaaaaacagtttagggggcaatgataaatagcatgtgctgattagaaaaacttctccataactaggaaaatacgtaaagaggaaagtaagttccccatggtcccatcaaccagtcctttgggttcttttttgagacagggtttcactgtagcccaggctggagtgcagtggcacgatcatagctcactgaaggctccagttcctgagctcaagcgatcctcctgtctcagcctcccaagtagctgagattacagacatgtgccaccgtgactggtcaagtcagtctttttatgtaaaggggcaaaactggagtgaaattgcctggtatacatgcccctttttctgcttggttttagaggcaggtagagttaggtaatttcatattattgttgttaatttttacctcaaggcctttttccttcctgctcagccaggtctctttttcgccggggttgactgaccagaggaggcccgctaagcgcctgtggttaaaggtcacagggacataaagacacgtggtcgatgggtgtctgtgtgaggtcattagctacctcctgctaaaaggaacactcatggtatagttttctctggtcaggcatctgtaaatacagctgaccatttgctacgttttccccttggaaaagaaatggagagggcccaggcttgacctggctgccagccctcgccccaccaggcacttgcttgggccactgactgaccctcagagcatcttttccacccacacaccacagatagagccatgccaggtcgcaggggcaagtaggtgaggtcatgactgggaagtcacctgcctccatcctgggcctcggcctctgaggaggtttcactttggagttccctgggcttatgggccccattctgtacacagagcaggctcctccccgtggctatgtcaccttcaacagcagtggcgagaaccccctggaagaagagggcctctgctgccgggatgtcacctcccccatcaatgagcgggatgtggagagcagcagcagcagcagcagtcggggtacgtgcacccccacccatccggcccgtggctcaggcaggtcctggagctcctgtgtgcccatccccacttatcccctgggcctggcgctggacacagccatccagcagaggacaggaaaggggtaggtgtggacggccctggttcttgtgaggaatgggagaagcttctggtccagcatccccgtgcggcttaagggagccgttccacagcaacaggtttagctccttgcttgggagcccctgaggctttcagggcaggccccagtaggaatgtctgttataactgcacctccgtgcagcagctgtttccatagtgcccaccgtgtgccaagcactgctccgggtgcttgggatttatcagtgaacaaaaaagacagaagccctgcccgtctgtatagaggggagggtttaggacaggcaggaagtttgaaatataaggaagcaaccgctgcaggccccaaggagtgccctggtggaggcggctcagcccggggcacgcccatgcgcagcacctcggtgagggctgcaggcggacgccctgtcttcccgccctcagaggaacatgctttctgtgccaacctggggcccgtccagagcagcagcagcagcgagggcctggccagagcccaggggctcagcagcgaagcttctgtggagagcaacgaggtacggattctttctttcttggtctcccatagccggtccctggctgggatgcctgacatcccccagttactttaagatgagcatgtatgtaagaagcagctgctgcacgtgtgtgctgcactgggacgtgctgtgtccagggtctggcttctcagacgacagcgaacgcaccggaagcccctgtgtggcgggtggggggtttcacgaagcctctcaagcccctgtgtggcgggtgggggtttcaccaaggctctcaagttagcccgcgcactctttcagatgcacgcctctcactgcaggactcggatcatgcctgtaaaagctcagctcgcaaacaagctaaaagttacatgaagaccaagaatcctgacagccagtggcctccccgcgctgcaactgacagggaaggctttctcgctgagtccagcccccagactcagagggccccctactca

SEQ ID NO: 15406 - DNA, 32097 bp, Homo sapiens
ggcgggtgccgggggcggtgccccggcgagggagcgtggcggcgagctgtttggggggggttggcgacggcagcccgagggcggcgcaaggcctgaggcccagcacaggtgggttccgcggcggcccggccccagcacttgccggcacctgcagcccgcctagacccggcgctcgggcgtcccgcgctgcacttgctcgccgcgtgactggaggaccgagcccccacattttctttatgtggttgtggtgggggcacagtaatgccctgtgcgccgtagcgttcctgtggggatgtggccggggggcgtcgggaagcgtcactgctgtgagttacgggtttgtcggccagggacccgccccggggccagtgagctacctttgcgatgcggttccacggggcgagagggggtgcctgggtgctttcacagacctcctctgtgggcgtgacagttaccaccagcatcacatttgttaagatttttaaaaattttttaatttttgtgggtacgtagtaggtgtatatatttatggcgtatatgagagattttgatacaggcatgcagttcgtaataatcacatgtaaaatgggggtctccatcccttcaagcatttatcctttgtgttacaaacaatatgattatactctttgaattatttttaaatgtgcagccgggcgcggtggctcactcacgcctgtaatcctagcactttgggaggcaaaggcgggcggatcacctgaagtcaaggatttgagaccagcctggccaacatggggacacttcgtctctactaaacatacgaaaactaggctggcatggtggctcatacctgtaatctcagctactcgggaagctgaggcaggagaatcgcttgaacccaggaggcggaggttgcattgagccgagatcacgccgctgcactctagcctgggtaacagagtgagattatgtctcaaaaaaaataataataaataaataaaatgtgcaattagattatattgactatagtcaccctgttgtgcggtcaaatactagatctttttttttttttttttttttttgagacggagtctcgctttgtcgcccaggctggagtgcagtggcttgatcaaatactagatcttattcattctgttttttttgtatccattaagcatccccaccctccactacccttcccagccttggttacactagaagtaaccatccttctactttctatgtccatgagttcagttgttttgatttttagataaccacaaataattgagaacatgcaatatttatctttctgtgcctggcttatttcactaaacataacgatctccgcttccatccatgtttttgcaaatgataggatctcattctttttttatggctgaatagtactccattgtgtctaagtaccacattttctttaggattcactgtaaaggtaacagatacttagcattttcagaatggacagaaccaaaaagttgaatgaaaactaaaacgtcttatctctaatgctactttacaccacaccactcgggatgggacattttagttttcactttagtgttttttttttgtttttttttttgagacagaatttcgctctgttgcccaggctggagtgcagtggcttgagctcggctcactgcaatcgcctcccaggctcaagcgattctcttgcctcagcctcctgagtactgagactacaggcgcccaccaccacacccagctaatttttgtaattttagtaaagatgggagttcaccattttggccagggtggtctcgaactcctggcctcaagtggtccgtcacgcttggtctggttctcattgtccttcagacctctggggatgtcagatatgcaagtctccagtaaatagagaacacggcctcaccctgcaggaggcctttggcgtggaagagacatgcccagtgaaggcttgagggaggtatggaagggactctgaactgaccctcagctcgtttggtttcttatccaggcttcgttggccagggctgttagggtgggattctcacctgcaaagtgagggaagggcactgcacgatcttgggctctgctagctgaagaggtggtggctccaggaaggagggctttgcttgccccaccgcacctacacacactcttcaccaagggtctgtgaagtgttcgtctcccacattggtggcttgtttctttagccatcttggctgtcacctggggcttggaagcattctttaatagaaactgaggtcctcatcgcatctattaactaccatagcacctgtaggtcatcacaacctgacaaggcctttgttttcgcctttgctccctttcctacccttgtttcctggcactcttgtacctaaggattctactaggaagctgatgaccttgccttgatttggggattcctggtgtgccgttacccatgtaggcccatctcggggaaagtgttacctcaccagttcaccggcctgttatatttccccccatagctctctcttcaaaggatgcctaagtggattcctattcagttgacggttgctgcgtgccaccagtcacatcctggtttgtctgttggggaattgctttctatttttttcagaaaaatttatttttacttttttgaaattttcaatttcataaccattccagaaaaattaatttatatttaaaatttacaggccaggtgcagtggctcacgcctatatttccaggactttgagaggctgaggcgggcggatcacctgaggtgaggagttcgagaccagcctggccaacatggtgaaacccccgtctctactaaaaatacaaaaattagcctaacatgatggcgcacacctgtaatctcagctattcaggtggctgaggctcaagaagcccttaaacccaggaggcagaggttccagtgagctgaaatcatgccactgcactccagcctgggcaacagagcgagactgtctcaaaaaaataaataaaatttacatacagtaaaattcattttggtgttcagttctgtggtttcataaaggcatggagtcacagatccaccgtcacagtcatacaggtctatcgtcccccaaattccctctctgccccaacctccaaccctttaattttgccttttccagaatgtcatgtaagtgaaattatactgtaggcaggcttcttccatttagcgtaaatcatttgaaattcattcacgtgttgcatgtcaactgttggatccttgtgtttaatgctgagtagcatccattatatggatgtgccaccgtttgtttatccattcttttatgtatcataatagcagcctttttagatatgtccccgttagacagtgaggcactagggattggagttgctaagtagcagagctgcttttttgttgttttttttttttgttttgtttttggagacaaagtcttgctctgtttcccaggctggagtgcaatggcgtgatcttggctcaccgcaacctccgcctcctcagttcaagtgatgctcctacctcagcctcccgagtagctggccttcatgcccagctaatttttgtatttttagtagagacaggatttcaccatgttggccaggctggtcttgaactcttgacctcaagtgatctgcccaccttggcctcccaaagtgctgggattacaggtgtgagccaccgcaccgggtccaagctgaattttgatcaaaccccaaatccagggttcttccccaccacatcaaggaactgattgggttaaacaacccaattagcatttcttcactgcccatccaagaggttgtcaggttcctagagttggtggagaattctcttttacctggtgcctgcggttggaaggaggagcaggtactccacagttaatgcctcaccatatgtgctcctctttactggtgtgatagcaggctcaccagatttagcatggttgggactgcccaaagcatacattatttcagcaaataaatttgtctgagttactcccggggttgactgcactgggttatcagtctgctagtgcagtggtgtagcaggggcaggaccagcctgtttcatgccctggaacaaccagccaggaaagatctaacccttgggccttcctcctcagtgatgtccgagctcagcgatgaagccagcgagccggaactcctgaaccgcagcttgtccatgtggcacgggctcgggacacaggtcagcggggaggagctggatgtccccctggatcttcacacagctgcttccattggccagtatgaagtggtgaaggagtgtgtgcagcggtaagagatctcggggaacttcctctcacattttgagcagcgcagtgatggcttcgatcccacgtgatggggctttgcacacagttgtggatgtttaatgcgtgtagaataggttaacctgcttatctcaggcagctgtcagtaagtattgatgctgagccctgacaaagaggccgtttttattcctaggaagaaaaagagggagtaaactttgatcagaagcttataaacagtcattctttaaccagactaattttattcactaattgcagaaatgcccaaacaaacaagcaaaataaaaataaagacagaaagtgatggcctggtgcggtggctcacacttgtaattccagcactttgggaggctgagatgggcgggtcacttgaggtcaggagtttgagaccattctggataacatgatgaaaccccatctctactaaaaatataaaagttagctgggtgtggtggcatgtacctgtaatcccagctactcaggaggctgaggcaggagaatcgcttgaacccgggaggtggaggttacagtgagctgagattgcgccactgcactctagcctgggcaacagagtgagactctgtctcaaaaacaaaaaaaagaaaaaagaaagtgatccctggccttcttttcccggagggttcattcgatccctgtgatccctgttcccctctagcttctgccatggaggaggagagaggctgggctttcagtgcctctggggaatgacctcccgacgtcactgcccacctgccctttgctaatctgtgtacaatagttagagacaatataaagcccctggcagggtccatggctgcgtcttgcccatagtaggatgtgatcatcttgtttttggaaaagggtcgtctcctcacttccacccccttatgttccacacacagcctaactctgtctcctggttctcatttgatattgtggtgcagcgacctctcttcctctctctgcgtgcctcttccagttcccagtgagccaaagcaaagcattgctgaagccccaggtctccggttcccaagttgtggccctcacttagacatacccagcccatggagtgctggtgcaccttggtacagggtggtctgttgcgctccctccacaggaggctctaggcataggcagctgggtatgcagtcagtacggcccctcaaagggtcacgtttggaattctcaggctcttaagtctttgggtgtcctgttaagatgcagagtccataaccgctccatagaggagcagggggaggcgtttgtgttgtgatgggattttgacactagctgaggtggaggcttgctgatagtaagcacaggatggggcctgaggggagctgggggcatcagaaggaaggggtggggctgaacgaggagtggtaagagagccccagggagatgctctgctgttgtgtaaaggaagatagtgttaggacgagctgggtgcattcgagccctgctgcagaggcatctccatgcagcccccctggccaggggctgccactgaaccctggtatcaggaccttctggaatggctgcccaggtgtgcatcccagagtcactgagggctgccaggcaatggaaggtagttgcctgctgtggtctaatatgtgaatcccggctgggcgcggtggctcacgcctgtaatccagcactttgggaggctaaggcgggtggatcacgaggtcaggagatcgagaccatcctggctaacacggtgaaaccccatctctactaaaaatacaaaaaactagctgggcgtagtggcgggcgcctgtagtcccagctacttgggaggctgaggcaggagaatggcgtgaacttgggaggcggagcttgcagtgagccgagatcgcgccactgcactccagcctgggcgacagagcgagactctgtctcaaaaaaacaacaaaaaagtgaatcccgtaaaagggacagatcctggggttcagtcaccagttgttatcccctctgcaggcaagaactggggaagggaaagaaggcctgtgggcgttaaccatgtaggatcccaggtaaccatgcaagtgggtattattttaaatgtgactcccttgtcccaaccccagagtcgcagctaggaagcccacagttttttcccatgggaaaatgcattgccagaattttaacagcaatcagtgagaaagatgggattctttggtcacagatttttcaagaatgtttctttaaggtgaggtgacaaaggatgaatcagtggcggtgggacttgtccacggtggagtcccttctttcctcactgctcctctccacccagcagtgggctagtagatgccaggcctgtggtggtcagggtttttcaactgtggctgtgttgacaatccaggctggatcattctttgctgtgggggctgtcctggacactgtgggatgtttagcggcagccttggcctccagcagcccttccctgcccagttgtgagaaccaaaaatgccttcacacattgccacatattccctggttgagtgccatctgcctatctggtggtgtgaaagagcatagctggccttgggctaggaggatgcgaaatcagagcaaggagacgaaggctcagggcctcacaaggcagtgtacgagcaactgtcagcatttttctgcctgcctgcctccaatccccacaacgtccagggtggcagataacttctgcttcctgtcaactcatcccgcctggcctagcctcgccaccagctttggtgaaccccacatgcgaggcggctggccatgtctagcatatcttgcgtttgtttaggagagagttagatttgaataagaagaatggtggtggctggaccccgctgatgtatgcctcctacattggccacgacacaatcgtgcacctgctgcttgaggcgggggtgagtgtgaatgtgccgaccccagaagggcagactccactgatgctggcctccagctgtggcaacgagagcatcgcctactttcttctccaggtgagctacgagggaactcaggcccagaaacctgaggggctccgtggccaccctgacagagatgcgaaccactgcaggccacggtgttcgtgtgtgctcgtgtaatcacttctgattcttgcagcatggccgcctggagggcgcccgccccacgcagaggagatgaggccgtaacgcacgttctgtgttctcttgaagcaaggtgcagagctagaaatgaaagacatccagggctggacagccctcttccactgtaccagcgccgggcaccagcacatggtcaggttcctcttggacagtggagccaatgccaacgtgaggtgattgccacatctttagtggccacaggagtggcctaggtgtcatctgactctaaggagggtggctctggaggcagctaaccagagtttagggccaccctgcttcggcacgagaggctcaagatgaggggtaggaccagagtccttccaggcacaggccttttcgtacatctgtgagatgcatctcttcaagccctctcagcttccttttctttatctgaaacccacctgggtcatacagttgtaagaattacatgttttattgtatgccaggggcctaacatactgaatggcatttaaatgtcatacattacatgcaaattccttccattttcttgctttttgtatggatgaggtgaggtgatgctttgaaacagtcatgaggccgggcgtggtggctcacgcctgtgatcccagctctttgggaggccgaggtaggcagatcacgaggtcaggagatcgagaccatcctggctaacatggtgaaaccccatctctactaaaaatacgaaaaaattagctgggcatggtgacgggcgcctgtagtcccagctactcgggaggctgaggcaagagaatggtgtgaacccgggaggtggagcttgcagtgagccgagattgcaccactgcactccagcctgggtgacagagcaagactccatctcaaaaaaaaaaaaacaaaaacaacagtcatgagttttggccgggctcagtggctcacacctgtaatcctagcactctgggaggccaaggcgggcagatcatgaggtcaggagttcgagaccagtctggccaacatggtgaaaccccgtctctactaaaaatacaaaaattagctgggcgtggtggcaggtgcctgtaatcccagctactcgggagtctgaggcgggagaatcacttgaaaccagaaggcagaggttgcagtgaactgagagatcgtgccactgcactccagcctgagcaacaagagcaaaactctgtctcaaaaacaaacaaaaaaccagtcatgagttttataagttggaagtgggattgttgtctaaagcttgtcatgataataatcacctttgaacaaacgcagcgggtaccaatgcagcacccaccctggctgtcattcattctaagacacctgataattttgtatgccactaagaaagaaaaaatatgctactaattaacattcaactcgcctgttgatttaaagatgttttctgacttgagagatgttaaaatatgaacactgtgtgtcttaagatggatgaaaaccagcatttcccatgcatggttcctgacttccaaaccagcatgagacaaggagggatttggaagccctctgaagacagtgccgagttagcataaccaagcatgaaaagcaagcttcaggagctaagcgtggcaaagatagcttagatcattagtacttgaacttttcagagtgggttcatggaggacgttgaacttgaagccaggatttggatgaatggatgggagatgctggctttctgtgaggaattagaacagctttttgaatatgattgaggtggagatttcagaggtagccagtgggaatagccaacaggtgggacgacaggcagacatctgtctttaggacaaagaccagccctggggacagacaccagaagagtaaatggagctgatgtgttatattcactgttctcatgtcacctgttaattctggaaagggacagtgttctacgcttagggatcggtgactcgtgcactgctcagggtttatcttcagcagggagtttttgcctggcggaacttgtctcttccaatcatctgactgtggcccacatcttgcagggagccgatatgtggatttactcccttgatggaagcagctgctgctggccatgagataatcgtgcagtattttctgaatcacgtaagtgaccctgattattagcatgtaatgtagtcacggcaaatgaggaatcatattactgaagtataagctattacagaattttcctttgcacagaaataactttcattcatttattcaacacattttcattatctattgacgcccggtgttgagtggtgcttaggcattaaggatacagtggtgagtagaaatagacacctattcctgtaataattttgaaaatactatctgaaaattatggaaaaatattttaaaagtaaatagcactcataatcctgtcacttagaaaaattatatagaataagaaggcagagatcctcctctctttttcaacctccctgatgcccacttggtttgagaaagagctgccctaggacttttcctctgctgtggaaagatgtgtctgtaggcaagtgtgtgcacattgctttgtgttttgaacaaagtgggattctacgtatagtctgtaacttagagacatcttatagacatcttatctttgtacagtattccgtgtacaatctgcctcagttaatttaatgagtttcttattagtagaaacttagtttttaacattttgcaattataaacagtgttccgggaatatccttttacacatagctttaatacatttgcagttatttctgtatgttgtatttctgttttattttattaatttatttttttgagacatggtgttgccctgtatcccaggctggagttcagtggcgagatcgtggctcactgcagcttcagcctcctgggctcaagcgatcctcctgcctcagcccccaagtagctgggactacaggtgcatgctaccatgccccggctaattatttaattttttttttttggtagagttgggggtctcagtatgttgtgcaggctagtcttgaattcctgagctcaagcgatcacctcagcctcccaaagtgctgggatcacaggtgcaagcctgtccacacagaaccttgtacataaatattcatagcagtattattcataattgccaaaaagtagaaaaacccacaagtccatctactgaggaattgataaacaaaatatatatctgtatagcaggatattattcggccctacaaagtaatgcagtactgctgcatgctgcggcaggggtgaaccctgatgcgttaggctgggctgggtgcggtggcgcacgccggtaatcccaacactttgggaggctgaggccagagggtcgcttcagccctggagttggaggttgcagtgagctatgattgcgccgccacactccattctgggtcacagagtggatcctgcctcaaaaagaaaaagaaaaggaaaacattcggctcagtgaaagaagccagacacaacaggccacacactaggtgatttcactcataggaaatgtccagaataagcaaatacatagacagaaaatagatgagtggtttcctgggtcttggggaatgggaagattggggtgataaaaatgtgctaaaattgtttgtggtgatggttgaacaactgtgaatatacgagaagccgttgaattgtacattgtaagtgggtgacttgttggtatgtggattatatctttataaggctgttaaacccaatggggggaagtgcaggcggtcctgatgaattcccactaccaaggttgtctgttgtcctgcccaccagtcatagacaaaggtgtccattttctcttgtcctcaccagtcctgatgtcagtcaaccttttgtcaatctggcgggtgaattgtagcgtctcattttagtttgtccttgttagagtagttgaaatttttttctttttttttttttttggagacagaagtcttgtgctgtgtcgcccaggctggaaggctggagtgcagtggcgtgatctcggctcactgcaacctctacctcccaagttcaagcagttcttctgcctcagcctcccgagtagctgggactgcaggcacccgcccgcacacctggctaattttttgtattttagtagagatgaggtttcaccatgttgcccaggctgctcttgaactcctgaactcaggcaatccacccaccttagcctcccaaagtgctaggattacaggcataagccactgcgcccagccagttgaacatttttaaattgatttcttagccatttgtatttcttttttttttttttttttgagactgagtctcactcagtcgcccaggctggagtacagtggcatgatctcagctcactgcaacctccacctcccaggtttaagagattgtcctgcctcagcctcccgagtagctgggactaaaaatacaaaaaatcccggctaattttttgtatttttagtagagacaaggtttcaccgtgttagccaggatggtctcgatctcctgacctcatgatctgcccgccctggcctcccaaagtgctgggattacaggtgtgagccactgtgcccggctggccatttgtatttctcttacgagctgtctatgtttattgcccaattttctattggatagtttgtttttttctcacttattggtgggaatttcttaaatagtgaaaaattcacatggtatctctttttaacaaagaattttgggacacaacatgcacatggtacacatgcagaccagaaggtgggtgcaccgcaggcctgtcccccaccctgcctgcgtctccttggcaccctccccacgggcgactctgggaatacacccacacatgctcatggtcctgccccatgtgcagctgctcccatcttgcattttttaaaaaacttaatcatgaagatttttctatattggtgtataaagagacggggccaggtgcattgtctcgctcctgtaatcccagcactttgagaggccaaggcagacagatcacttgaggtcaggagtttgagaccagcttggccaaggtggtgaaacccgcctctaccaaaaatacaaaaatacaaaatacaggtggctgacgctgtaatcccagctacttgggaggctgagacaggagaatcacttgaacctgggaggcagaggttgcgatgagccaagatgttgccactgcactccagcctgggtgacagagtgagactatctctaaataaataaataaataaataaataaataaatcaataaatcaataaagagatggggtcttgctctgtccctcaggctggagtggagtggtgcagtctcagctcactgcagccttgacctcctggtctcaagtgatcctcctgcctcagcctcccaagtagctgggattacaggtgcgtgccaccacgcccagccaatttttgtattttttttgtagagatggggttttgccacgttgcccaggctggtcttgaactcctgagctcaggcagttcgcctgcctcggtctcccaaagtgctgggattacaggcacgagccaacgcacccagcccctctcttttttttttttttttgagatggcgtcttgctctgttgcccaggctagagtgcagtggcacgatctcggctcactgcaacctcagacttccgggttcacaccattctcctgcctcagcctcccgagtagctgggaccacaggcgcccgccaccatgcccagctaatttttcatatttttagtagagacggggtttcaccgcgttagccaggatggtctcgatctcctgacctcgtgatccgcccaccttggcctcccaaagtgctgggattacaggcgtgagccaccgtgcctggcctctcttttttttttttttttttatggtggcatggtattccctgtagggatgaatcagagtttttttgtttgtttgtttgtttgttttgagatggagtctcgctctgtagccctggctggagtgcagtggcgcaatctcggctcattgcaacctctgcctcccaggttcaagcgattctcctgcctcagcctcctgagtagctgggattacaggcgtgtgccaccacgcccagctaattttgtatttttagtagacagggtttcggcatgttggtcaggatggtcttgaactcctgacctcaagtgatctaccactttggcctcccaaagtgctgagattacaggcatgagccactgcgcctggcctaccgttgacatttcttacacgtctttttaagcacatatgggaatttcttcaggagcttaggatgtgttcttcaaagtagagtctttgttgtgtgaggtgggttcagtcggtagtgggtagtgtaaacttgctttgttccatagtggtcctggttcacacccctccccttagggtgttagacttcttttttttttttgagatggagtctctctctgtcacccaggctggagtgcagtggcgcgatctcggctcactgcaacctctgcctcccaggttcaagcgattttcctgcctcagcctcccgagtagctgggactgtaggcactcgccaccatgcccagctaatttttgtatttttagtagagacagggtttcaccatgttggccaggatggtctcaatctcttgaccttgtgacccgcccgccttggtcttccaaagtgctgggattacaggcgtgagccaccgtgcctggccttttttttttttttttttttggggtggggtcttgctctgtccccaaggctggagtacagtggtgtgatctcagctcagtgcaacttctgactcccaggctcaagcaattcgcctggctcagcctcccgagtagctgggattccaggtgtgtgccaccatatccagctaatttttgtatttttagtggagacagggtttcaccatgttggccaggctggtctcgaactcctgacctcatgatctgtctgcctcagcctcccaaagtgctgggattacaggcgtgagccactgtgcctggccaggatgttagactttttggctccctggccatttgggtttctttttctgcaaataattatttttgtattttttatttattttttttatatagggtcttgctttgtcaccacactagagtgcagtggcctgatcatgggtcattgtagtctcaacctcctgggctgaagtaatccttctgcctcagcctcctcagtagctgggactacaggcacgcactaccacgcctggctgttttttttttgtagagacaaaaatctcactatgttgcccaggctggtcttgaactcctggcctcaagcaatcttcccaccttggcctcccaaagtgctggagttacagacctgagccaccatgcccggccagataattctttgacagataatcctgctgacatgaactagacttccttaagacacatcatagaatcaatagcccagaaccataaagagcctctacttgtaagtttagagtcattttaagtaaggtagaactggagatcataagagatatgtactcttataatttttgattgtatgtttgtttctttttgagacagagtctcactctgtttgcccatgctggagcacagtggcgcgatcatagtttgttgcagcctcaacctcccaggttcaagggatccttgcaactcagcctcctgagtagctgagaccacaagcgcatgctatcacactagctgatttgatttttttgtagagttggggtctcactaagttgcttaggctggtctcaaactcctggctgcaagtggtcctcccaccttggcctcccaaagcgctgggattacaggcaggaaccacggtgcttggccaacaatttgcatgcctttaccacattccccaaatgttaacatttcacctcattttcttatcagtctctttatgtataacatgcatatgttttctgaatcatttaaatgtaaattgtgacataatgccccttttcccctaaatatgtatttcctgagagtaagaatttcattatgtatttcctaaaagcaaaaatgttctctttcccagtcacacaaaattatcagactcaggaactcaacactgagttcttcctccagcacttgacaagaatcaaagtgttggttagtgactgctttgggggatggggcaggactggcagcaggtggcccgatggcctgggtggtttgcctgccagcgatgctggtgggcaagccctgcctggaagctcctctctcccacgtttttcctgccgcccagtagttagaccacctggagccagaggagggggcccacccggtttcccagcctgtccctccagagctgggctccatttctggaggtagagaatggggcaagtctgggcatcttgtgctctttgctaggggaggaaagggctgtggctgctttccttgtcccccatttcccttctgccagtggggccaagccccagcagctcagtcaggagaagaggatatggatctgtctgggcctctctctttaagagaaagttgattcgtgccttccggatagtcttgttccagggtttctaaactttctgatcccaccttcatgttaaaatgagttttgatcatgtgtctctttagtaatatggacattataaaataggaaaaaaaagtctcttaaagcctaagtagttaaaaatttattttcacatcaggcatagtggctcatgccagtaatcccagcacttttagaggccaaagtgggaagatcgcttgaggctggagttggagaccagtctgggcaatacagtgagaccttgtctctaaattaaaaaaaaaaaaaaaaaaaaaattggccaggcatggtggctcatgcctgtaatcccagcactttgggatgccaaggcaggtggatcacctgaggtcaggagttcaagaccagcctggccaacatggtgaaaccccattagcggggcgtggtggcgtgcccctgtagtcccagctacttgggaggctgaggcgggagaatcacttgaacccggaaggcagaggttgcagtgagccgagattgcgccattgcactccagcctgggtgacagagtgagactccgtctcaaaaaaaaaaagccagttgtggtgtgtgtttgtaatcccagggaggctgagaagggaggatcacttgagctggggaggtcagggttgcaatgagccagtgtaatccagcgtgggccacagagtgagattctgcctcaaaaacaaaaccaaaaatatataacgagttaaaatcctacagtaaagaggctactgttttattctggttaaaccttagggttccttctatcaaacttaaactagaattttttttttttcttgagatggagtcgccctctgtcgcccaggctggagtgcagcagcttactgcaatctctgcctcccgtgttgaagcgattctcctgcctcagcctcccgagtagctgggattacaggtgtgtgccaccactcccagctaacttttgtgtttttagtagatacaggctggtctcaaactcctgaccaggctggttgttggccaggctggtctcaaactcctgacctcaagtgatccgcccacctcagcctccaaaagtgctgggattacaggtgtgagcctctgtgcccagccaagaaattattttttatttttgagatagagtcttgcttcgtctgttgcccaggctggtgtgcagtggcgtgatcttggctcattgcaacttccacctcctggactcaggcaattctccttcctcagcttcctgagtagctgggagtacagacgtgtgccaccacgcccggctaatttttgtatttttagtagagatggggttttaccacgttttcccacattggccaggctggtcttgaactcctgacctcaggtgatccacccgtctcggcctaccaaagtgctgggattacaggcttgagccaccgtgcccagcttataaattattgttattatttattattatttttttgagatggaatctcagtctgtcgtcgaggctgtagtgcagtggcgcgatctcagctcactgcaacctccgcctcctggattcaaggatttctcctccctcagcctcctgagtagctgggatacaggcacgcaccaccacacctggctaatttttgtattttttagtagagacggggtttcaccacattgcccaggctggtctcgaactcatgacctatgatccacccaccttggtcccccaaagtgctgggattacaggcgtgagccactgtgcccggcctataaattattttttaaggcacaaagtctcataggtaatttttaatcagagtcaaaagtaggatggggggcactctagaaagtaaaactccttatactttgtgaaaacacagttttttgtcctgtatccctgcccagagaccacctctgcctcccccaccaactacatatgggggtcaaggttgaggccccctggtctaacgggagagacagttgccgtatgggtggtagcaaaactccttaagggttgtgatttttttttttttttttttttttgagttggagtctccgtgtgtcgcccaggctggagtccagtggtgcgatcttggctcactgcaacctccacctcctgggttcaagcgattctcctgcctcagccccccggagtagctgggactgcaggtgcccaccaccacgcccggctaatttctttttgtatttgtagtagagatgaggattcaccctgttggccaggctggtatggaactcctgaccttgtgctccgtccacctcggcctcccaaagtgctgggattacaggcatgagccacggcgcctggctgtgccttttttctcttaatgatgttttgtgcaccctagtccgtgtcaccgcaggtactcccacccaccacgtaaatgggcgggaggcgctctgttttctggatatgctctcacgtagctcattaatctcttattttaagttccttctgattctcactatgctgaatgccacagtgaaaattctaaattgtagtgtatgtcctgcattatttccttaggcgccgctgcacttcagcctgggtaacagagcaagatcctattaaaaaaaaaaaagcaaacatgcttatggtagtacattttaaaaacatagaagattggaaaattggaaaaatccccatcaaaaatagtaaataacttaaaaatagcaacattttgggtatgttaccttccaatattgttttctgtgtaatttttttggtctcattttgccggagttgtaatgtatatgtagttttgtatcatgatccttttttatttttttgagacaaggtctcgctctattgcccaggctggagtacagtggtgcgatctcagctcgctgcagcgtcaagctctgggacttaagtgatcctcctgcctcagcctcctgagtagctgggactacaggcatgtgccgccacaccctgctaattttttattaaagatgctccccctttccggggtcccgcctcctcctctgagctttggctctggcttccctgcctcccccagctgcctggtctgacaggagagaaggacagttacagtgtacagtgacaccaaaaacatgctgtattgattatagtttatttttttttcttgtagaggtgggttcatgctgtgttgcccaggttgttgtccaactcctgagccgagcgatccacctgccttggcctgtcaaatgctgggattacaggcatgagccacctcacttggccatgatcctttttcaacttgatcatacagctgtttgtaaatatcaccatctatggcaataacagaactgactgcttatccccctgagcattcaagttttctctaggtaggttttcattattgtgaatatgctgtgccaaacatcctttttttttttttttttttttttttgagacagagtctcactctgtcttcaggctggagtgcagtggcatgatctcagctcactgcagcctccgcttcccgggttcaagcaattctcctgcctcagcctcccgagtagctgagactataggcgttcaccaccacgcccggctaatttttgtatttttagtagagacggggtttcaccatgttggccaggatggtctcaatctcctgacctcgtgatctgcccacctcggcctcccaaagtgctgggattacaggcatgagccaccgcacccggcctgtgccaaacatctttgtgcactaaagccttttctgtatttagggttatttccttagggtcatggaagtggaattgttgcgctgcaagacctgtaaatacattatagagctttggatcaaagttacgaattctgcttcagaggatggtgctttcattctgactggtttaaaaggctgctttctttgaagacaagcgaagtgagtgggacacagcccaggcgcagaaggtgaaggctgggatctccgcatggtggctgccagccccctgcaagggaggtcatgagcgtgggagatgactccccagcccccagccctcctcatccttgtccctaagaagagagtgagagcaaaacttgtggctgcggtgcagacaagcctgcctctttctcatgcagatgtgatgtttcccacacagggaggcagtcagaaaccagcatatgcccttctgtcttcccagccagcagcccaggaagggcaggtgctttgaaggagaggcccctaaccccctttcacggacattcacagggagtcaaggtggacgcgagagaccacagtggagccacagcccggatgctggccaagcagtacggacacatgaagatcgtggccttgatggacacttactcgccctctctgcccaagagcctctatcggagcccaggtacccacacctgccagccgcgccctgctggggtctctggttgccttgagctttaggtgacctggcagagaaagatgtcccccgcttccccggctcccaccttctctgagatttggctctgcctcccccagctgcttacatgtcaaggttgaggcccctgctctaacaggagataaggatggttacgatggagagtggtacaaaaccaggctgttgtgaatgtagaggctttctgtagtatgcttgactaccgagtaggggcaggcccctcttagttttctgttttcactgtttcctgagctatggcttgttcattcttctatatgaacttgaatatcaacttgtctagctccttaaaaacagtattgatatttttactgagattgtgacaatgtataaattaactatatctttgtgttgttgtcttatccaagaacaagggatgacttcttgttccaatgtacttttgggtcttgcaggagggttttaaatttttcttcatctacattttgcatgtgacttaagtttattcctaagtgtttgatcatctttgtcgctattgtaaatggggttttccctatcattatatcctttttttccccccaactctcagggtattaattattcagtgctatttattttttatttcagtaggtttttggagaacaggtggtggttggatacgtgaataagtcctttagtggtgtcattatatcgtttcactgcatattgtcagtgcatttgaaggcagtggatttctgcaaacttttgttttttttttgatacgggagtttcgctcttgttgctcaggctggagtgcaatgaagcgatcttgcctcaccgcaacctcttcctcccaggttcaagcaattttgcctcagcctcccaggtagctgggattacaggcgtgcaccaccatgcccggctaattttttgtattttcagtagagatggggtttctccatgttggtcaggctggtctagaactcgcaacctcaggtgatccacccatctcagcctcccaaagtgctgggattacaggtgtgagccactgcactcagccctgcaaactaattttatattctgctaccttacagaattcttacattgttcaggttagttttgttattgattctttagggctttacaggtgtactaacatataatctttaagtatcgatggatacactgcttcctgctgattctcatgactctgactttgttgaattgcaccgttcttttgtttagttgctaacacctctagctcattgttcaacatagtggagatagtgagcctccttaccttggtcctgatcttagtggaaatgccacgttacatgagaggctgactgtaaaagggaaggcatatgttattttagcttattaacaaagtattcctcagttcttctattcctgagtggtgttttacaggagtaactattgaattgtgttcccatatctttggagacgatggtgaattttcatatggtagattgtcttcatgaacctcctaataatgaatcaaccttacattcttggcataaatcccacatgttgtactattttaatgtgtttttgaattctgtttattaatatttagtatttttctatggatattcagtcataagtgatactggtctatagttttctttcttctttttttttgtttttgaaatggagtcttgctctgttgcccaggctggactggagtggcgagatctcagctcactgcaacctccgcaacctccgcctcctgagttcaagcaattcttctgcctcagcctcccgagtagctgggatcacaggcgtgcaccactacacccagctaatttttgtatttttagtagagacggggtttcaccatgttggccaggctggtctcgaactcctgatctccagtgatccgcctgcctcagcctcccaaagtgctgggattacaggcgtgagccaccgctcccggcgtggtctatacttttctatttttgttctgtctatcaggtatgggtatcagtgtttacttcataaaaataatttggaagttttccttccttttttgtgttctaggacaatacacgtagcattagtgctacctggtcttagaagttttgatagaatcctcccatgaaaccatctggtctctttctgtgaggtggttcctcgataacagtttttctatttcttctatagagattggcctcctcatactttcttttcttatggggtcagttttggtaaattatattttcctgagagatcacttcatctaggatttcagacttatctgcagaggtctacaagataatattttctccctttttttttttttttttttgagacagagtttcactcttgttccccaggctggagtgcagtggctcgatcttgactcaccgcaacctctgcctcccgggttcaagtgattctcctgcctcagcgtcccaagtagatgggattacaggcatgcgctaccatgcctggataattttatgtttttagtagagacagggtttctccatgttggccgggctggtctcaaactcccgacctcaggtggtctgcccacctgggcctcccaaagtactgggattataggtgtgagccaccgcacccggccaatttttttctccttttaaaatattctgtttcagggccaggcgcggtggcttatgcctataatctcagcactttggaaggccgagttgggcggatcacctgaggtcgggagttcgagaccagcctgatcagtatggagaaaccccatctctactaaaaatataaaattagctgggcgtagtggtgcatgcctgtaatcccagctactcgggaggctgaggtgggagaatcccttgaacccgggaggcagaggttgaggtgagccgagatcgtgccattgcagtccagcctaggcaacaagagcgaaactctgtctcaaaaaaaaaaaaaaaaaaaaaattctgtttcaggctgggtgcagtggctcatgcctgtaatctcagcactttgggaggctgaggcgtgtggatcacttgaggtcaggagttcaagaccagcctggccaacatggtgaaaccccgtctccactaaaaatacaaaaataagccaatgtggtggtgtgcgccagctactctggaggctgaggcaggagaatcacttgaacccgggagggggagattgcagtaagccaaaatcacgccactgcactccagcttggcgacagagcgagactccatctcaaagaaaagtaaatagataaaataaaacaaaataaaatactctgtttcagtggttattttctcctgttattatctttttttggcatggaaaatattgatttattttttgtgacagggtcttgctttgtcacccaggctggagtccagtgacccaatctcgactcaatgcaacctccgcctcccaggctcaaaacgatccttctacctcagctctacgagtagctaggactgtaggtgcaccctaccacgcccagcttacgtttgtattttttgtagagaggtggttttgccatgttgaccaggctggtctcaagagtcctgagctcaagcaatccacccgcctcagcctcccaaagtgctgggactacaggcatgagctactgcacctgacctggaaaatatttatctcatttttaattgacacaaaataactacatatttatggggtacagtgtgtgatgttttgatacatgtatacactgtgtaatgatcaaattaaggtgattagcttatccatcacctcaaacatttatcatttcgaggtgagaacatttaaaatcatgtcttctagtagctattttgaggtataagctgttgttccgtatagtcactctactgtgaacaccagaacttctttcttcgatctgtaattttacacctattgaccaatctctcccactacctccccacccccaacctctgataatcactattctactctacatgtttgacatgagcttttaaaaatcctgtaaatgggtgacatcatgtagtcatgtagtcttttttgttgtttgtttggtttttgagacaggttctcgctttgtcacccaggctggagtgtggtggcataatcttggctcactgcagcctccaattcctgggctcaagtgatcctcctatctcagcctcccgagtagctggcactacaggcacctaccaccacacctggctaatgttttatttttttgtagagacggggtcttgctatactgaccaggttggttttgaactcctgggctcaagtgatcctctcgccttggcctcccagagtgttgggattacaagtgtgagtcaccacaacagctggcatttgtctttcttttctatgtctggcttattttactgaacatagtctcttccaggcttattcatgttgccacaaatgatcagatttcattctttatgtctgaataatattcaattgtgtatataaactcattttctgtcttcgttcatccactgatggacacaggttgattctctatctaggctactgtgaatactgcggcagtaaacatgagggtgtagacatctctttggtatactgatttcctttcttttggataaatacccagtagtggaattgctggatctcatttcttatattttttaatttttttttttttttgagatggagtttcgctcttgtttcctaggctggagtgcaatggcacgatcttggctcactgcaacctccacctcccgggttcaagcgattctcctgcctcagcctccctagtagctgggattacaggcatgtgccaccacgtctggctaattttgcatttttgggagagacagggtttctccatgttggtcagggtggtctcgaactcccgacataaggtggtccacccgactcggcctcccaaagtgctgggattacaggcatgaaccgctgcacccggcaaaaatttcttctattaaaaaaaatagagacagtgtctcagtatgttgcccaggctggtctcaaactcctgggcccaagcgatcctcccacctcagtctcccacagtgctgagattataggcatgagccactgcgcccggcctcacttcttattttgaatatttgtgtttgttctttttttttttttgagacagagtctcgctctgttgcccaggctggagtgcagtggcgcgatctcggctcactgcaacccccgcctcccaggttcaagcgattctcctgcctcagccttttgagtagctgggactacagggtgcccaccaccacacctggctaattttttttttgtatttttagtagagacagggtttcactgtgttagccaggatggtctcgatctcctcacctcgtgatctgcccacctcggcctcccaaactgctagaattacaggtgtgagccaccgtgcgcagcctcttcctttttttcttaagttaaatactagtactttgtctgtttagtggaaaaacaagaaaaacccatcggattttgatttattaatgagacctactgattgtctgtttaatttctgcttttatttttatttggcttactttgttgttctagttttttgagttggaaacttctttcattttcattgttgcccttttgttgctaaatgttagaggctgtgaatttttgctgattgctgctttaagtgtattctgggggttctgtatttaatactttccttgttatttttagaaattctgtaatttttatttatattttctccttcacccaggagttgtctaatagaagtattatgattgtttttgtttgttaatttctagatggaagggcctttttgatcttgcaattaatttctcatgttattctgattaactttaatgtgtctgatcagagagtgtttataattcttacatttacataacttccttgtcatcttatttatcatctactgatctatctatatatatatatatttttttcagatgtagtctcactctgtcacccaggctggagtgcccaagtgcgatcttgactcactgcaacctctgcctcccaggttcaagcgactctcctgcctcagcctcccgagtagttgggattccaggcatctgccaccacgcctggctcatttttttttgtatttttagtagggacagggtttcaccatgttggccaggttggtcttgaagtcctgacctcaagtgatccgcccacctcggcctcccaaagtgctgggattacaggcgtgagccaccgcgcccggccctgatcaatattttttagtgttccgtgttttgcttgagaagttgtattctctattatctgtatacagtttagcatatctgtgagtctatcttatttaggattatgtactcttagttcattttctacaaaattacctattagcgtgtttctgatttatgaaggaagttggtgcattttttggtgacagattttcataacttgttatagattcactgtgaattatggcttttagtattagaagtgtccttctggctgggcatggcccatacctgtaatccgagcactttgggaggccaaggcgggcagatcccctgaggtcaggagttcgagaccagtccagcctacatggtgaaaccttgtctctactcaaaatacacaaattagccaggcatggtggcacatacttacaatcccagctactcgggaggctgaggcaggagaatcacttgaacccgggaggcggaggttacaatgagccgagattgtgccactgcactccagcctaggtgacggagtgaaactctgtttcaaaaaaaaaaaaaaaaaagtgtccttccgtgtcatatttaatgtgttttgccctgaattccacgttgatagcaggattgcagccctggctcttttgtggtttccatctgcctgttctttttaagctgctctgagggtgtgttgggtgctgagattcacgcagctgccgttcccttgcttattgctgcctctttgcatttgtcttacagctccctccccttcagcttggatggaagcacagtctccctggagtgctatagatctttgagtgtgaggaggtgtgtgtccatatggctagctcagtcgccagagcttgagcctcgtcatggggaaggacagagtggcccacgttcagggcctgagctctccctctttgctggcctgccctgagttgtcctgtcagtttgcacctgagcgagcagctcctttctcagtgtcaggctcagcccagcctcttccctggcattgggattgtttcataataaacacagctcaggtggtaatgcaaaggacctttcccttcatttctgccccagcttacccactccacaaggagatctcatcatttcctcctgtatacaactcacgtatctcttaaaagtagaatcagatcagagccttatacaaatcaaatatgaaaaactgaaaagctacaaaataataaaagctctggtttgagctctgaaagctcagactgggaagtgatttgaaacagtttataatcatagcaaacacatgccatgctttagaaaatacaaaattgtggctgggcgctgtggctcactcctgtgatgccagcactttgtgggaggccaaggtgggcggatcacaaggtcaggagatcgagaccagcctggccaacatggtgaaaccccgtctctactaaaaatacaaaaacaagattagctgggcatggtggccgggtgcctgtagtcccagctacttgggagcctgaggcaggagagtggcgtgaacccaggaggtggagcttgcagtgagccgtgatcgcaccattgcactcctgcctgggtgacagagcaagactccgtctcaaaaaaataaagaaaaaaaaaagaaaatacagaattgcttaataagttgtttccagccgggcacagtggtaacgtgcctataatcccagcactttgcgaggctgaggtgggtggatcacctgaggtcaggagttcaagaccagcctaatatgatgaaaccccatctctactaaaatataaaaattagctgggtatggtggcatctgcctataattcccaactactcgggaggctgagataggagaattgcttgaacccaggaggcggaagttccagcctgggcagcaagagcaaaactccttctcaaaagaaaaaaaaaaaagttgtttccaaaggaagggattaggaaaaagtagttgtgacttatattaccatatattttaatgaagagatgggttttacttattcaaattagaacagaatttctgattatgaacaatacagacttatgaacaatttggcaaaccccaacagagataataaactcctggctgggcatggtggctcatgcctgtaatcccagcactttgggaggccaaggcaggcagatcaggagtttgagaccagcctggccaacatggcaaaagcctgtgtctactgaaaaagaaaagaaaaaaaacactgggcatggtggcacgcatctgtaaccgcagctacttggaagggtgaggcgtgagaatcgctagaacccaggaggcggaggttgcagtgagtgagccaagatcatgccattacacttcagctcgggggacagagtgagactctgtctcaagaaaaatgaaacttcccatcctcactaactttgcagctccctgtggcccattggagcagcgccccggcctgttagggcatttctcagaagtgatgccctggcagatacccttctccttaatttaacaaaaccggcgacagtcactttctttcagtttgccgtaaggattagtaaatgagtccattactgaacacactatcttaatcttggtgtttgatcacagaaaagtacgaagatctgagctcttctgacgagtcctgccctgctcctcagagacagaggccttgccggaagaagggtgtcagcatccacgagggaccgcgagccctggccaggatcacaggcattggcctgggcggcagagccccacggcctcgctatggtgagtggcccgcgtttcccgagggctctttctcattgcataccaggattttgtgttggcaagaatggaatagctcttaggctcctgaaatgtgggtcgctggacctcaggtggcagcgggacaggtggcccagctttcatgctcagggagactcaggattgagtcctgtgatggaaatgcattggtcacggactagctcttgttttttgctttatctcctggagtttccttttcgttggttaaatttaggaatagaactttctctcctgcagcagaaatgtagctaaggtcagatttcattcatcacataggtgggttggctcatacagggaggaggcaaagcgtgaagttcacttccctgccctgcccataccagctgggtcgggtgcgctgctgggggcaggaggccaagaaaacaggccctgctgttttctcagggcgatgaagttgtactcagaccctcctgagagagggcccgcttgttgacttgctggtgaagaatcctagcctttgggttttccagtctcgttcattctcagattcccagccccagggtgttgagcgttttgctcttggggagtgctggggtttctttttaggggagttgggtttggtgcctactctctattgctgtggtctgtcccagagctcagctggaggtgtgagttatgtcttcctttgatggctgtcacccactcatagccaggccaaggctgctggtctcacaggcctggtggctggtccttctcgggagcaaggcctctttgaggccaggacttggaagagtgagagtagacagtgtttcagccaggggtccaccagtaattgaattcccttctagaccccaggaacaagcagatgtgcagacttctgtcttcccaagcctgggtgctgggttgggaactggagacccaccttctcccatcatcctgggaagggtgagctgactgggccactgggaaggcctctctcgagctgctggccagccccaccacagcatgagggcccgcccgtgtcccgtccgctgagctgtgagcactggctctgggacaccgggctggtcgttctgagtggcagagtctcttccttccaaaaggtccctgccacctgctacagcctgaggtgtggtggggacaggaaggaagctgtcatcctggggctgagttggtaattaatctatatagctgtacaacaaatgctttaacaaaatcatacatgtctgaagccgcttgtgtgcggttctttgtatgtatccacagagaagtaatcatggtggtggtctcaggtgtggtatttcaggggatttttgttttctcataccttgtgaaatttaaattttctataagtgcatatattttatttgccagtaattaagaaatttggggccgggcgcagtggctcacgcctgtaatcccagcactttgggaggccgaggcaggtggatcaagagatccagaccatcctggccaacatggtgaaatcccatctttactaaaaatgcaaaaattagctgggcatggtagtacgtgcctataatcccagctactcgggaggctgaggcaggagaatcggttgaacccgggaggcggaggttgcagtgagccgagattgtgccactgcactccagtctggtgacagagcaagactccgtctcaaaaaaaaaaaaaaaaaattgggggggccaggtgcagtggcttatacctgtaatcccagcactttggaaggctgaggtaggaagattgcttgggctcaggagttgtgagaccagcctgggcaatgtagcaagaccctatctctacaaaaaattttgaaaattagccagatatggtggcccatgcctgtagccccagttacatgagaggctgaggtggaaggattgcttgagcccaggaggtcaaggctgtagtgacccatgatggtgccattgcattccagtctggataacacagcaagaccctgtctcaaaaacagtttagggggcaatgataaatagcatgtgctgattagaaaaacttctccataactaggaaaatacgtaaagaggaaagtaagttccccatggtcccatcaaccagtcctttgggttcttttttgagacagggtttcactgtagcccaggctggagtgcagtggcacgatcatagctcactgaaggctccagttcctgagctcaagcgatcctcctgtctcagcctcccaagtagctgagattacagacatgtgccaccgtgactggtcaagtcagtctttttatgtaaaggggcaaaactggagtgaaattgcctggtatacatgcccctttttctgcttggttttagaggcaggtagagttaggtaatttcatattattgttgttaatttttacctcaaggcctttttccttcctgctcagccaggtctctttttcgccggggttgactgaccagaggaggcccgctaagcgcctgtggttaaaggtcacagggacataaagacacgtggtcgatgggtgtctgtgtgaggtcattagctacctcctgctaaaaggaacactcatggtatagttttctctggtcaggcatctgtaaatacagctgaccatttgctacgttttccccttggaaaagaaatggagagggcccaggcttgacctggctgccagccctcgccccaccaggcacttgcttgggccactgactgaccctcagagcatcttttccacccacacaccacagatagagccatgccaggtcgcaggggcaagtaggtgaggtcatgactgggaagtcacctgcctccatcctgggcctcggcctctgaggaggtttcactttggagttccctgggcttatgggccccattctgtacacagagcaggctcctccccgtggctatgtcaccttcaacagcagtggcgagaaccccctggaagaagagggcctctgctg

SEQ ID NO: 15407 - DNA, 33658 bp, Homo sapiens
gggccttcctcctcagtgatgtccgagctcagcgatgaagccagcgagccggaactcctgaaccgcagcttgtccatgtggcacgggctcgggacacaggtcagcggggaggagctggatgtccccctggatcttcacacagctgcttccattggccagtatgaagtggtgaaggagtgtgtgcagcggtaagagatctcggggaacttcctctcacattttgagcagcgcagtgatggcttcgatcccacgtgatggggctttgcacacagttgtggatgtttaatgcgtgtagaataggttaacctgcttatctcaggcagctgtcagtaagtattgatgctgagccctgacaaagaggccgtttttattcctaggaagaaaaagagggagtaaactttgatcagaagcttataaacagtcattctttaaccagactaattttattcactaattgcagaaatgcccaaacaaacaagcaaaataaaaataaagacagaaagtgatggcctggtgcggtggctcacacttgtaattccagcactttgggaggctgagatgggcgggtcacttgaggtcaggagtttgagaccattctggataacatgatgaaaccccatctctactaaaaatataaaagttagctgggtgtggtggcatgtacctgtaatcccagctactcaggaggctgaggcaggagaatcgcttgaacccgggaggtggaggttacagtgagctgagattgcgccactgcactctagcctgggcaacagagtgagactctgtctcaaaaacaaaaaaaagaaaaaagaaagtgatccctggccttcttttcccggagggttcattcgatccctgtgatccctgttcccctctagcttctgccatggaggaggagagaggctgggctttcagtgcctctggggaatgacctcccgacgtcactgcccacctgccctttgctaatctgtgtacaatagttagagacaatataaagcccctggcagggtccatggctgcgtcttgcccatagtaggatgtgatcatcttgtttttggaaaagggtcgtctcctcacttccacccccttatgttccacacacagcctaactctgtctcctggttctcatttgatattgtggtgcagcgacctctcttcctctctctgcgtgcctcttccagttcccagtgagccaaagcaaagcattgctgaagccccaggtctccggttcccaagttgtggccctcacttagacatacccagcccatggagtgctggtgcaccttggtacagggtggtctgttgcgctccctccacaggaggctctaggcataggcagctgggtatgcagtcagtacggcccctcaaagggtcacgtttggaattctcaggctcttaagtctttgggtgtcctgttaagatgcagagtccataaccgctccatagaggagcagggggaggcgtttgtgttgtgatgggattttgacactagctgaggtggaggcttgctgatagtaagcacaggatggggcctgaggggagctgggggcatcagaaggaaggggtggggctgaacgaggagtggtaagagagccccagggagatgctctgctgttgtgtaaaggaagatagtgttaggacgagctgggtgcattcgagccctgctgcagaggcatctccatgcagcccccctggccaggggctgccactgaaccctggtatcaggaccttctggaatggctgcccaggtgtgcatcccagagtcactgagggctgccaggcaatggaaggtagttgcctgctgtggtctaatatgtgaatcccggctgggcgcggtggctcacgcctgtaatccagcactttgggaggctaaggcgggtggatcacgaggtcaggagatcgagaccatcctggctaacacggtgaaaccccatctctactaaaaatacaaaaaactagctgggcgtagtggcgggcgcctgtagtcccagctacttgggaggctgaggcaggagaatggcgtgaacttgggaggcggagcttgcagtgagccgagatcgcgccactgcactccagcctgggcgacagagcgagactctgtctcaaaaaaacaacaaaaaagtgaatcccgtaaaagggacagatcctggggttcagtcaccagttgttatcccctctgcaggcaagaactggggaagggaaagaaggcctgtgggcgttaaccatgtaggatcccaggtaaccatgcaagtgggtattattttaaatgtgactcccttgtcccaaccccagagtcgcagctaggaagcccacagttttttcccatgggaaaatgcattgccagaattttaacagcaatcagtgagaaagatgggattctttggtcacagatttttcaagaatgtttctttaaggtgaggtgacaaaggatgaatcagtggcggtgggacttgtccacggtggagtcccttctttcctcactgctcctctccacccagcagtgggctagtagatgccaggcctgtggtggtcagggtttttcaactgtggctgtgttgacaatccaggctggatcattctttgctgtgggggctgtcctggacactgtgggatgtttagcggcagccttggcctccagcagcccttccctgcccagttgtgagaaccaaaaatgccttcacacattgccacatattccctggttgagtgccatctgcctatctggtggtgtgaaagagcatagctggccttgggctaggaggatgcgaaatcagagcaaggagacgaaggctcagggcctcacaaggcagtgtacgagcaactgtcagcatttttctgcctgcctgcctccaatccccacaacgtccagggtggcagataacttctgcttcctgtcaactcatcccgcctggcctagcctcgccaccagctttggtgaaccccacatgcgaggcggctggccatgtctagcatatcttgcgtttgtttaggagagagttagatttgaataagaagaatggtggtggctggaccccgctgatgtatgcctcctacattggccacgacacaatcgtgcacctgctgcttgaggcgggggtgagtgtgaatgtgccgaccccagaagggcagactccactgatgctggcctccagctgtggcaacgagagcatcgcctactttcttctccaggtgagctacgagggaactcaggcccagaaacctgaggggctccgtggccaccctgacagagatgcgaaccactgcaggccacggtgttcgtgtgtgctcgtgtaatcacttctgattcttgcagcatggccgcctggagggcgcccgccccacgcagaggagatgaggccgtaacgcacgttctgtgttctcttgaagcaaggtgcagagctagaaatgaaagacatccagggctggacagccctcttccactgtaccagcgccgggcaccagcacatggtcaggttcctcttggacagtggagccaatgccaacgtgaggtgattgccacatctttagtggccacaggagtggcctaggtgtcatctgactctaaggagggtggctctggaggcagctaaccagagtttagggccaccctgcttcggcacgagaggctcaagatgaggggtaggaccagagtccttccaggcacaggccttttcgtacatctgtgagatgcatctcttcaagccctctcagcttccttttctttatctgaaacccacctgggtcatacagttgtaagaattacatgttttattgtatgccaggggcctaacatactgaatggcatttaaatgtcatacattacatgcaaattccttccattttcttgctttttgtatggatgaggtgaggtgatgctttgaaacagtcatgaggccgggcgtggtggctcacgcctgtgatcccagctctttgggaggccgaggtaggcagatcacgaggtcaggagatcgagaccatcctggctaacatggtgaaaccccatctctactaaaaatacgaaaaaattagctgggcatggtgacgggcgcctgtagtcccagctactcgggaggctgaggcaagagaatggtgtgaacccgggaggtggagcttgcagtgagccgagattgcaccactgcactccagcctgggtgacagagcaagactccatctcaaaaaaaaaaaaacaaaaacaacagtcatgagttttggccgggctcagtggctcacacctgtaatcctagcactctgggaggccaaggcgggcagatcatgaggtcaggagttcgagaccagtctggccaacatggtgaaaccccgtctctactaaaaatacaaaaattagctgggcgtggtggcaggtgcctgtaatcccagctactcgggagtctgaggcgggagaatcacttgaaaccagaaggcagaggttgcagtgaactgagagatcgtgccactgcactccagcctgagcaacaagagcaaaactctgtctcaaaaacaaacaaaaaaccagtcatgagttttataagttggaagtgggattgttgtctaaagcttgtcatgataataatcacctttgaacaaacgcagcgggtaccaatgcagcacccaccctggctgtcattcattctaagacacctgataattttgtatgccactaagaaagaaaaaatatgctactaattaacattcaactcgcctgttgatttaaagatgttttctgacttgagagatgttaaaatatgaacactgtgtgtcttaagatggatgaaaaccagcatttcccatgcatggttcctgacttccaaaccagcatgagacaaggagggatttggaagccctctgaagacagtgccgagttagcataaccaagcatgaaaagcaagcttcaggagctaagcgtggcaaagatagcttagatcattagtacttgaacttttcagagtgggttcatggaggacgttgaacttgaagccaggatttggatgaatggatgggagatgctggctttctgtgaggaattagaacagctttttgaatatgattgaggtggagatttcagaggtagccagtgggaatagccaacaggtgggacgacaggcagacatctgtctttaggacaaagaccagccctggggacagacaccagaagagtaaatggagctgatgtgttatattcactgttctcatgtcacctgttaattctggaaagggacagtgttctacgcttagggatcggtgactcgtgcactgctcagggtttatcttcagcagggagtttttgcctggcggaacttgtctcttccaatcatctgactgtggcccacatcttgcagggagccgatatgtggatttactcccttgatggaagcagctgctgctggccatgagataatcgtgcagtattttctgaatcacgtaagtgaccctgattattagcatgtaatgtagtcacggcaaatgaggaatcatattactgaagtataagctattacagaattttcctttgcacagaaataactttcattcatttattcaacacattttcattatctattgacgcccggtgttgagtggtgcttaggcattaaggatacagtggtgagtagaaatagacacctattcctgtaataattttgaaaatactatctgaaaattatggaaaaatattttaaaagtaaatagcactcataatcctgtcacttagaaaaattatatagaataagaaggcagagatcctcctctctttttcaacctccctgatgcccacttggtttgagaaagagctgccctaggacttttcctctgctgtggaaagatgtgtctgtaggcaagtgtgtgcacattgctttgtgttttgaacaaagtgggattctacgtatagtctgtaacttagagacatcttatagacatcttatctttgtacagtattccgtgtacaatctgcctcagttaatttaatgagtttcttattagtagaaacttagtttttaacattttgcaattataaacagtgttccgggaatatccttttacacatagctttaatacatttgcagttatttctgtatgttgtatttctgttttattttattaatttatttttttgagacatggtgttgccctgtatcccaggctggagttcagtggcgagatcgtggctcactgcagcttcagcctcctgggctcaagcgatcctcctgcctcagcccccaagtagctgggactacaggtgcatgctaccatgccccggctaattatttaattttttttttttggtagagttgggggtctcagtatgttgtgcaggctagtcttgaattcctgagctcaagcgatcacctcagcctcccaaagtgctgggatcacaggtgcaagcctgtccacacagaaccttgtacataaatattcatagcagtattattcataattgccaaaaagtagaaaaacccacaagtccatctactgaggaattgataaacaaaatatatatctgtatagcaggatattattcggccctacaaagtaatgcagtactgctgcatgctgcggcaggggtgaaccctgatgcgttaggctgggctgggtgcggtggcgcacgccggtaatcccaacactttgggaggctgaggccagagggtcgcttcagccctggagttggaggttgcagtgagctatgattgcgccgccacactccattctgggtcacagagtggatcctgcctcaaaaagaaaaagaaaaggaaaacattcggctcagtgaaagaagccagacacaacaggccacacactaggtgatttcactcataggaaatgtccagaataagcaaatacatagacagaaaatagatgagtggtttcctgggtcttggggaatgggaagattggggtgataaaaatgtgctaaaattgtttgtggtgatggttgaacaactgtgaatatacgagaagccgttgaattgtacattgtaagtgggtgacttgttggtatgtggattatatctttataaggctgttaaacccaatggggggaagtgcaggcggtcctgatgaattcccactaccaaggttgtctgttgtcctgcccaccagtcatagacaaaggtgtccattttctcttgtcctcaccagtcctgatgtcagtcaaccttttgtcaatctggcgggtgaattgtagcgtctcattttagtttgtccttgttagagtagttgaaatttttttctttttttttttttttggagacagaagtcttgtgctgtgtcgcccaggctggaaggctggagtgcagtggcgtgatctcggctcactgcaacctctacctcccaagttcaagcagttcttctgcctcagcctcccgagtagctgggactgcaggcacccgcccgcacacctggctaattttttgtattttagtagagatgaggtttcaccatgttgcccaggctgctcttgaactcctgaactcaggcaatccacccaccttagcctcccaaagtgctaggattacaggcataagccactgcgcccagccagttgaacatttttaaattgatttcttagccatttgtatttcttttttttttttttttttgagactgagtctcactcagtcgcccaggctggagtacagtggcatgatctcagctcactgcaacctccacctcccaggtttaagagattgtcctgcctcagcctcccgagtagctgggactaaaaatacaaaaaatcccggctaattttttgtatttttagtagagacaaggtttcaccgtgttagccaggatggtctcgatctcctgacctcatgatctgcccgccctggcctcccaaagtgctgggattacaggtgtgagccactgtgcccggctggccatttgtatttctcttacgagctgtctatgtttattgcccaattttctattggatagtttgtttttttctcacttattggtgggaatttcttaaatagtgaaaaattcacatggtatctctttttaacaaagaattttgggacacaacatgcacatggtacacatgcagaccagaaggtgggtgcaccgcaggcctgtcccccaccctgcctgcgtctccttggcaccctccccacgggcgactctgggaatacacccacacatgctcatggtcctgccccatgtgcagctgctcccatcttgcattttttaaaaaacttaatcatgaagatttttctatattggtgtataaagagacggggccaggtgcattgtctcgctcctgtaatcccagcactttgagaggccaaggcagacagatcacttgaggtcaggagtttgagaccagcttggccaaggtggtgaaacccgcctctaccaaaaatacaaaaatacaaaatacaggtggctgacgctgtaatcccagctacttgggaggctgagacaggagaatcacttgaacctgggaggcagaggttgcgatgagccaagatgttgccactgcactccagcctgggtgacagagtgagactatctctaaataaataaataaataaataaataaataaatcaataaatcaataaagagatggggtcttgctctgtccctcaggctggagtggagtggtgcagtctcagctcactgcagccttgacctcctggtctcaagtgatcctcctgcctcagcctcccaagtagctgggattacaggtgcgtgccaccacgcccagccaatttttgtattttttttgtagagatggggttttgccacgttgcccaggctggtcttgaactcctgagctcaggcagttcgcctgcctcggtctcccaaagtgctgggattacaggcacgagccaacgcacccagcccctctcttttttttttttttttgagatggcgtcttgctctgttgcccaggctagagtgcagtggcacgatctcggctcactgcaacctcagacttccgggttcacaccattctcctgcctcagcctcccgagtagctgggaccacaggcgcccgccaccatgcccagctaatttttcatatttttagtagagacggggtttcaccgcgttagccaggatggtctcgatctcctgacctcgtgatccgcccaccttggcctcccaaagtgctgggattacaggcgtgagccaccgtgcctggcctctcttttttttttttttttttatggtggcatggtattccctgtagggatgaatcagagtttttttgtttgtttgtttgtttgttttgagatggagtctcgctctgtagccctggctggagtgcagtggcgcaatctcggctcattgcaacctctgcctcccaggttcaagcgattctcctgcctcagcctcctgagtagctgggattacaggcgtgtgccaccacgcccagctaattttgtatttttagtagacagggtttcggcatgttggtcaggatggtcttgaactcctgacctcaagtgatctaccactttggcctcccaaagtgctgagattacaggcatgagccactgcgcctggcctaccgttgacatttcttacacgtctttttaagcacatatgggaatttcttcaggagcttaggatgtgttcttcaaagtagagtctttgttgtgtgaggtgggttcagtcggtagtgggtagtgtaaacttgctttgttccatagtggtcctggttcacacccctccccttagggtgttagacttcttttttttttttgagatggagtctctctctgtcacccaggctggagtgcagtggcgcgatctcggctcactgcaacctctgcctcccaggttcaagcgattttcctgcctcagcctcccgagtagctgggactgtaggcactcgccaccatgcccagctaatttttgtatttttagtagagacagggtttcaccatgttggccaggatggtctcaatctcttgaccttgtgacccgcccgccttggtcttccaaagtgctgggattacaggcgtgagccaccgtgcctggccttttttttttttttttttttggggtggggtcttgctctgtccccaaggctggagtacagtggtgtgatctcagctcagtgcaacttctgactcccaggctcaagcaattcgcctggctcagcctcccgagtagctgggattccaggtgtgtgccaccatatccagctaatttttgtatttttagtggagacagggtttcaccatgttggccaggctggtctcgaactcctgacctcatgatctgtctgcctcagcctcccaaagtgctgggattacaggcgtgagccactgtgcctggccaggatgttagactttttggctccctggccatttgggtttctttttctgcaaataattatttttgtattttttatttattttttttatatagggtcttgctttgtcaccacactagagtgcagtggcctgatcatgggtcattgtagtctcaacctcctgggctgaagtaatccttctgcctcagcctcctcagtagctgggactacaggcacgcactaccacgcctggctgttttttttttgtagagacaaaaatctcactatgttgcccaggctggtcttgaactcctggcctcaagcaatcttcccaccttggcctcccaaagtgctggagttacagacctgagccaccatgcccggccagataattctttgacagataatcctgctgacatgaactagacttccttaagacacatcatagaatcaatagcccagaaccataaagagcctctacttgtaagtttagagtcattttaagtaaggtagaactggagatcataagagatatgtactcttataatttttgattgtatgtttgtttctttttgagacagagtctcactctgtttgcccatgctggagcacagtggcgcgatcatagtttgttgcagcctcaacctcccaggttcaagggatccttgcaactcagcctcctgagtagctgagaccacaagcgcatgctatcacactagctgatttgatttttttgtagagttggggtctcactaagttgcttaggctggtctcaaactcctggctgcaagtggtcctcccaccttggcctcccaaagcgctgggattacaggcaggaaccacggtgcttggccaacaatttgcatgcctttaccacattccccaaatgttaacatttcacctcattttcttatcagtctctttatgtataacatgcatatgttttctgaatcatttaaatgtaaattgtgacataatgccccttttcccctaaatatgtatttcctgagagtaagaatttcattatgtatttcctaaaagcaaaaatgttctctttcccagtcacacaaaattatcagactcaggaactcaacactgagttcttcctccagcacttgacaagaatcaaagtgttggttagtgactgctttgggggatggggcaggactggcagcaggtggcccgatggcctgggtggtttgcctgccagcgatgctggtgggcaagccctgcctggaagctcctctctcccacgtttttcctgccgcccagtagttagaccacctggagccagaggagggggcccacccggtttcccagcctgtccctccagagctgggctccatttctggaggtagagaatggggcaagtctgggcatcttgtgctctttgctaggggaggaaagggctgtggctgctttccttgtcccccatttcccttctgccagtggggccaagccccagcagctcagtcaggagaagaggatatggatctgtctgggcctctctctttaagagaaagttgattcgtgccttccggatagtcttgttccagggtttctaaactttctgatcccaccttcatgttaaaatgagttttgatcatgtgtctctttagtaatatggacattataaaataggaaaaaaaagtctcttaaagcctaagtagttaaaaatttattttcacatcaggcatagtggctcatgccagtaatcccagcacttttagaggccaaagtgggaagatcgcttgaggctggagttggagaccagtctgggcaatacagtgagaccttgtctctaaattaaaaaaaaaaaaaaaaaaaaaattggccaggcatggtggctcatgcctgtaatcccagcactttgggatgccaaggcaggtggatcacctgaggtcaggagttcaagaccagcctggccaacatggtgaaaccccattagcggggcgtggtggcgtgcccctgtagtcccagctacttgggaggctgaggcgggagaatcacttgaacccggaaggcagaggttgcagtgagccgagattgcgccattgcactccagcctgggtgacagagtgagactccgtctcaaaaaaaaaaagccagttgtggtgtgtgtttgtaatcccagggaggctgagaagggaggatcacttgagctggggaggtcagggttgcaatgagccagtgtaatccagcgtgggccacagagtgagattctgcctcaaaaacaaaaccaaaaatatataacgagttaaaatcctacagtaaagaggctactgttttattctggttaaaccttagggttccttctatcaaacttaaactagaattttttttttttcttgagatggagtcgccctctgtcgcccaggctggagtgcagcagcttactgcaatctctgcctcccgtgttgaagcgattctcctgcctcagcctcccgagtagctgggattacaggtgtgtgccaccactcccagctaacttttgtgtttttagtagatacaggctggtctcaaactcctgaccaggctggttgttggccaggctggtctcaaactcctgacctcaagtgatccgcccacctcagcctccaaaagtgctgggattacaggtgtgagcctctgtgcccagccaagaaattattttttatttttgagatagagtcttgcttcgtctgttgcccaggctggtgtgcagtggcgtgatcttggctcattgcaacttccacctcctggactcaggcaattctccttcctcagcttcctgagtagctgggagtacagacgtgtgccaccacgcccggctaatttttgtatttttagtagagatggggttttaccacgttttcccacattggccaggctggtcttgaactcctgacctcaggtgatccacccgtctcggcctaccaaagtgctgggattacaggcttgagccaccgtgcccagcttataaattattgttattatttattattatttttttgagatggaatctcagtctgtcgtcgaggctgtagtgcagtggcgcgatctcagctcactgcaacctccgcctcctggattcaaggatttctcctccctcagcctcctgagtagctgggatacaggcacgcaccaccacacctggctaatttttgtattttttagtagagacggggtttcaccacattgcccaggctggtctcgaactcatgacctatgatccacccaccttggtcccccaaagtgctgggattacaggcgtgagccactgtgcccggcctataaattattttttaaggcacaaagtctcataggtaatttttaatcagagtcaaaagtaggatggggggcactctagaaagtaaaactccttatactttgtgaaaacacagttttttgtcctgtatccctgcccagagaccacctctgcctcccccaccaactacatatgggggtcaaggttgaggccccctggtctaacgggagagacagttgccgtatgggtggtagcaaaactccttaagggttgtgatttttttttttttttttttttttgagttggagtctccgtgtgtcgcccaggctggagtccagtggtgcgatcttggctcactgcaacctccacctcctgggttcaagcgattctcctgcctcagccccccggagtagctgggactgcaggtgcccaccaccacgcccggctaatttctttttgtatttgtagtagagatgaggattcaccctgttggccaggctggtatggaactcctgaccttgtgctccgtccacctcggcctcccaaagtgctgggattacaggcatgagccacggcgcctggctgtgccttttttctcttaatgatgttttgtgcaccctagtccgtgtcaccgcaggtactcccacccaccacgtaaatgggcgggaggcgctctgttttctggatatgctctcacgtagctcattaatctcttattttaagttccttctgattctcactatgctgaatgccacagtgaaaattctaaattgtagtgtatgtcctgcattatttccttaggcgccgctgcacttcagcctgggtaacagagcaagatcctattaaaaaaaaaaaagcaaacatgcttatggtagtacattttaaaaacatagaagattggaaaattggaaaaatccccatcaaaaatagtaaataacttaaaaatagcaacattttgggtatgttaccttccaatattgttttctgtgtaatttttttggtctcattttgccggagttgtaatgtatatgtagttttgtatcatgatccttttttatttttttgagacaaggtctcgctctattgcccaggctggagtacagtggtgcgatctcagctcgctgcagcgtcaagctctgggacttaagtgatcctcctgcctcagcctcctgagtagctgggactacaggcatgtgccgccacaccctgctaattttttattaaagatgctccccctttccggggtcccgcctcctcctctgagctttggctctggcttccctgcctcccccagctgcctggtctgacaggagagaaggacagttacagtgtacagtgacaccaaaaacatgctgtattgattatagtttatttttttttcttgtagaggtgggttcatgctgtgttgcccaggttgttgtccaactcctgagccgagcgatccacctgccttggcctgtcaaatgctgggattacaggcatgagccacctcacttggccatgatcctttttcaacttgatcatacagctgtttgtaaatatcaccatctatggcaataacagaactgactgcttatccccctgagcattcaagttttctctaggtaggttttcattattgtgaatatgctgtgccaaacatcctttttttttttttttttttttttttgagacagagtctcactctgtcttcaggctggagtgcagtggcatgatctcagctcactgcagcctccgcttcccgggttcaagcaattctcctgcctcagcctcccgagtagctgagactataggcgttcaccaccacgcccggctaatttttgtatttttagtagagacggggtttcaccatgttggccaggatggtctcaatctcctgacctcgtgatctgcccacctcggcctcccaaagtgctgggattacaggcatgagccaccgcacccggcctgtgccaaacatctttgtgcactaaagccttttctgtatttagggttatttccttagggtcatggaagtggaattgttgcgctgcaagacctgtaaatacattatagagctttggatcaaagttacgaattctgcttcagaggatggtgctttcattctgactggtttaaaaggctgctttctttgaagacaagcgaagtgagtgggacacagcccaggcgcagaaggtgaaggctgggatctccgcatggtggctgccagccccctgcaagggaggtcatgagcgtgggagatgactccccagcccccagccctcctcatccttgtccctaagaagagagtgagagcaaaacttgtggctgcggtgcagacaagcctgcctctttctcatgcagatgtgatgtttcccacacagggaggcagtcagaaaccagcatatgcccttctgtcttcccagccagcagcccaggaagggcaggtgctttgaaggagaggcccctaaccccctttcacggacattcacagggagtcaaggtggacgcgagagaccacagtggagccacagcccggatgctggccaagcagtacggacacatgaagatcgtggccttgatggacacttactcgccctctctgcccaagagcctctatcggagcccaggtacccacacctgccagccgcgccctgctggggtctctggttgccttgagctttaggtgacctggcagagaaagatgtcccccgcttccccggctcccaccttctctgagatttggctctgcctcccccagctgcttacatgtcaaggttgaggcccctgctctaacaggagataaggatggttacgatggagagtggtacaaaaccaggctgttgtgaatgtagaggctttctgtagtatgcttgactaccgagtaggggcaggcccctcttagttttctgttttcactgtttcctgagctatggcttgttcattcttctatatgaacttgaatatcaacttgtctagctccttaaaaacagtattgatatttttactgagattgtgacaatgtataaattaactatatctttgtgttgttgtcttatccaagaacaagggatgacttcttgttccaatgtacttttgggtcttgcaggagggttttaaatttttcttcatctacattttgcatgtgacttaagtttattcctaagtgtttgatcatctttgtcgctattgtaaatggggttttccctatcattatatcctttttttccccccaactctcagggtattaattattcagtgctatttattttttatttcagtaggtttttggagaacaggtggtggttggatacgtgaataagtcctttagtggtgtcattatatcgtttcactgcatattgtcagtgcatttgaaggcagtggatttctgcaaacttttgttttttttttgatacgggagtttcgctcttgttgctcaggctggagtgcaatgaagcgatcttgcctcaccgcaacctcttcctcccaggttcaagcaattttgcctcagcctcccaggtagctgggattacaggcgtgcaccaccatgcccggctaattttttgtattttcagtagagatggggtttctccatgttggtcaggctggtctagaactcgcaacctcaggtgatccacccatctcagcctcccaaagtgctgggattacaggtgtgagccactgcactcagccctgcaaactaattttatattctgctaccttacagaattcttacattgttcaggttagttttgttattgattctttagggctttacaggtgtactaacatataatctttaagtatcgatggatacactgcttcctgctgattctcatgactctgactttgttgaattgcaccgttcttttgtttagttgctaacacctctagctcattgttcaacatagtggagatagtgagcctccttaccttggtcctgatcttagtggaaatgccacgttacatgagaggctgactgtaaaagggaaggcatatgttattttagcttattaacaaagtattcctcagttcttctattcctgagtggtgttttacaggagtaactattgaattgtgttcccatatctttggagacgatggtgaattttcatatggtagattgtcttcatgaacctcctaataatgaatcaaccttacattcttggcataaatcccacatgttgtactattttaatgtgtttttgaattctgtttattaatatttagtatttttctatggatattcagtcataagtgatactggtctatagttttctttcttctttttttttgtttttgaaatggagtcttgctctgttgcccaggctggactggagtggcgagatctcagctcactgcaacctccgcaacctccgcctcctgagttcaagcaattcttctgcctcagcctcccgagtagctgggatcacaggcgtgcaccactacacccagctaatttttgtatttttagtagagacggggtttcaccatgttggccaggctggtctcgaactcctgatctccagtgatccgcctgcctcagcctcccaaagtgctgggattacaggcgtgagccaccgctcccggcgtggtctatacttttctatttttgttctgtctatcaggtatgggtatcagtgtttacttcataaaaataatttggaagttttccttccttttttgtgttctaggacaatacacgtagcattagtgctacctggtcttagaagttttgatagaatcctcccatgaaaccatctggtctctttctgtgaggtggttcctcgataacagtttttctatttcttctatagagattggcctcctcatactttcttttcttatggggtcagttttggtaaattatattttcctgagagatcacttcatctaggatttcagacttatctgcagaggtctacaagataatattttctccctttttttttttttttttttgagacagagtttcactcttgttccccaggctggagtgcagtggctcgatcttgactcaccgcaacctctgcctcccgggttcaagtgattctcctgcctcagcgtcccaagtagatgggattacaggcatgcgctaccatgcctggataattttatgtttttagtagagacagggtttctccatgttggccgggctggtctcaaactcccgacctcaggtggtctgcccacctgggcctcccaaagtactgggattataggtgtgagccaccgcacccggccaatttttttctccttttaaaatattctgtttcagggccaggcgcggtggcttatgcctataatctcagcactttggaaggccgagttgggcggatcacctgaggtcgggagttcgagaccagcctgatcagtatggagaaaccccatctctactaaaaatataaaattagctgggcgtagtggtgcatgcctgtaatcccagctactcgggaggctgaggtgggagaatcccttgaacccgggaggcagaggttgaggtgagccgagatcgtgccattgcagtccagcctaggcaacaagagcgaaactctgtctcaaaaaaaaaaaaaaaaaaaaaattctgtttcaggctgggtgcagtggctcatgcctgtaatctcagcactttgggaggctgaggcgtgtggatcacttgaggtcaggagttcaagaccagcctggccaacatggtgaaaccccgtctccactaaaaatacaaaaataagccaatgtggtggtgtgcgccagctactctggaggctgaggcaggagaatcacttgaacccgggagggggagattgcagtaagccaaaatcacgccactgcactccagcttggcgacagagcgagactccatctcaaagaaaagtaaatagataaaataaaacaaaataaaatactctgtttcagtggttattttctcctgttattatctttttttggcatggaaaatattgatttattttttgtgacagggtcttgctttgtcacccaggctggagtccagtgacccaatctcgactcaatgcaacctccgcctcccaggctcaaaacgatccttctacctcagctctacgagtagctaggactgtaggtgcaccctaccacgcccagcttacgtttgtattttttgtagagaggtggttttgccatgttgaccaggctggtctcaagagtcctgagctcaagcaatccacccgcctcagcctcccaaagtgctgggactacaggcatgagctactgcacctgacctggaaaatatttatctcatttttaattgacacaaaataactacatatttatggggtacagtgtgtgatgttttgatacatgtatacactgtgtaatgatcaaattaaggtgattagcttatccatcacctcaaacatttatcatttcgaggtgagaacatttaaaatcatgtcttctagtagctattttgaggtataagctgttgttccgtatagtcactctactgtgaacaccagaacttctttcttcgatctgtaattttacacctattgaccaatctctcccactacctccccacccccaacctctgataatcactattctactctacatgtttgacatgagcttttaaaaatcctgtaaatgggtgacatcatgtagtcatgtagtcttttttgttgtttgtttggtttttgagacaggttctcgctttgtcacccaggctggagtgtggtggcataatcttggctcactgcagcctccaattcctgggctcaagtgatcctcctatctcagcctcccgagtagctggcactacaggcacctaccaccacacctggctaatgttttatttttttgtagagacggggtcttgctatactgaccaggttggttttgaactcctgggctcaagtgatcctctcgccttggcctcccagagtgttgggattacaagtgtgagtcaccacaacagctggcatttgtctttcttttctatgtctggcttattttactgaacatagtctcttccaggcttattcatgttgccacaaatgatcagatttcattctttatgtctgaataatattcaattgtgtatataaactcattttctgtcttcgttcatccactgatggacacaggttgattctctatctaggctactgtgaatactgcggcagtaaacatgagggtgtagacatctctttggtatactgatttcctttcttttggataaatacccagtagtggaattgctggatctcatttcttatattttttaatttttttttttttttgagatggagtttcgctcttgtttcctaggctggagtgcaatggcacgatcttggctcactgcaacctccacctcccgggttcaagcgattctcctgcctcagcctccctagtagctgggattacaggcatgtgccaccacgtctggctaattttgcatttttgggagagacagggtttctccatgttggtcagggtggtctcgaactcccgacataaggtggtccacccgactcggcctcccaaagtgctgggattacaggcatgaaccgctgcacccggcaaaaatttcttctattaaaaaaaatagagacagtgtctcagtatgttgcccaggctggtctcaaactcctgggcccaagcgatcctcccacctcagtctcccacagtgctgagattataggcatgagccactgcgcccggcctcacttcttattttgaatatttgtgtttgttctttttttttttttgagacagagtctcgctctgttgcccaggctggagtgcagtggcgcgatctcggctcactgcaacccccgcctcccaggttcaagcgattctcctgcctcagccttttgagtagctgggactacagggtgcccaccaccacacctggctaattttttttttgtatttttagtagagacagggtttcactgtgttagccaggatggtctcgatctcctcacctcgtgatctgcccacctcggcctcccaaactgctagaattacaggtgtgagccaccgtgcgcagcctcttcctttttttcttaagttaaatactagtactttgtctgtttagtggaaaaacaagaaaaacccatcggattttgatttattaatgagacctactgattgtctgtttaatttctgcttttatttttatttggcttactttgttgttctagttttttgagttggaaacttctttcattttcattgttgcccttttgttgctaaatgttagaggctgtgaatttttgctgattgctgctttaagtgtattctgggggttctgtatttaatactttccttgttatttttagaaattctgtaatttttatttatattttctccttcacccaggagttgtctaatagaagtattatgattgtttttgtttgttaatttctagatggaagggcctttttgatcttgcaattaatttctcatgttattctgattaactttaatgtgtctgatcagagagtgtttataattcttacatttacataacttccttgtcatcttatttatcatctactgatctatctatatatatatatatttttttcagatgtagtctcactctgtcacccaggctggagtgcccaagtgcgatcttgactcactgcaacctctgcctcccaggttcaagcgactctcctgcctcagcctcccgagtagttgggattccaggcatctgccaccacgcctggctcatttttttttgtatttttagtagggacagggtttcaccatgttggccaggttggtcttgaagtcctgacctcaagtgatccgcccacctcggcctcccaaagtgctgggattacaggcgtgagccaccgcgcccggccctgatcaatattttttagtgttccgtgttttgcttgagaagttgtattctctattatctgtatacagtttagcatatctgtgagtctatcttatttaggattatgtactcttagttcattttctacaaaattacctattagcgtgtttctgatttatgaaggaagttggtgcattttttggtgacagattttcataacttgttatagattcactgtgaattatggcttttagtattagaagtgtccttctggctgggcatggcccatacctgtaatccgagcactttgggaggccaaggcgggcagatcccctgaggtcaggagttcgagaccagtccagcctacatggtgaaaccttgtctctactcaaaatacacaaattagccaggcatggtggcacatacttacaatcccagctactcgggaggctgaggcaggagaatcacttgaacccgggaggcggaggttacaatgagccgagattgtgccactgcactccagcctaggtgacggagtgaaactctgtttcaaaaaaaaaaaaaaaaaagtgtccttccgtgtcatatttaatgtgttttgccctgaattccacgttgatagcaggattgcagccctggctcttttgtggtttccatctgcctgttctttttaagctgctctgagggtgtgttgggtgctgagattcacgcagctgccgttcccttgcttattgctgcctctttgcatttgtcttacagctccctccccttcagcttggatggaagcacagtctccctggagtgctatagatctttgagtgtgaggaggtgtgtgtccatatggctagctcagtcgccagagcttgagcctcgtcatggggaaggacagagtggcccacgttcagggcctgagctctccctctttgctggcctgccctgagttgtcctgtcagtttgcacctgagcgagcagctcctttctcagtgtcaggctcagcccagcctcttccctggcattgggattgtttcataataaacacagctcaggtggtaatgcaaaggacctttcccttcatttctgccccagcttacccactccacaaggagatctcatcatttcctcctgtatacaactcacgtatctcttaaaagtagaatcagatcagagccttatacaaatcaaatatgaaaaactgaaaagctacaaaataataaaagctctggtttgagctctgaaagctcagactgggaagtgatttgaaacagtttataatcatagcaaacacatgccatgctttagaaaatacaaaattgtggctgggcgctgtggctcactcctgtgatgccagcactttgtgggaggccaaggtgggcggatcacaaggtcaggagatcgagaccagcctggccaacatggtgaaaccccgtctctactaaaaatacaaaaacaagattagctgggcatggtggccgggtgcctgtagtcccagctacttgggagcctgaggcaggagagtggcgtgaacccaggaggtggagcttgcagtgagccgtgatcgcaccattgcactcctgcctgggtgacagagcaagactccgtctcaaaaaaataaagaaaaaaaaaagaaaatacagaattgcttaataagttgtttccagccgggcacagtggtaacgtgcctataatcccagcactttgcgaggctgaggtgggtggatcacctgaggtcaggagttcaagaccagcctaatatgatgaaaccccatctctactaaaatataaaaattagctgggtatggtggcatctgcctataattcccaactactcgggaggctgagataggagaattgcttgaacccaggaggcggaagttccagcctgggcagcaagagcaaaactccttctcaaaagaaaaaaaaaaaagttgtttccaaaggaagggattaggaaaaagtagttgtgacttatattaccatatattttaatgaagagatgggttttacttattcaaattagaacagaatttctgattatgaacaatacagacttatgaacaatttggcaaaccccaacagagataataaactcctggctgggcatggtggctcatgcctgtaatcccagcactttgggaggccaaggcaggcagatcaggagtttgagaccagcctggccaacatggcaaaagcctgtgtctactgaaaaagaaaagaaaaaaaacactgggcatggtggcacgcatctgtaaccgcagctacttggaagggtgaggcgtgagaatcgctagaacccaggaggcggaggttgcagtgagtgagccaagatcatgccattacacttcagctcgggggacagagtgagactctgtctcaagaaaaatgaaacttcccatcctcactaactttgcagctccctgtggcccattggagcagcgccccggcctgttagggcatttctcagaagtgatgccctggcagatacccttctccttaatttaacaaaaccggcgacagtcactttctttcagtttgccgtaaggattagtaaatgagtccattactgaacacactatcttaatcttggtgtttgatcacagaaaagtacgaagatctgagctcttctgacgagtcctgccctgctcctcagagacagaggccttgccggaagaagggtgtcagcatccacgagggaccgcgagccctggccaggatcacaggcattggcctgggcggcagagccccacggcctcgctatggtgagtggcccgcgtttcccgagggctctttctcattgcataccaggattttgtgttggcaagaatggaatagctcttaggctcctgaaatgtgggtcgctggacctcaggtggcagcgggacaggtggcccagctttcatgctcagggagactcaggattgagtcctgtgatggaaatgcattggtcacggactagctcttgttttttgctttatctcctggagtttccttttcgttggttaaatttaggaatagaactttctctcctgcagcagaaatgtagctaaggtcagatttcattcatcacataggtgggttggctcatacagggaggaggcaaagcgtgaagttcacttccctgccctgcccataccagctgggtcgggtgcgctgctgggggcaggaggccaagaaaacaggccctgctgttttctcagggcgatgaagttgtactcagaccctcctgagagagggcccgcttgttgacttgctggtgaagaatcctagcctttgggttttccagtctcgttcattctcagattcccagccccagggtgttgagcgttttgctcttggggagtgctggggtttctttttaggggagttgggtttggtgcctactctctattgctgtggtctgtcccagagctcagctggaggtgtgagttatgtcttcctttgatggctgtcacccactcatagccaggccaaggctgctggtctcacaggcctggtggctggtccttctcgggagcaaggcctctttgaggccaggacttggaagagtgagagtagacagtgtttcagccaggggtccaccagtaattgaattcccttctagaccccaggaacaagcagatgtgcagacttctgtcttcccaagcctgggtgctgggttgggaactggagacccaccttctcccatcatcctgggaagggtgagctgactgggccactgggaaggcctctctcgagctgctggccagccccaccacagcatgagggcccgcccgtgtcccgtccgctgagctgtgagcactggctctgggacaccgggctggtcgttctgagtggcagagtctcttccttccaaaaggtccctgccacctgctacagcctgaggtgtggtggggacaggaaggaagctgtcatcctggggctgagttggtaattaatctatatagctgtacaacaaatgctttaacaaaatcatacatgtctgaagccgcttgtgtgcggttctttgtatgtatccacagagaagtaatcatggtggtggtctcaggtgtggtatttcaggggatttttgttttctcataccttgtgaaatttaaattttctataagtgcatatattttatttgccagtaattaagaaatttggggccgggcgcagtggctcacgcctgtaatcccagcactttgggaggccgaggcaggtggatcaagagatccagaccatcctggccaacatggtgaaatcccatctttactaaaaatgcaaaaattagctgggcatggtagtacgtgcctataatcccagctactcgggaggctgaggcaggagaatcggttgaacccgggaggcggaggttgcagtgagccgagattgtgccactgcactccagtctggtgacagagcaagactccgtctcaaaaaaaaaaaaaaaaaattgggggggccaggtgcagtggcttatacctgtaatcccagcactttggaaggctgaggtaggaagattgcttgggctcaggagttgtgagaccagcctgggcaatgtagcaagaccctatctctacaaaaaattttgaaaattagccagatatggtggcccatgcctgtagccccagttacatgagaggctgaggtggaaggattgcttgagcccaggaggtcaaggctgtagtgacccatgatggtgccattgcattccagtctggataacacagcaagaccctgtctcaaaaacagtttagggggcaatgataaatagcatgtgctgattagaaaaacttctccataactaggaaaatacgtaaagaggaaagtaagttccccatggtcccatcaaccagtcctttgggttcttttttgagacagggtttcactgtagcccaggctggagtgcagtggcacgatcatagctcactgaaggctccagttcctgagctcaagcgatcctcctgtctcagcctcccaagtagctgagattacagacatgtgccaccgtgactggtcaagtcagtctttttatgtaaaggggcaaaactggagtgaaattgcctggtatacatgcccctttttctgcttggttttagaggcaggtagagttaggtaatttcatattattgttgttaatttttacctcaaggcctttttccttcctgctcagccaggtctctttttcgccggggttgactgaccagaggaggcccgctaagcgcctgtggttaaaggtcacagggacataaagacacgtggtcgatgggtgtctgtgtgaggtcattagctacctcctgctaaaaggaacactcatggtatagttttctctggtcaggcatctgtaaatacagctgaccatttgctacgttttccccttggaaaagaaatggagagggcccaggcttgacctggctgccagccctcgccccaccaggcacttgcttgggccactgactgaccctcagagcatcttttccacccacacaccacagatagagccatgccaggtcgcaggggcaagtaggtgaggtcatgactgggaagtcacctgcctccatcctgggcctcggcctctgaggaggtttcactttggagttccctgggcttatgggccccattctgtacacagagcaggctcctccccgtggctatgtcaccttcaacagcagtggcgagaaccccctggaagaagagggcctctgctgccgggatgtcacctcccccatcaatgagcgggatgtggagagcagcagcagcagcagcagtcggggtacgtgcacccccacccatccggcccgtggctcaggcaggtcctggagctcctgtgtgcccatccccacttatcccctgggcctggcgctggacacagccatccagcagaggacaggaaaggggtaggtgtggacggccctggttcttgtgaggaatgggagaagcttctggtccagcatccccgtgcggcttaagggagccgttccacagcaacaggtttagctccttgcttgggagcccctgaggctttcagggcaggccccagtaggaatgtctgttataactgcacctccgtgcagcagctgtttccatagtgcccaccgtgtgccaagcactgctccgggtgcttgggatttatcagtgaacaaaaaagacagaagccctgcccgtctgtatagaggggagggtttaggacaggcaggaagtttgaaatataaggaagcaaccgctgcaggccccaaggagtgccctggtggaggcggctcagcccggggcacgcccatgcgcagcacctcggtgagggctgcaggcggacgccctgtcttcccgccctcagaggaacatgctttctgtgccaacctggggcccgtccagagcagcagcagcagcgagggcctggccagagcccaggggctcagcagcgaagcttctgtggagagcaacgaggtacggattctttctttcttggtctcccatagccggtccctggctgggatgcctgacatcccccagttactttaagatgagcatgtatgtaagaagcagctgctgcacgtgtgtgctgcactgggacgtgctgtgtccagggtctggcttctcagacgacagcgaacgcaccggaagcccctgtgtggcgggtggggggtttcacgaagcctctcaagcccctgtgtggcgggtgggggtttcaccaaggctctcaagttagcccgcgcactctttcagatgcacgcctctcactgcaggactcggatcatgcctgtaaaagctcagctcgcaaacaagctaaaagttacatgaagaccaagaatcctgacagccagtggcctccccgcgctgcaactgacagggaaggctttctcgctgagtccagcccccagactcagagggccccctactcaggaccccaggtaagaccgcttgtgaaactggaggttacactcagagacggcactttttgtgacttaggaggcatgtgttgtgtatatgacgtgccaggcgctgctaggagaacagaatggcggtggcatccccatggcctgttaggctccacaggctcacagccggctccatggctggcagccccgctgcagcgcttctactctgttcctctccacggaaaggacctgtctccctgctttccatactggagttggcctccctgagcctggggagaagaaaagcacacttgacctcagagctgcctgcaggagtctgacaagatgtggttgaagcagagacaggaactacacacagtgtgtgcttggtgatggttacagctgccaccatcctcctcctttctgtggtccctctgaccacacattaccttagggatcagaggtgtgactcacagctcagctgtctcacctgtgtctgctgagttctcctaccctgtgtgggcagaagaggcacggagaggagaggcagagggaagctctggttggttatttggtttgtttgttcgagacggagtctcgcactgtcatctgggctggagtgcagtggcgcgatctcggctcactgcaacctcctcctcctgggttcaagcgattctcctgcctcagcctcccaagtagctgggattacaggcacccgccaccatgcccatctaattttttgtatttttagtagagacgggatttcactatgttggccaggctggtctcaaattcctgacatcgtgatccgcccgcctcgacctcccaaagtgctgggattacaggcgtgagccaccacacctggcctggtgccatgcccggcctggctggttatttgttaaagcactggctttgctgttcagtagagccttggatttgccggcttctccctgcagcccctggctcagtgagcaggcacacgtctcggtcccttcaacatacgttgagtggagtctggtcagggtagtgtcctaagtatgtttctttcagaaaatagcttgaagaaaatgtcagagtaacatttgtttgtccattaaaagcaataaactctcaaaagtaggatttctggagttgaaaagtaaatgaaatgaaaatatcactagacgagctcacagcagaattgagcaggcagaagagtcagacaacttgtgaacacaggtcacctgagatcatctcgcttgaggaacagaaagaatgagtaaaaaaaattaacagaaatctgtgatcccctcaagcacaccgacaccaccccatacagtggcattccagaaggagagcagaaacgatgggtgagaaacagcctgaccatctcagtggatcagaaacacggatcttacatccagggagctcggtgaactccagacaggtgaactcggagaagagctgcgcttagacaagtggaaatcagaacatccgacactgagactctagaattagagggcagcgctctccgcctacaaagcattgtcgagatcagcagctccatggtcccttcacagaactgagcatgtgtgggaggaggaggccagtttctggtgatgaacatacattgtccccacgtggccgaccatagtgtgaggactcacctgcctgcaacatcctgccctgcctgagccaccagagtaggaggggacagcctgggcgccacacacaaggcactgtcttggttctgagcctggggaagtggtggggctccgagtggaggaaaacgtctctgcttcgtcgtcagccactacctcccccaacctgtcccctgtgcctgccaggaccttgccgcactgctggagcagatcgggtgtctgaagtacctgcaggtgtttgaggagcaggacgtggacctccgcatctttctgaccctcactgagagcgacctgaaggaaattggcatcacgtgcgtccagaagggccgctctggccctcagcccggggttggggcaaactcccactcatgtaagcgctcttgggacgctgaggcatatcctggtcacattccccccgcaggctgtttgggcccaagaggaagatgacgtccgccattgcccgctggcacagcagtgcccgcccacccggggatgccctggagctggcctacgccgaccggctggaggctgagatgcaggagctcgccatccagctgcacaaggtgagtggctgggtgggggatgggggggcagggtgacacccgtgagttggctccatctctgacagaaaaggtgggtgctgtgtggaggggtcaggtggatgcagtggggagagggccccacacacaggacagggccgtggccaagggtctggcttgaccggccacctcccagcctccccgcgccccccacccccctgcagcgctgcgaggaggtagaggccacgcggggccaggtgtgtcaggagcaggagctgcgcgccgtggtggagagctgcctgctggagcaggaccgcgcccgcgaggacctccaggcccggctgcgggagacgtgggccctggcccgggatgctgccctcgtcctggaccagctgcggtgagtggctctgagctgccctgggctgggtctccagtggtcagccacctggcccctgggcccccacacatcctttcctcctgattttgtaactgaggggtggatttcagggtctggagccaccccacccccatttcatcaggcccttccttcctgcaggcagacccaggcaggagttgggtccgggaatctgcaccggtcgccctcctgctctttagtgcagcctcatggggcactggcccagcccatgagggccagctgcaaggacagggctgagcccctccctcccctagaaggtctgaggtgggggctctgcagcggccaggcctctgctctcaccaatatttgtttctgtgtctggcagagcctgtcaagctgagctgtcatctcgagtgaggcaggaccagccccctggtgcagccactctgggcctagccgtccccccagctggtaagagcagtggcctgactccgcactgggcagaggggaaggtgggggagccctgaagccaggtttgacccagtgggcttggcctggttctccggccggcagccactctcccaggtccctgtgtgcacatgatcccagagtccaaggaaaagagggggccctggggacccaagcccacttcctcacctgtgacaggaaaactgcctatcccccaggggtaggaggtactcgagaaaggccctgtgccttggctggctgtgctgtgctgagaccgccagtgacttctgtagcctccagccagggcccagacccgggtccccaccggcagagctttgccttctctcgggctgacccgggcctcgtagtgtttgctcagcctgtgggaggaagggcacaacagggcttccctgcctcggccttgggaggttgcttagacactgtcaggcgggtagggaggttctgatccaagcaggttctcctggttgcatgggctcagaataaagcagggcctgtggggacgcagacccccagctaactcggtccctgcacctgcaccacagactccaagggctggcaagcgtccctgcaggccatgagcctccccgagctctcgggagccctggaggaccgtgtccgtgagatgggtgagtctccggggaccagacgactgagcgctccttttgtttccgagggaggcaaagggacccctttccagggaaagcgggtttgtgtctctctaccccaaggctgacctcggggctggggccataacgggtgaggggcaggtcacatcctgcagctgagaccccggggcagcaccacccagccctcctgagcctggccgggagaggctcaaggtcatcattcctcagggcaagcactgtgcttagtgacccagagcctggagaagctgcaggtgctgaacgggaagaagtggcgggagacctagcctgcgggccggtgagtgtctgccagcctggatcccgcgtggtgggagcagcagggcctgtctgggcggctgcaggtgtgggtatgcacccacctgtccccctcccttctcaccggggctttttctttcagaatctgacgttgggtgattggtccaccctgaagctgtgtgccagggagtgaggaggacagtgagcaggtagctgccatgtgcagcccaggcccagtgggggccagaggatcaggccccgggagcagccggcagacagaggcaagacgggggctgcggccctggctcggcagctcgggccagcactgaggcgggacgagggcctcacccagaacctcgtggtgaggcccagagttcatgggctgccctggcccataccaggcagggccctggggggaaagtgtatccatatacacgcacaggtgccaactgaggtgggaccttaggaatgaggactggggcacctggaaaatgccattttttggaaaataaaatttaagaacagctag
